United States Patent Application Publication US 2026/0375159 A1 - sequence listing, part 3

SEQ ID NO: 11017 - DNA, 5836 bp, synthetic construct
  source 1..5836: mol_type = other DNA
ggtctagttacaactgggcatcgctgcagagatcgcacctcctcgtggtcccgctggtagcccttcgaagggtgactaagtcgatctctgccccaggtacggagccgttgggactcaccagtccaacgtaactcctgcctaaattcggtgaaacaaattcctcggtaaaaagccccatggcccctaagaaaaagcggaaggtgaatatcagcggctctagctgcggcagccccaacagcgccgacaccagcagcgacttcaaggacctgtggaccaagctgaaggaatgccacgaccgggaagtgcagggactccaggtgaaggtcaccaaactcaagcaagaaagaatcctggacgcccagagactggaagaattcttcaccaagaaccagcagctgagagagcagcagaaagtgctgcacgagacaatcaaggttctggaagatagactgcgggccggcctgtgcgacagatgcgccgtgaccgaggaacacatgcgcaaaaagcagcaggagttcgagaacattagacagcaaaatctgaaattgatcacagagctgatgaacgagagaaacacactgcaggaggagaacaagaagctgagcgagcagctgcaacagaagatcgagaatgatcagcaacaccaggccgctgagctggaatgtgaagaggacgtgatccccgacagcccaatcacagctttcagcttttctggcgtgaacagactgaggcggaaggaaaacccccacgtgcggtacatcgagcagacccataccaagctggaacacagcgtgtgtgccaacgagatgagaaaggtgtccaagtcctccacccatccccagcacaaccctaacgaaaatgagatcctggtggctgatacctacgaccagtctcagagccctatggccaaggcccacggcaccagctcttatacccctgataagagctccttcaacctggccaccgtggtggccgagacactgggcctgggcgtgcaggaggaaagcgagacacagggcccaatgagccctctgggagatgagctgtaccactgcctggaaggcaaccacaagaaacagccttttgagtccggctccgagactcctggaacaagcgagagcgctacacctgagggcagcatgggaactgcactaacaccgctcctgacgaagttcgccacgcgctacgagatgggtaccacgcctgaagaagtggcgaacacgctcaagcagacctgtttcaagggccaggtcaatgattcgcagatggtcgccctgctgatcgtggcagaccagtacaagcttaaccccttcaccaaggagttgtacgcattccccgacaagaacaacggcatcgtgccggttgttggtgtggatggctgggctcggatcatcaacgagaacccacagttcgatggcatggaattctcaatggaccagcagggaaccgaatgcacctgcaagatctatcggaaggaccgcagccatgccatcagcgcgactgagtacatggccgagtgcaagcggaacacccagccttggcagtcccatccgcgccggatgcttcgccacaaggcaatgatccagtgcgcacgcctcgcgttcgggttcgccggcatatacgaccaggacgaggccgagcggatcgttgaacgagacgtcactcccgcagagcagtacgaggacgtcagcgaggcgatctgcctgatcaaggactccccaacaatggaggacttgcaggcagcattcagcaatgcctggaaagcctataagacaaagggcgcgcgcgaccagcttacggcggccaaggaccagcggaagaaagaattgctggacgcccctatagacgttgaattcgaggagaccggcgatgatcgagcagcgagcggctctgagacacctggaacaagcgagagcgccaccccggaatcctacgaacagctggctccccagccctgtgtaggcgagacattacacagcagcctgcccagagacagcgagctgttcgttccggaagagggctctagcgagaaggagagcgaggacgctcctaagaccagccctcctacccctggcaaacacggcctggagcaaacaggcgaggagaaggtcatggtgaccgtgcccgacaagaaccctccctgtccttgctgtggcacaagagtcaacagcgtgctgaacctcatcgagcacctgaaggtgtcccacggcaagagaggcgtgtgcttcagatgcgccaagtgcggcaaggagaacagcaactaccacagcgtcgtgtgccacttcaagaagtgcagaggccctgagaccgagaaggctcccgctggcgaatggatttgcgaggtgtgcaacagagacttcaccaccaagatcggcctgggccagcacaagcggttagctcaccctgctgtgagaaaccaggagagaatcgtggccagccagcccaaggagacaagcaacaggggcgctcacaagagatgctggaccaaggaggaagaggagctgctcatcagactggaggctcagttcgagggcaacaagaacatcaataagcttatcgccgagcacatcaccacaaagaccgccaagcagatcagcgacaagaggagactgctgtccagaaagcccgccgaggagcctagaatggaacctggtacatgtcaccacaccagaagagccgccgctagcctgagaaccgagcccgaaatgtctcaccacgctcaggccgaggacagagacaacggccctggcaggagacctcttcccggcagagctgctgctggaggcagaaccatggacgagatcaggagacaccccgataagggcaacggccagcagagacccacaaagcagaagtccgaggaacagctccaggcctactacaagaaaaccctggaggagagactgtccgcgggagctctgaacaccttccctagagccttcaaacaagtcatggagggcagagacatcaagctggtgatcaaccagaccgcccaggactgcttcggctgccttgagtctatcagccagatcaggaccgccacacgggataagaaggacaccgtcaccagagagaagcaccccaagaagcccttccagaaatggatgaagaagagggccatcaagaagggcaattacctgagattccagaggctgttctacctggacagaggcaagctggccaagatcatcctggacgacatcgagtgcctgagctgcgacatccctctgagcgagatctacagcgtgttcaagaccagatgggagaccaccggcagcttcaagtctctgggcgacttcaagacatacggcaaggccgacaacaccgccttcagagagctcatcaccgctaaggagatcgagaagaacgtgcaggagatgagcaagggcagcgctcctggccccgatggaattacactgggcgatgtggtgaagatggaccccgagttcagcagaacaatggagatcttcaacctgtggctcaccacaggcaagatccccgacatggtgagaggctgcagaaccgtgcttatccccaagagcagcaagcccgacagactgaaggatatcaacaactggagacccatcaccatcggcagcatcctgctgcggctgttcagccggattgtgaccgctagactgagcaaagcctgtcccctgaaccccagacagagaggcttcatcagagccgctggctgcagcgagaacctgaagctgctccagacaatcatctggagcgccaagagagagcacagacccctgggcgttgttttcgtggacatcgccaaggccttcgacaccgtgtcccatcagcacattatccacgccctgcagcagagggaggtcgaccctcatattgtgggcctggtgtccaacatgtacgagaacatctccacctatattacgaccaagagaaacacccacacagacaagatccagatccgggtcggcgtcaagcagggcgatcctatgtctcctctgctgttcaacctcgccatggaccctctgctctgcaagctcgaggagtctggaaagggctaccatagaggccaatcatcgatcaccgccatggccttcgccgacgacctggtgcttttaagcgacagctgggagaacatgaacaccaacatctctatcctggagacattctgcaaccttaccggcctgaaaacccagggccagaagtgtcatggcttctacatcaaacccaccaagaagagctacaccatcaacgactgcgccgcctggacaatcaacggcacccctctcaacatgatcgaccccggcgagtctgagaagtacctgggcctgcagttcgatccctggatcggcatcgctagaagcggcttgagcaccaagctggacttttggctccaacgcatagaccaggcccccctgaagcctcttcagaaactggacattttgaaaacttatacgatccccagactcatctacatcgccgaccactccgaggtcaagagcgctctgctggaaaccctggaccagaaaatcagaaccgccgtcaaggaatggctgcacctgcccccttgcacatgcgacgctatcctgtacagcagcaccagggacggcggcttaggaatcaccaagttagccggcctcatccccagcgtgcaggctaggagactccacagaatcgcccagagcagcgacgacaccatgaagtgcttcatggagaaggaaaagatggagcagctgcacaagaagctgtggatccaagcgggcggagatcgtgagaacattcccagcatctgggaggcccctcccagctcagaacctcccaataacgtgtccaccaattctgaatgggaggctcccacccagaaggataagtttcccaagccctgcaactggcggaagaacgagttcaaaaaatggacaaagctggctagccagggcaggggcatcgtgaacttcgaaagggacaagattagcaaccactggatccagtactacagaagaatcccccacagaaagctcctcaccgccctccagttacgtgcaaacgtgtacccaaccagagaattcctggccagaggcagacaggaccagtacatcaaggcctgccggcactgcgatgccgataacgagagctgtgctcacatcatcggcaactgccccgtcacccaggacgccagaatcaagagacacaactacatctgcgagttacttctggaggaagccaagaagaaggattgggttgtgttcaaggagccccacatcagagactccaacaaggagctgtacaagccagacctcatcttcgtgaaggacggcagagccctggtggtggacgtcaccgtcagatacgaggctgctaagtccagccttgaggaggctgccgccgagaaagtgcggaagtacaagcacctggaaacagaggtcagacacctcaccaacgccaaggacgttaccttcgtgggcttccccctaggtgctagaggcaaatggcaccaggacaacttcaagctgcttaccgagctgggcctctccaagagccgacaggttaagatggccgagaccttcagcaccgtcgccctgttctcttctgtggacattgtgcacatgttcgcctccagagccagaaagagcatggtgatgtgataataggctgccttctgcggggcttgccttctggccatgcccttcttctctcccttgcacctgtacctcttggtctttgaataaagcctgagtaggaaggaccggtaaaaaaaaaaaaaaaaaaaaaaaaaaaaaaacgttgactaaaaaaaaaaaaaaaaaaaaaaaaaaaaaaaaaaaaaaaaaaaaaaaaaaaaaaaaaaaaaaaaaaaaaa

SEQ ID NO: 11018 - DNA, 5389 bp, synthetic construct
  source 1..5389: mol_type = other DNA
ggtctagttacaactgggcatcgctgcagagatcgcacctcctcgtggtcccgctggtagcccttcgaagggtgactaagtcgatctctgccccaggtacggagccgttgggactcaccagtccaacgtaactcctgcctaaattcggtgaaacaaattcctcggtaaaaagccccatggcccctaagaaaaagcggaaggtgaatatcagcggctctagctgcggcagccccaacagcgccgacaccagcagcgacttcaaggacctgtggaccaagctgaaggaatgccacgaccgggaagtgcagggactccaggtgaaggtcaccaaactcaagcaagaaagaatcctggacgcccagagactggaagaattcttcaccaagaaccagcagctgagagagcagcagaaagtgctgcacgagacaatcaaggttctggaagatagactgcgggccggcctgtgcgacagatgcgccgtgaccgaggaacacatgcgcaaaaagcagcaggagttcgagaacattagacagcaaaatctgaaattgatcacagagctgatgaacgagagaaacacactgcaggaggagaacaagaagctgagcgagcagctgcaacagaagatcgagaatgatcagcaacaccaggccgctgagctggaatgtgaagaggacgtgatccccgacagcccaatcacagctttcagcttttctggcgtgaacagactgaggcggaaggaaaacccccacgtgcggtacatcgagcagacccataccaagctggaacacagcgtgtgtgccaacgagatgagaaaggtgtccaagtcctccacccatccccagcacaaccctaacgaaaatgagatcctggtggctgatacctacgaccagtctcagagccctatggccaaggcccacggcaccagctcttatacccctgataagagctccttcaacctggccaccgtggtggccgagacactgggcctgggcgtgcaggaggaaagcgagacacagggcccaatgagccctctgggagatgagctgtaccactgcctggaaggcaaccacaagaaacagccttttgagtccggctccgagactcctggaacaagcgagagcgctacacctgagggcagccctaagagaaaggtgtccagcgccgagggcgctgccaaggaagagcctaaacggagaagcgccagactgagcgccaagccccccgccaaggtggaagccaagcctaagaaggccgccgctaaggacaagagcagcgataagaaagtccagaccaagggcaagcggggcgccaaaggcaaacaggccgaggtggccaaccaggagacaaaggaagatctgcctgctgagaacggcgaaaccaagaccgaggaatctccagcttctgacgaggccggagagaaggaggccaaaagcgacagcggctctgagacacctggaacaagcgagagcgccaccccggaatcctacgaacagctggctccccagccctgtgtaggcgagacattacacagcagcctgcccagagacagcgagctgttcgttccggaagagggctctagcgagaaggagagcgaggacgctcctaagaccagccctcctacccctggcaaacacggcctggagcaaacaggcgaggagaaggtcatggtgaccgtgcccgacaagaaccctccctgtccttgctgtggcacaagagtcaacagcgtgctgaacctcatcgagcacctgaaggtgtcccacggcaagagaggcgtgtgcttcagatgcgccaagtgcggcaaggagagaagcaactaccacagcgtcgtgtgccacttcaagaagtgcagaggccctgagaccgagaaggctcccgctggcgaatggatttgcgaggtgtgcaacagagacttcaccaccaagatcggcctgggccagcacaagcggttagctcaccctgctgtgagaaaccaggagagaatcgtggccagccagcccaaggagacaagcaacaggggcgctcacaagagatgctggaccaaggaggaagaggagctgctcatcagactggaggctcagttcgagggcaacaagaacatcaataagcttatcgccgagcacatcaccacaaagaccgccaagcagatcagcgacaagaggagactgctgtccagaaagcccgccgaggagcctagaatggaacctggtacatgtcaccacaccagaagagccgccgctagcctgagaaccgagcccgaaatgtctcaccacgctcaggccgaggacagagacaacggccctggcaggagacctcttcccggcagagctgctgctggaggcagaaccatggacgagatcaggagacaccccgataagggcaacggccagcagagacccacaaagcagaagtccgaggaacagctccaggcctactacaagaaaaccctggaggagagactgtccgcgggagctctgaacaccttccctagagccttcaaacaagtcatggagggcagagacatcaagctggtgatcaaccagaccgcccaggactgcttcggctgccttgagtctatcagccagatcaggaccgccacacgggataagaaggacaccgtcaccagagagaagcaccccaagaagcccttccagaaatggatgaagaagagggccatcaagaagggcaattacctgagattccagaggctgttctacctggacagaggcaagctggccaagatcatcctggacgacatcgagtgcctgagctgcgacatccctctgagcgagatctacagcgtgttcaagaccagatgggagaccaccggcagcttcaagtctctgggcgacttcaagacatacggcaaggccgacaacaccgccttcagagagctcatcaccgctaaggagatcgagaagaacgtgcaggagatgagcaagggcagcgctcctggccccgatggaattacactgggcgatgtggtgaagatggaccccgagttcagcagaacaatggagatcttcaacctgtggctcaccacaggcaagatccccgacatggtgagaggctgcagaaccgtgcttatccccaagagcagcaagcccgacagactgaaggatatcaacaactggagacccatcaccatcggcagcatcctgctgcggctgttcagccggattgtgaccgctagactgagcaaagcctgtcccctgaaccccagacagagaggcttcatcagagccgctggctgcagcgagaacctgaagctgctccagacaatcatctggagcgccaagagagagcacagacccctgggcgttgttttcgtggacatcgccaaggccttcgacaccgtgtcccatcagcacattatccacgccctgcagcagagggaggtcgaccctcatattgtgggcctggtgtccaacatgtacgagaacatctccacctatattacgaccaagagaaacacccacacagacaagatccagatccgggtcggcgtcaagcagggcgatcctatgtctcctctgctgttcaacctcgccatggaccctctgctctgcaagctcgaggagtctggaaagggctaccatagaggccaatcatcgatcaccgccatggccttcgccgacgacctggtgcttttaagcgacagctgggagaacatgaacaccaacatctctatcctggagacattctgcaaccttaccggcctgaaaacccagggccagaagtgtcatggcttctacatcaaacccaccaagaagagctacaccatcaacgactgcgccgcctggacaatcaacggcacccctctcaacatgatcgaccccggcgagtctgagaagtacctgggcctgcagttcgatccctggatcggcatcgctagaagcggcttgagcaccaagctggacttttggctccaacgcatagaccaggcccccctgaagcctcttcagaaactggacattttgaaaacttatacgatccccagactcatctacatcgccgaccactccgaggtcaagagcgctctgctggaaaccctggaccagaaaatcagaaccgccgtcaaggaatggctgcacctgcccccttgcacatgcgacgctatcctgtacagcagcaccagggacggcggcttaggaatcaccaagttagccggcctcatccccagcgtgcaggctaggagactccacagaatcgcccagagcagcgacgacaccatgaagtgcttcatggagaaggaaaagatggagcagctgcacaagaagctgtggatccaagcgggcggagatcgtgagaacattcccagcatctgggaggcccctcccagctcagaacctcccaataacgtgtccaccaattctgaatgggaggctcccacccagaaggataagtttcccaagccctgcaactggcggaagaacgagttcaaaaaatggacaaagctggctagccagggcaggggcatcgtgaacttcgaaagggacaagattagcaaccactggatccagtactacagaagaatcccccacagaaagctcctcaccgccctccagttacgtgcaaacgtgtacccaaccagagaattcctggccagaggcagacaggaccagtacatcaaggcctgccggcactgcgatgccgataacgagagctgtgctcacatcatcggcaactgccccgtcacccaggacgccagaatcaagagacacaactacatctgcgagttacttctggaggaagccaagaagaaggattgggttgtgttcaaggagccccacatcagagactccaacaaggagctgtacaagccagacctcatcttcgtgaaggacggcagagccctggtggtggacgtcaccgtcagatacgaggctgctaagtccagccttgaggaggctgccgccgagaaagtgcggaagtacaagcacctggaaacagaggtcagacacctcaccaacgccaaggacgttaccttcgtgggcttccccctaggtgctagaggcaaatggcaccaggacaacttcaagctgcttaccgagctgggcctctccaagagccgacaggttaagatggccgagaccttcagcaccgtcgccctgttctcttctgtggacattgtgcacatgttcgcctccagagccagaaagagcatggtgatgtgataataggctgccttctgcggggcttgccttctggccatgcccttcttctctcccttgcacctgtacctcttggtctttgaataaagcctgagtaggaaggaccggtaaaaaaaaaaaaaaaaaaaaaaaaaaaaaaacgttgactaaaaaaaaaaaaaaaaaaaaaaaaaaaaaaaaaaaaaaaaaaaaaaaaaaaaaaaaaaaaaaaaaaaaaa

SEQ ID NO: 11019 - DNA, 5389 bp, synthetic construct
  source 1..5389: mol_type = other DNA
ggtctagttacaactgggcatcgctgcagagatcgcacctcctcgtggtcccgctggtagcccttcgaagggtgactaagtcgatctctgccccaggtacggagccgttgggactcaccagtccaacgtaactcctgcctaaattcggtgaaacaaattcctcggtaaaaagccccatggcccctaagaaaaagcggaaggtgaatatcagcggctctagctgcggcagccccaacagcgccgacaccagcagcgacttcaaggacctgtggaccaagctgaaggaatgccacgaccgggaagtgcagggactccaggtgaaggtcaccaaactcaagcaagaaagaatcctggacgcccagagactggaagaattcttcaccaagaaccagcagctgagagagcagcagaaagtgctgcacgagacaatcaaggttctggaagatagactgcgggccggcctgtgcgacagatgcgccgtgaccgaggaacacatgcgcaaaaagcagcaggagttcgagaacattagacagcaaaatctgaaattgatcacagagctgatgaacgagagaaacacactgcaggaggagaacaagaagctgagcgagcagctgcaacagaagatcgagaatgatcagcaacaccaggccgctgagctggaatgtgaagaggacgtgatccccgacagcccaatcacagctttcagcttttctggcgtgaacagactgaggcggaaggaaaacccccacgtgcggtacatcgagcagacccataccaagctggaacacagcgtgtgtgccaacgagatgagaaaggtgtccaagtcctccacccatccccagcacaaccctaacgaaaatgagatcctggtggctgatacctacgaccagtctcagagccctatggccaaggcccacggcaccagctcttatacccctgataagagctccttcaacctggccaccgtggtggccgagacactgggcctgggcgtgcaggaggaaagcgagacacagggcccaatgagccctctgggagatgagctgtaccactgcctggaaggcaaccacaagaaacagccttttgagtccggctccgagactcctggaacaagcgagagcgctacacctgagggcagccctaagagaaaggtgtccagcgccgagggcgctgccaaggaagagcctaaacggagaagcgccagactgagcgccaagccccccgccaaggtggaagccaagcctaagaaggccgccgctaaggacaagagcagcgataagaaagtccagaccaagggcaagcggggcgccaaaggcaaacaggccgaggtggccaaccaggagacaaaggaagatctgcctgctgagaacggcgaaaccaagaccgaggaatctccagcttctgacgaggccggagagaaggaggccaaaagcgacagcggctctgagacacctggaacaagcgagagcgccaccccggaatcctacgaacagctggctccccagccctgtgtaggcgagacattacacagcagcctgcccagagacagcgagctgttcgttccggaagagggctctagcgagaaggagagcgaggacgctcctaagaccagccctcctacccctggcaaacacggcctggagcaaacaggcgaggagaaggtcatggtgaccgtgcccgacaagaaccctccctgtccttgctgtggcacaagagtcaacagcgtgctgaacctcatcgagcacctgaaggtgtcccacggcaagagaggcgtgtgcttcagatgcgccaagtgcggcaaggagaacagcaactaccacagcgtcgtgtgccacttcaagaagtgcagaggccctgagaccgagaaggctcccgctggcgaatggatttgcgaggtgtgcaacagagacttcaccaccaagatcggcctgggccagcacaagcggttagctcaccctgctgtgagaaaccaggagagaatcgtggccagccagcccaaggagacaagcaacaggggcgctcacaagagatgctggaccaaggaggaagaggagctgctcatcagactggaggctcagttcgagggcaacaagaacatcaataagcttatcgccgagcacatcaccacaaagaccgccaagcagatcagcgacaagaggagactgctgtccagaaagcccgccgaggagcctagaatggaacctggtacatgtcaccacaccagaagagccgccgctagcctgagaaccgagcccgaaatgtctcaccacgctcaggccgaggacagagacaacggccctggcaggagacctcttcccggcagagctgctgctggaggcagaaccatggacgagatcaggagacaccccgataagggcaacggccagcagagacccacaaagcagaagtccgaggaacagctccaggcctactacaagaaaaccctggaggagagactgtccgcgggagctctgaacaccttccctagagccttcaaacaagtcatggagggcagagacatcaagctggtgatcaaccagaccgcccaggactgcttcggctgccttgagtctatcagccagatcaggaccgccacacgggataagaaggacaccgtcaccagagagaagcaccccaagaagcccttccagaaatggatgaagaagagggccatcaagaagggcaattacctgagattccagaggctgttctacctggacagaggcaagctggccaagatcatcctggacgacatcgagtgcctgagctgcgacatccctctgagcgagatctacagcgtgttcaagaccagatgggagaccaccggcagcttcaagtctctgggcgacttcaagacatacggcaaggccgacaacaccgccttcagagagctcatcaccgctaaggagatcgagaagaacgtgcaggagatgagcaagggcagcgctcctggccccgatggaattacactgggcgatgtggtgaagatggaccccgagttcagcagaacaatggagatcttcaacctgtggctcaccacaggcaagatccccgacatggtgagaggctgcagaaccgtgcttatccccaagagcagcaagcccgacagactgaaggatatcaacaactggagacccatcaccatcggcagcatcctgctgcggctgttcagccggattgtgaccgctagactgagcaaagcctgtcccctgaaccccagacagagaggcttcatcagagccgctggctgcagcgagaacctgaagctgctccagacaatcatctggagcgccaagagagagcacagacccctgggcgttgttttcgtggacatcgccaaggccttcgacaccgtgtcccatcagcacattatccacgccctgcagcagagggaggtcgaccctcatattgtgggcctggtgtccaacatgtacgagaacatctccacctatattacgaccaagagaaacacccacacagacaagatccagatccgggtcggcgtcaagcagggcgatcctatgtctcctctgctgttcaacctcgccatggaccctctgctctgcaagctcgaggagtctggaaagggctaccatagaggccaatcatcgatcaccgccatggccttcgccgacgacctggtgcttttaagcgacagctgggagaacatgaacaccaacatctctatcctggagacattctgcaaccttaccggcctgaaaacccagggccagaagtgtcatggcttctacatcaaacccaccaagaagagctacaccatcaacgactgcgccgcctggacaatcaacggcacccctctcaacatgatcgaccccggcgagtctgagaagtacctgggcctgcagttcgatccctggatcggcatcgctagaagcggcttgagcaccaagctggacttttggctccaacgcatagaccaggcccccctgaagcctcttcagaaactggacattttgaaaacttatacgatccccagactcatctacatcgccgaccactccgaggtcaagagcgctctgctggaaaccctggaccagaaaatcagaaccgccgtcaaggaatggctgcacctgcccccttgcacatgcgacgctatcctgtacagcagcaccagggacggcggcttaggaatcaccaagttagccggcctcatccccagcgtgcaggctaggagactccacagaatcgcccagagcagcgacgacaccatgaagtgcttcatggagaaggaaaagatggagcagctgcacaagaagctgtggatccaagcgggcggagatcgtgagaacattcccagcatctgggaggcccctcccagctcagaacctcccaataacgtgtccaccaattctgaatgggaggctcccacccagaagcccaagtttcccaagccctgcaactggcggaagaacgagttcaaaaaatggacaaagctggctagccagggcaggggcatcgtgaacttcgaaagggacaagattagcaaccactggatccagtactacagaagaatcccccacagaaagctcctcaccgccctccagttacgtgcaaacgtgtacccaaccagagaattcctggccagaggcagacaggaccagtacatcaaggcctgccggcactgcgatgccgataacgagagctgtgctcacatcatcggcaactgccccgtcacccaggacgccagaatcaagagacacaactacatctgcgagttacttctggaggaagccaagaagaaggattgggttgtgttcaaggagccccacatcagagactccaacaaggagctgtacaagccagacctcatcttcgtgaaggacggcagagccctggtggtggacgtcaccgtcagatacgaggctgctaagtccagccttgaggaggctgccgccgagaaagtgcggaagtacaagcacctggaaacagaggtcagacacctcaccaacgccaaggacgttaccttcgtgggcttccccctaggtgctagaggcaaatggcaccaggacaacttcaagctgcttaccgagctgggcctctccaagagccgacaggttaagatggccgagaccttcagcaccgtcgccctgttctcttctgtggacattgtgcacatgttcgcctccagagccagaaagagcatggtgatgtgataataggctgccttctgcggggcttgccttctggccatgcccttcttctctcccttgcacctgtacctcttggtctttgaataaagcctgagtaggaaggaccggtaaaaaaaaaaaaaaaaaaaaaaaaaaaaaaacgttgactaaaaaaaaaaaaaaaaaaaaaaaaaaaaaaaaaaaaaaaaaaaaaaaaaaaaaaaaaaaaaaaaaaaaaa

SEQ ID NO: 11020 - DNA, 5389 bp, synthetic construct
  source 1..5389: mol_type = other DNA
ggtctagttacaactgggcatcgctgcagagatcgcacctcctcgtggtcccgctggtagcccttcgaagggtgactaagtcgatctctgccccaggtacggagccgttgggactcaccagtccaacgtaactcctgcctaaattcggtgaaacaaattcctcggtaaaaagccccatggcccctaagaaaaagcggaaggtgaatatcagcggctctagctgcggcagccccaacagcgccgacaccagcagcgacttcaaggacctgtggaccaagctgaaggaatgccacgaccgggaagtgcagggactccaggtgaaggtcaccaaactcaagcaagaaagaatcctggacgcccagagactggaagaattcttcaccaagaaccagcagctgagagagcagcagaaagtgctgcacgagacaatcaaggttctggaagatagactgcgggccggcctgtgcgacagatgcgccgtgaccgaggaacacatgcgcaaaaagcagcaggagttcgagaacattagacagcaaaatctgaaattgatcacagagctgatgaacgagagaaacacactgcaggaggagaacaagaagctgagcgagcagctgcaacagaagatcgagaatgatcagcaacaccaggccgctgagctggaatgtgaagaggacgtgatccccgacagcccaatcacagctttcagcttttctggcgtgaacagactgaggcggaaggaaaacccccacgtgcggtacatcgagcagacccataccaagctggaacacagcgtgtgtgccaacgagatgagaaaggtgtccaagtcctccacccatccccagcacaaccctaacgaaaatgagatcctggtggctgatacctacgaccagtctcagagccctatggccaaggcccacggcaccagctcttatacccctgataagagctccttcaacctggccaccgtggtggccgagacactgggcctgggcgtgcaggaggaaagcgagacacagggcccaatgagccctctgggagatgagctgtaccactgcctggaaggcaaccacaagaaacagccttttgagtccggctccgagactcctggaacaagcgagagcgctacacctgagggcagccctaagagaaaggtgtccagcgccgagggcgctgccaaggaagagcctaaacggagaagcgccagactgagcgccaagccccccgccaaggtggaagccaagcctaagaaggccgccgctaaggacaagagcagcgataagaaagtccagaccaagggcaagcggggcgccaaaggcaaacaggccgaggtggccaaccaggagacaaaggaagatctgcctgctgagaacggcgaaaccaagaccgaggaatctccagcttctgacgaggccggagagaaggaggccaaaagcgacagcggctctgagacacctggaacaagcgagagcgccaccccggaatcctacgaacagctggctccccagccctgtgtaggcgagacattacacagcagcctgcccagagacagcgagctgttcgttccggaagagggctctagcgagaaggagagcgaggacgctcctaagaccagccctcctacccctggcaaacacggcctggagcaaacaggcgaggagaaggtcatggtgaccgtgcccgacaagaaccctccctgtccttgctgtggcacaagagtcaacagcgtgctgaacctcatcgagcacctgaaggtgtcccacggcaagagaggcgtgtgcttcagatgcgccaagtgcggcaaggagaacagcaactaccacagcgtcgtgtgccacttcaagaagtgcagaggccctgagaccgagaaggctcccgctggcgaatggatttgcgaggtgtgcaacagagacttcaccaccaagatcggcctgggccagcacaagcggttagctcaccctgctgtgagaaaccaggagagaatcgtggccagccagcccaaggagacaagcaacaggggcgctcacaagagatgctggaccaaggaggaagaggagctgctcatcagactggaggctcagttcgagggcaacaagaacatcaataagcttatcgccgagcacatcaccacaaagaccgccaagcagatcagcgacaagaggagactgctgtccagaaagcccgccgaggagcctagaatggaacctggtacatgtcaccacaccagaagagccgccgctagcctgagaaccgagcccgaaatgtctcaccacgctcaggccgaggacagagacaacggccctggcaggagacctcttcccggcagagctgctgctggaggcagaaccatggacgagatcaggagacaccccgataagggcaacggccagcagagacccacaaagcagaagtccgaggaacagctccaggcctactacaagaaaaccctggaggagagactgtccgcgggagctctgaacaccttccctagagccttcaaacaagtcatggagggcagagacatcaagctggtgatcaaccagaccgcccaggactgcttcggctgccttgagtctatcagccagatcaggaccgccacacgggataagaaggacaccgtcaccagagagaagcaccccaagaagcccttccagaaatggatgaagaagagggccatcaagaagggcaattacctgagattccagaggctgttctacctggacagaggcaagctggccaagatcatcctggacgacatcgagtgcctgagctgcgacatccctctgagcgagatctacagcgtgttcaagaccagatgggagaccaccggcagcttcaagtctctgggcgacttcaagacatacggcaaggccgacaacaccgccttcagagagctcatcaccgctaaggagatcgagaagaacgtgcaggagatgagcaagggcagcgctcctggccccgatggaattacactgggcgatgtggtgaagatggaccccgagttcagcagaacaatggagatcttcaacctgtggctcaccacaggcaagatccccgacatggtgagaggctgcagaaccgtgcttatccccaagagcagcaagcccgacagactgaaggatatcaacaactggagacccatcaccatcggcagcatcctgctgcggctgttcagccggattgtgaccgctagactgagcaaagcctgtcccctgaaccccagacagagaggcttcatcagagccgctggctgcagcgagaacctgaagctgctccagacaatcatctggagcgccaagagagagcacagacccctgggcgttgttttcgtggacatcgccaaggccttcgacaccgtgtcccatcagcacattatccacgccctgcagcagagggaggtcgaccctcatattgtgggcctggtgtccaacatgtacgagaacatctccacctatattacgaccaagagaaacacccacacagacaagatccagatccgggtcggcgtcaagcagggcgatcctatgtctcctctgctgttcaacctcgccatggaccctctgctctgcaagctcgaggagtctggaaagggctaccatagaggccaatcatcgatcaccgccatggccttcgccgacgacctggtgcttttaagcgacagctgggagaacatgaacaccaacatctctatcctggagacattctgcaaccttaccggcctgaaaacccagggccagaagtgtcatggcttctacatcaaacccaccaagaagagctacaccatcaacgactgcgccgcctggacaatcaacggcacccctctcaacatgatcgaccccggcgagtctgagaagtacctgggcctgcagttcgatccctggatcggcatcgctagaagcggcttgagcaccaagctggacttttggctccaacgcatagaccaggcccccctgaagcctcttcagaaactggacattttgaaaacttatacgatccccagactcatctacatcgccgaccactccgaggtcaagagcgctctgctggaaaccctggaccagaaaatcagaaccgccgtcaaggaatggctgcacctgcccccttgcacatgcgacgctatcctgtacagcagcaccagggacggcggcttaggaatcaccaagttagccggcctcatccccagcgtgcaggctaggagactccacagaatcgcccagagcagcgacgacaccatgaagtgcttcatggagaaggaaagaatggagcagctgcacaagaagctgtggatccaagcgggcggagatcgtgagaacattcccagcatctgggaggcccctcccagctcagaacctcccaataacgtgtccaccaattctgaatgggaggctcccacccagaaggataagtttcccaagccctgcaactggcggaagaacgagttcaaaaaatggacaaagctggctagccagggcaggggcatcgtgaacttcgaaagggacaagattagcaaccactggatccagtactacagaagaatcccccacagaaagctcctcaccgccctccagttacgtgcaaacgtgtacccaaccagagaattcctggccagaggcagacaggaccagtacatcaaggcctgccggcactgcgatgccgataacgagagctgtgctcacatcatcggcaactgccccgtcacccaggacgccagaatcaagagacacaactacatctgcgagttacttctggaggaagccaagaagaaggattgggttgtgttcaaggagccccacatcagagactccaacaaggagctgtacaagccagacctcatcttcgtgaaggacggcagagccctggtggtggacgtcaccgtcagatacgaggctgctaagtccagccttgaggaggctgccgccgagaaagtgcggaagtacaagcacctggaaacagaggtcagacacctcaccaacgccaaggacgttaccttcgtgggcttccccctaggtgctagaggcaaatggcaccaggacaacttcaagctgcttaccgagctgggcctctccaagagccgacaggttaagatggccgagaccttcagcaccgtcgccctgttctcttctgtggacattgtgcacatgttcgcctccagagccagaaagagcatggtgatgtgataataggctgccttctgcggggcttgccttctggccatgcccttcttctctcccttgcacctgtacctcttggtctttgaataaagcctgagtaggaaggaccggtaaaaaaaaaaaaaaaaaaaaaaaaaaaaaaacgttgactaaaaaaaaaaaaaaaaaaaaaaaaaaaaaaaaaaaaaaaaaaaaaaaaaaaaaaaaaaaaaaaaaaaaaa

SEQ ID NO: 11021 - DNA, 5389 bp, synthetic construct
  source 1..5389: mol_type = other DNA
ggtctagttacaactgggcatcgctgcagagatcgcacctcctcgtggtcccgctggtagcccttcgaagggtgactaagtcgatctctgccccaggtacggagccgttgggactcaccagtccaacgtaactcctgcctaaattcggtgaaacaaattcctcggtaaaaagccccatggcccctaagaaaaagcggaaggtgaatatcagcggctctagctgcggcagccccaacagcgccgacaccagcagcgacttcaaggacctgtggaccaagctgaaggaatgccacgaccgggaagtgcagggactccaggtgaaggtcaccaaactcaagcaagaaagaatcctggacgcccagagactggaagaattcttcaccaagaaccagcagctgagagagcagcagaaagtgctgcacgagacaatcaaggttctggaagatagactgcgggccggcctgtgcgacagatgcgccgtgaccgaggaacacatgcgcaaaaagcagcaggagttcgagaacattagacagcaaaatctgaaattgatcacagagctgatgaacgagagaaacacactgcaggaggagaacaagaagctgagcgagcagctgcaacagaagatcgagaatgatcagcaacaccaggccgctgagctggaatgtgaagaggacgtgatccccgacagcccaatcacagctttcagcttttctggcgtgaacagactgaggcggaaggaaaacccccacgtgcggtacatcgagcagacccataccaagctggaacacagcgtgtgtgccaacgagatgagaaaggtgtccaagtcctccacccatccccagcacaaccctaacgaaaatgagatcctggtggctgatacctacgaccagtctcagagccctatggccaaggcccacggcaccagctcttatacccctgataagagctccttcaacctggccaccgtggtggccgagacactgggcctgggcgtgcaggaggaaagcgagacacagggcccaatgagccctctgggagatgagctgtaccactgcctggaaggcaaccacaagaaacagccttttgagtccggctccgagactcctggaacaagcgagagcgctacacctgagggcagccctaagagaaaggtgtccagcgccgagggcgctgccaaggaagagcctaaacggagaagcgccagactgagcgccaagccccccgccaaggtggaagccaagcctaagaaggccgccgctaaggacaagagcagcgataagaaagtccagaccaagggcaagcggggcgccaaaggcaaacaggccgaggtggccaaccaggagacaaaggaagatctgcctgctgagaacggcgaaaccaagaccgaggaatctccagcttctgacgaggccggagagaaggaggccaaaagcgacagcggctctgagacacctggaacaagcgagagcgccaccccggaatcctacgaacagctggctccccagccctgtgtaggcgagacattacacagcagcctgcccagagacagcgagctgttcgttccggaagagggctctagcgagaaggagagcgaggacgctcctaagaccagccctcctacccctggcaaacacggcctggagcaaacaggcgaggagaaggtcatggtgaccgtgcccgacaagaaccctccctgtccttgctgtggcacaagagtcaacagcgtgctgaacctcatcgagcacctgaaggtgtcccacggcaagagaggcgtgtgcttcagatgcgccaagtgcggcaaggagaacagcaactaccacagcgtcgtgtgccacttcaagaagtgcagaggccctgagaccgagaaggctcccgctggcgaatggatttgcgaggtgtgcaacagagacttcaccaccaagatcggcctgggccagcacaagcggttagctcaccctgctgtgagaaaccaggagagaatcgtggccagccagcccaaggagacaagcaacaggggcgctcacaagagatgctggaccaaggaggaagaggagctgctcatcagactggaggctcagttcgagggcaacaagaacatcaataagcttatcgccgagcacatcaccacaaagaccgccaagcagatcagcgacaagaggagactgctgtccagaaagcccgccgaggagcctagaatggaacctggtacatgtcaccacaccagaagagccgccgctagcctgagaaccgagcccgaaatgtctcaccacgctcaggccgaggacagagacaacggccctggcaggagacctcttcccggcagagctgctgctggaggcagaaccatggacgagatcaggagacaccccgataagggcaacggccagcagagacccacaaagcagaagtccgaggaacagctccaggcctactacaagaaaaccctggaggagagactgtccgcgggagctctgaacaccttccctagagccttcaaacaagtcatggagggcagagacatcaagctggtgatcaaccagaccgcccaggactgcttcggctgccttgagtctatcagccagatcaggaccgccacacgggataagaaggacaccgtcaccagagagaagcaccccaagaagcccttccagaaatggatgaagaagagggccatcaagaagggcaattacctgagattccagaggctgttctacctggacagaggcaagctggccaagatcatcctggacgacatcgagtgcctgagctgcgacatccctctgagcgagatctacagcgtgttcaagaccagatgggagaccaccggcagcttcaagtctctgggcgacttcaagacatacggcaaggccgacaacaccgccttcagagagctcatcaccgctaaggagatcgagaagaacgtgcaggagatgagcaagggcagcgctcctggccccgatggaattacactgggcgatgtggtgaagatggaccccgagttcagcagaacaatggagatcttcaacctgtggctcaccacaggcaagatccccgacatggtgagaggctgcagaaccgtgcttatccccaagagcagcaagcccgacagactgaaggatatcaacaactggagacccatcaccatcggcagcatcctgctgcggctgttcagccggattgtgaccgctagactgagcaaagcctgtcccctgaaccccagacagagaggcttcatcagagccgctggctgcagcgagaacctgaagctgctccagacaatcatctggagcgccaagagagagcacagacccctgggcgttgttttcgtggacatcgccaaggccttcgacaccgtgtcccatcagcacattatccacgccctgcagcagagggaggtcgaccctcatattgtgggcctggtgtccaacatgtacgagaacatctccacctatattacgaccaagagaaacacccacacagacaagatccagatccgggtcggcgtcaagcagggcgatcctatgtctcctctgctgttcaacctcgccatggaccctctgctctgcaagctcgaggagtctggaaagggctaccatagaggccaatcatcgatcaccgccatggccttcgccgacgacctggtgcttttaagcgacagctgggagaacatgaacaccaacatctctatcctggagacattctgcaaccttaccggcctgaaaacccagggccagaagtgtcatggcttctacatcaaacccaccaagaagagctacaccatcaacgactgcgccgcctggacaatcaacggcacccctctcaacatgatcgaccccggcgagtctgagaagtacctgggcctgcagttcgatccctggatcggcatcgctagaagcggcttgagcaccaagctggacttttggctccaacgcatagaccaggcccccctgaagcctcttcagaaactggacattttgaaaacttatacgatccccagactcatctacatcgccgaccactccgaggtcaagagcgctctgctggaaaccctggaccagaaaatcagaaccgccgtcaaggaatggctgcacctgcccccttgcacatgcgacgctatcctgtacagcagcaccagggacggcggcttaggaatcaccaagttagccggcctcatccccagcgtgcaggctaggagactccacagaatcgcccagagcagcgacgacaccatgaagtgcttcatggagaaggaaaagatggagcagctgcacaagaagctgtggatccaagcgggcggagatcgtgagaacattcccagcatctgggaggcccctcccagctcagaacctcccaataacgtgtccaccaattctgaatgggaggctcccacccagaaggataagtttcccaagccctgcaactggcggaagaacgagttcaaaaaatggacaaagctggctagccagggcaggggcatcgtgaacttcgaaagggacaagattagcaaccactggatccagtactacagaggcatcccccacagaaagctcctcaccgccctccagttacgtgcaaacgtgtacccaaccagagaattcctggccagaggcagacaggaccagtacatcaaggcctgccggcactgcgatgccgataacgagagctgtgctcacatcatcggcaactgccccgtcacccaggacgccagaatcaagagacacaactacatctgcgagttacttctggaggaagccaagaagaaggattgggttgtgttcaaggagccccacatcagagactccaacaaggagctgtacaagccagacctcatcttcgtgaaggacggcagagccctggtggtggacgtcaccgtcagatacgaggctgctaagtccagccttgaggaggctgccgccgagaaagtgcggaagtacaagcacctggaaacagaggtcagacacctcaccaacgccaaggacgttaccttcgtgggcttccccctaggtgctagaggcaaatggcaccaggacaacttcaagctgcttaccgagctgggcctctccaagagccgacaggttaagatggccgagaccttcagcaccgtcgccctgttctcttctgtggacattgtgcacatgttcgcctccagagccagaaagagcatggtgatgtgataataggctgccttctgcggggcttgccttctggccatgcccttcttctctcccttgcacctgtacctcttggtctttgaataaagcctgagtaggaaggaccggtaaaaaaaaaaaaaaaaaaaaaaaaaaaaaaacgttgactaaaaaaaaaaaaaaaaaaaaaaaaaaaaaaaaaaaaaaaaaaaaaaaaaaaaaaaaaaaaaaaaaaaaaa

SEQ ID NO: 11022 - DNA, 5389 bp, synthetic construct
  source 1..5389: mol_type = other DNA
ggtctagttacaactgggcatcgctgcagagatcgcacctcctcgtggtcccgctggtagcccttcgaagggtgactaagtcgatctctgccccaggtacggagccgttgggactcaccagtccaacgtaactcctgcctaaattcggtgaaacaaattcctcggtaaaaagccccatggcccctaagaaaaagcggaaggtgaatatcagcggctctagctgcggcagccccaacagcgccgacaccagcagcgacttcaaggacctgtggaccaagctgaaggaatgccacgaccgggaagtgcagggactccaggtgaaggtcaccaaactcaagcaagaaagaatcctggacgcccagagactggaagaattcttcaccaagaaccagcagctgagagagcagcagaaagtgctgcacgagacaatcaaggttctggaagatagactgcgggccggcctgtgcgacagatgcgccgtgaccgaggaacacatgcgcaaaaagcagcaggagttcgagaacattagacagcaaaatctgaaattgatcacagagctgatgaacgagagaaacacactgcaggaggagaacaagaagctgagcgagcagctgcaacagaagatcgagaatgatcagcaacaccaggccgctgagctggaatgtgaagaggacgtgatccccgacagcccaatcacagctttcagcttttctggcgtgaacagactgaggcggaaggaaaacccccacgtgcggtacatcgagcagacccataccaagctggaacacagcgtgtgtgccaacgagatgagaaaggtgtccaagtcctccacccatccccagcacaaccctaacgaaaatgagatcctggtggctgatacctacgaccagtctcagagccctatggccaaggcccacggcaccagctcttatacccctgataagagctccttcaacctggccaccgtggtggccgagacactgggcctgggcgtgcaggaggaaagcgagacacagggcccaatgagccctctgggagatgagctgtaccactgcctggaaggcaaccacaagaaacagccttttgagtccggctccgagactcctggaacaagcgagagcgctacacctgagggcagccctaagagaaaggtgtccagcgccgagggcgctgccaaggaagagcctaaacggagaagcgccagactgagcgccaagccccccgccaaggtggaagccaagcctaagaaggccgccgctaaggacaagagcagcgataagaaagtccagaccaagggcaagcggggcgccaaaggcaaacaggccgaggtggccaaccaggagacaaaggaagatctgcctgctgagaacggcgaaaccaagaccgaggaatctccagcttctgacgaggccggagagaaggaggccaaaagcgacagcggctctgagacacctggaacaagcgagagcgccaccccggaatcctacgaacagctggctccccagccctgtgtaggcgagacattacacagcagcctgcccagagacagcgagctgttcgttccggaagagggctctagcgagaaggagagcgaggacgctcctaagaccagccctcctacccctggcaaacacggcctggagcaaacaggcgaggagaaggtcatggtgaccgtgcccgacaagaaccctccctgtccttgctgtggcacaagagtcaacagcgtgctgaacctcatcgagcacctgaaggtgtcccacggcaagagaggcgtgtgcttcagatgcgccaagtgcggcaaggagaacagcaactaccacagcgtcgtgtgccacttcaagaagtgcagaggccctgagaccgagaaggctcccgctggcgaatggatttgcgaggtgtgcaacagagacttcaccaccaagatcggcctgggccagcacaagcggttagctcaccctgctgtgagaaaccaggagagaatcgtggccagccagcccaaggagacaagcaacaggggcgctcacaagagatgctggaccaaggaggaagaggagctgctcatcagactggaggctcagttcgagggcaacaagaacatcaataagcttatcgccgagcacatcaccacaaagaccgccaagcagatcagcgacaagaggagactgctgtccagaaagcccgccgaggagcctagaatggaacctggtacatgtcaccacaccagaagagccgccgctagcctgagaaccgagcccgaaatgtctcaccaggctcaggccgaggacagagacaacggccctggcaggagacctcttcccggcagagctgctgctggaggcagaaccatggacgagatcaggagacaccccgataagggcaacggccagcagagacccacaaagcagaagtccgaggaacagctccaggcctactacaagaaaaccctggaggagagactgtccgcgggagctctgaacaccttccctagagccttcaaacaagtcatggagggcagagacatcaagctggtgatcaaccagaccgcccaggactgcttcggctgccttgagtctatcagccagatcaggaccgccacacgggataagaaggacaccgtcaccagagagaagcaccccaagaagcccttccagaaatggatgaagaagagggccatcaagaagggcaattacctgagattccagaggctgttctacctggacagaggcaagctggccaagatcatcctggacgacatcgagtgcctgagctgcgacatccctctgagcgagatctacagcgtgttcaagaccagatgggagaccaccggcagcttcaagtctctgggcgacttcaagacatacggcaaggccgacaacaccgccttcagagagctcatcaccgctaaggagatcgagaagaacgtgcaggagatgagcaagggcagcgctcctggccccgatggaattacactgggcgatgtggtgaagatggaccccgagttcagcagaacaatggagatcttcaacctgtggctcaccacaggcaagatccccgacatggtgagaggctgcagaaccgtgcttatccccaagagcagcaagcccgacagactgaaggatatcaacaactggagacccatcaccatcggcagcatcctgctgcggctgttcagccggattgtgaccgctagactgagcaaagcctgtcccctgaaccccagacagagaggcttcatcagagccgctggctgcagcgagaacctgaagctgctccagacaatcatctggagcgccaagagagagcacagacccctgggcgttgttttcgtggacatcgccaaggccttcgacaccgtgtcccatcagcacattatccacgccctgcagcagagggaggtcgaccctcatattgtgggcctggtgtccaacatgtacgagaacatctccacctatattacgaccaagagaaacacccacacagacaagatccagatccgggtcggcgtcaagcagggcgatcctatgtctcctctgctgttcaacctcgccatggaccctctgctctgcaagctcgaggagtctggaaagggctaccatagaggccaatcatcgatcaccgccatggccttcgccgacgacctggtgcttttaagcgacagctgggagaacatgaacaccaacatctctatcctggagacattctgcaaccttaccggcctgaaaacccagggccagaagtgtcatggcttctacatcaaacccaccaagaagagctacaccatcaacgactgcgccgcctggacaatcaacggcacccctctcaacatgatcgaccccggcgagtctgagaagtacctgggcctgcagttcgatccctggatcggcatcgctagaagcggcttgagcaccaagctggacttttggctccaacgcatagaccaggcccccctgaagcctcttcagaaactggacattttgaaaacttatacgatccccagactcatctacatcgccgaccactccgaggtcaagagcgctctgctggaaaccctggaccagaaaatcagaaccgccgtcaaggaatggctgcacctgcccccttgcacatgcgacgctatcctgtacagcagcaccagggacggcggcttaggaatcaccaagttagccggcctcatccccagcgtgcaggctaggagactccacagaatcgcccagagcagcgacgacaccatgaagtgcttcatggagaaggaaaagatggagcagctgcacaagaagctgtggatccaagcgggcggagatcgtgagaacattcccagcatctgggaggcccctcccagctcagaacctcccaataacgtgtccaccaattctgaatgggaggctcccacccagaaggataagtttcccaagccctgcaactggcggaagaacgagttcaaaaaatggacaaagctggctagccagggcaggggcatcgtgaacttcgaaagggacaagattagcaaccactggatccagtactacagaagaatcccccacagaaagctcctcaccgccctccagttacgtgcaaacgtgtacccaaccagagaattcctggccagaggcagacaggaccagtacatcaaggcctgccggcactgcgatgccgataacgagagctgtgctcacatcatcggcaactgccccgtcacccaggacgccagaatcaagagacacaactacatctgcgagttacttctggaggaagccaagaagaaggattgggttgtgttcaaggagccccacatcagagactccaacaaggagctgtacaagccagacctcatcttcgtgaaggacggcagagccctggtggtggacgtcaccgtcagatacgaggctgctaagtccagccttgaggaggctgccgccgagaaagtgcggaagtacaagcacctggaaacagaggtcagacacctcaccaacgccaaggacgttaccttcgtgggcttccccctaggtgctagaggcaaatggcaccaggacaacttcaagctgcttaccgagctgggcctctccaagagccgacaggttaagatggccgagaccttcagcaccgtcgccctgttctcttctgtggacattgtgcacatgttcgcctccagagccagaaagagcatggtgatgtgataataggctgccttctgcggggcttgccttctggccatgcccttcttctctcccttgcacctgtacctcttggtctttgaataaagcctgagtaggaaggaccggtaaaaaaaaaaaaaaaaaaaaaaaaaaaaaaacgttgactaaaaaaaaaaaaaaaaaaaaaaaaaaaaaaaaaaaaaaaaaaaaaaaaaaaaaaaaaaaaaaaaaaaaaa

SEQ ID NO: 11023 - DNA, 5218 bp, synthetic construct
  source 1..5218: mol_type = other DNA
ggtctagttacaactgggcatcgctgcagagatcgcacctcctcgtggtcccgctggtagcccttcgaagggtgactaagtcgatctctgccccaggtacggagccgttgggactcaccagtccaacgtaactcctgcctaaattcggtgaaacaaattcctcggtaaaaagccccatggcccctaagaaaaagcggaaggtgaatatcagcggctctagctgcggcagccccaacagcgccgacaccagcagcgacttcaaggacctgtggaccaagctgaaggaatgccacgaccgggaagtgcagggactccaggtgaaggtcaccaaactcaagcaagaaagaatcctggacgcccagagactggaagaattcttcaccaagaaccagcagctgagagagcagcagaaagtgctgcacgagacaatcaaggttctggaagatagactgcgggccggcctgtgcgacagatgcgccgtgaccgaggaacacatgcgcaaaaagcagcaggagttcgagaacattagacagcaaaatctgaaattgatcacagagctgatgaacgagagaaacacactgcaggaggagaacaagaagctgagcgagcagctgcaacagaagatcgagaatgatcagcaacaccaggccgctgagctggaatgtgaagaggacgtgatccccgacagcccaatcacagctttcagcttttctggcgtgaacagactgaggcggaaggaaaacccccacgtgcggtacatcgagcagacccataccaagctggaacacagcgtgtgtgccaacgagatgagaaaggtgtccaagtcctccacccatccccagcacaaccctaacgaaaatgagatcctggtggctgatacctacgaccagtctcagagccctatggccaaggcccacggcaccagctcttatacccctgataagagctccttcaacctggccaccgtggtggccgagacactgggcctgggcgtgcaggaggaaagcgagacacagggcccaatgagccctctgggagatgagctgtaccactgcctggaaggcaaccacaagaaacagccttttgagtccggctccgagactcctggaacaagcgagagcgctacacctgagggcagccctaagagaaaggtgtccagcgccgagggcgctgccaaggaagagcctaaacggagaagcgccagactgagcgccaagccccccgccaaggtggaagccaagcctaagaaggccgccgctaaggacaagagcagcgataagaaagtccagaccaagggcaagcggggcgccaaaggcaaacaggccgaggtggccaaccaggagacaaaggaagatctgcctgctgagaacggcgaaaccaagaccgaggaatctccagcttctgacgaggccggagagaaggaggccaaaagcgacagcggctctgagacacctggaacaagcgagagcgccaccccggaatccgagaaggtcatggtgaccgtgcccgacaagaaccctccctgtccttgctgtggcacaagagtcaacagcgtgctgaacctcatcgagcacctgaaggtgtcccacggcaagagaggcgtgtgcttcagatgcgccaagtgcggcaaggagaacagcaactaccacagcgtcgtgtgccacttcaagaagtgcagaggccctgagaccgagaaggctcccgctggcgaatggatttgcgaggtgtgcaacagagacttcaccaccaagatcggcctgggccagcacaagcggttagctcaccctgctgtgagaaaccaggagagaatcgtggccagccagcccaaggagacaagcaacaggggcgctcacaagagatgctggaccaaggaggaagaggagctgctcatcagactggaggctcagttcgagggcaacaagaacatcaataagcttatcgccgagcacatcaccacaaagaccgccaagcagatcagcgacaagaggagactgctgtccagaaagcccgccgaggagcctagaatggaacctggtacatgtcaccacaccagaagagccgccgctagcctgagaaccgagcccgaaatgtctcaccacgctcaggccgaggacagagacaacggccctggcaggagacctcttcccggcagagctgctgctggaggcagaaccatggacgagatcaggagacaccccgataagggcaacggccagcagagacccacaaagcagaagtccgaggaacagctccaggcctactacaagaaaaccctggaggagagactgtccgcgggagctctgaacaccttccctagagccttcaaacaagtcatggagggcagagacatcaagctggtgatcaaccagaccgcccaggactgcttcggctgccttgagtctatcagccagatcaggaccgccacacgggataagaaggacaccgtcaccagagagaagcaccccaagaagcccttccagaaatggatgaagaagagggccatcaagaagggcaattacctgagattccagaggctgttctacctggacagaggcaagctggccaagatcatcctggacgacatcgagtgcctgagctgcgacatccctctgagcgagatctacagcgtgttcaagaccagatgggagaccaccggcagcttcaagtctctgggcgacttcaagacatacggcaaggccgacaacaccgccttcagagagctcatcaccgctaaggagatcgagaagaacgtgcaggagatgagcaagggcagcgctcctggccccgatggaattacactgggcgatgtggtgaagatggaccccgagttcagcagaacaatggagatcttcaacctgtggctcaccacaggcaagatccccgacatggtgagaggctgcagaaccgtgcttatccccaagagcagcaagcccgacagactgaaggatatcaacaactggagacccatcaccatcggcagcatcctgctgcggctgttcagccggattgtgaccgctagactgagcaaagcctgtcccctgaaccccagacagagaggcttcatcagagccgctggctgcagcgagaacctgaagctgctccagacaatcatctggagcgccaagagagagcacagacccctgggcgttgttttcgtggacatcgccaaggccttcgacaccgtgtcccatcagcacattatccacgccctgcagcagagggaggtcgaccctcatattgtgggcctggtgtccaacatgtacgagaacatctccacctatattacgaccaagagaaacacccacacagacaagatccagatccgggtcggcgtcaagcagggcgatcctatgtctcctctgctgttcaacctcgccatggaccctctgctctgcaagctcgaggagtctggaaagggctaccatagaggccaatcatcgatcaccgccatggccttcgccgacgacctggtgcttttaagcgacagctgggagaacatgaacaccaacatctctatcctggagacattctgcaaccttaccggcctgaaaacccagggccagaagtgtcatggcttctacatcaaacccaccaagaagagctacaccatcaacgactgcgccgcctggacaatcaacggcacccctctcaacatgatcgaccccggcgagtctgagaagtacctgggcctgcagttcgatccctggatcggcatcgctagaagcggcttgagcaccaagctggacttttggctccaacgcatagaccaggcccccctgaagcctcttcagaaactggacattttgaaaacttatacgatccccagactcatctacatcgccgaccactccgaggtcaagagcgctctgctggaaaccctggaccagaaaatcagaaccgccgtcaaggaatggctgcacctgcccccttgcacatgcgacgctatcctgtacagcagcaccagggacggcggcttaggaatcaccaagttagccggcctcatccccagcgtgcaggctaggagactccacagaatcgcccagagcagcgacgacaccatgaagtgcttcatggagaaggaaaagatggagcagctgcacaagaagctgtggatccaagcgggcggagatcgtgagaacattcccagcatctgggaggcccctcccagctcagaacctcccaataacgtgtccaccaattctgaatgggaggctcccacccagaaggataagtttcccaagccctgcaactggcggaagaacgagttcaaaaaatggacaaagctggctagccagggcaggggcatcgtgaacttcgaaagggacaagattagcaaccactggatccagtactacagaagaatcccccacagaaagctcctcaccgccctccagttacgtgcaaacgtgtacccaaccagagaattcctggccagaggcagacaggaccagtacatcaaggcctgccggcactgcgatgccgataacgagagctgtgctcacatcatcggcaactgccccgtcacccaggacgccagaatcaagagacacaactacatctgcgagttacttctggaggaagccaagaagaaggattgggttgtgttcaaggagccccacatcagagactccaacaaggagctgtacaagccagacctcatcttcgtgaaggacggcagagccctggtggtggacgtcaccgtcagatacgaggctgctaagtccagccttgaggaggctgccgccgagaaagtgcggaagtacaagcacctggaaacagaggtcagacacctcaccaacgccaaggacgttaccttcgtgggcttccccctaggtgctagaggcaaatggcaccaggacaacttcaagctgcttaccgagctgggcctctccaagagccgacaggttaagatggccgagaccttcagcaccgtcgccctgttctcttctgtggacattgtgcacatgttcgcctccagagccagaaagagcatggtgatgtgataataggctgccttctgcggggcttgccttctggccatgcccttcttctctcccttgcacctgtacctcttggtctttgaataaagcctgagtaggaaggaccggtaaaaaaaaaaaaaaaaaaaaaaaaaaaaaaacgttgactaaaaaaaaaaaaaaaaaaaaaaaaaaaaaaaaaaaaaaaaaaaaaaaaaaaaaaaaaaaaaaaaaaaaaa

SEQ ID NO: 11024 - DNA, 5389 bp, synthetic construct
  source 1..5389: mol_type = other DNA
ggtctagttacaactgggcatcgctgcagagatcgcacctcctcgtggtcccgctggtagcccttcgaagggtgactaagtcgatctctgccccaggtacggagccgttgggactcaccagtccaacgtaactcctgcctaaattcggtgaaacaaattcctcggtaaaaagccccatggcccctaagaaaaagcggaaggtgaatatcagcggctctagctgcggcagccccaacagcgccgacaccagcagcgacttcaaggacctgtggaccaagctgaaggaatgccacgaccgggaagtgcagggactccaggtgaaggtcaccaaactcaagcaagaaagaatcctggacgcccagagactggaagaattcttcaccaagaaccagcagctgagagagcagcagaaagtgctgcacgagacaatcaaggttctggaagatagactgcgggccggcctgtgcgacagatgcgccgtgaccgaggaacacatgcgcaaaaagcagcaggagttcgagaacattagacagcaaaatctgaaattgatcacagagctgatgaacgagagaaacacactgcaggaggagaacaagaagctgagcgagcagctgcaacagaagatcgagaatgatcagcaacaccaggccgctgagctggaatgtgaagaggacgtgatccccgacagcccaatcacagctttcagcttttctggcgtgaacagactgaggcggaaggaaaacccccacgtgcggtacatcgagcagacccataccaagctggaacacagcgtgtgtgccaacgagatgagaaaggtgtccaagtcctccacccatccccagcacaaccctaacgaaaatgagatcctggtggctgatacctacgaccagtctcagagccctatggccaaggcccacggcaccagctcttatacccctgataagagctccttcaacctggccaccgtggtggccgagacactgggcctgggcgtgcaggaggaaagcgagacacagggcccaatgagccctctgggagatgagctgtaccactgcctggaaggcaaccacaagaaacagccttttgagtccggctccgagactcctggaacaagcgagagcgctacacctgagggcagccctaagagaaaggtgtccagcgccgagggcgctgccaaggaagagcctaaacggagaagcgccagactgagcgccaagccccccgccaaggtggaagccaagcctaagaaggccgccgctaaggacaagagcagcgataagaaagtccagaccaagggcaagcggggcgccaaaggcaaacaggccgaggtggccaaccaggagacaaaggaagatctgcctgctgagaacggcgaaaccaagaccgaggaatctccagcttctgacgaggccggagagaaggaggccaaaagcgacagcggctctgagacacctggaacaagcgagagcgccaccccggaatcctacgaacagctggctccccagccctgtgtaggcgagacattacacagcagcctgcccagagacagcgagctgttcgttccggaagagggctctagcgagaaggagagcgaggacgctcctaagaccagccctcctacccctggcaaacacggcctggagcaaacaggcgaggagaaggtcatggtgaccgtgcccgacaagaaccctccctgtccttgctgtggcacaagagtcaacagcgtgctgaacctcatcgagcacctgaaggtgtcccacggcaagagaggcgtgtgcttcagatgcgccaagtgcggcaaggagaacagcaactaccacagcgtcgtgtgccacttcaagaagtgcagaggccctgagaccgagaaggctcccgctggcgaatggatttgcgaggtgtgcaacagagacttcaccaccaagatcggcctgggccagcacaagcggttagctcaccctgctgtgagaaaccaggagagaatcgtggccagccagcccaaggagacaagcaacaggggcgctcacaagagatgctggaccaaggaggaagaggagctgctcatcagactggaggctcagttcgagggcaacaagaacatcaataagcttatcgccgagcacatcaccacaaagaccgccaagcagatcagcgacaagaggagactgctgtccagaaagcccgccgaggagcctagaatggaacctggtacatgtcaccacaccagaagagccgccgctagcctgagaaccgagcccgaaatgtctcaccacgctcaggccgaggacagagacaacggccctggcaggagacctcttcccggcagagctgctgctggaggcagaaccatggacgagatcaggagacaccccgataagggcaacggccagcagagacccacaaagcagaagtccgaggaacagctccaggcctactacaagaaaaccctggaggagagactgtccgcgggagctctgaacaccttccctagagccttcaaacaagtcatggagggcagagacatcaagctggtgatcaaccagaccgcccaggactgcttcggctgccttgagtctatcagccagatcaggaccgccacacgggataagaaggacaccgtcaccagagagaagcaccccaagaagcccttccagaaatggatgaagaagagggccatcaagaagggcaattacctgagattccagaggctgttctacctggacagaggcaagctggccaagatcatcctggacgacatcgagtgcctgagctgcgacatccctctgagcgagatctacagcgtgttcaagaccagatgggagaccaccggcagcttcaagtctctgggcgacttcaagacatacggcaaggccgacaacaccgccttcagagagctcatcaccgctaaggagatcgagaagaacgtgcaggagatgagcaagggcagcgctcctggccccgatggaattacactgggcgatgtggtgaagatggaccccgagttcagcagaacaatggagatcttcaacctgtggctcaccacaggcaagatccccgacatggtgagaggctgcagaaccgtgcttatccccaagagcagcaagcccgacagactgaaggatatcaacaactggagacccatcaccatcggcagcatcctgctgcggctgttcagccggattgtgaccgctagactgagcaaagcctgtcccctgaaccccagacagagaggcttcatcagagccgctggctgcagcgagaacctgaagctgctccagacaatcatctggagcgccaagagagagcacagacccctgggcgttgttttcgtggacatcgccaaggccttcgacaccgtgtcccatcagcacattatccacgccctgcagcagagggaggtcgaccctcatattgtgggcctggtgtccaacatgtacgagaacatctccacctatattacgaccaagagaaacacccacacagacaagatccagatccgggtcggcgtcaagcagggcgatcctatgtctcctctgctgttcaacctcgccatggaccctctgctctgcaagctcgaggagtctggaaagggctaccatagaggccaatcatcgatcaccgccatggccttcgccgacgacctggtgcttttaagcgacagctgggagaacatgaacaccaacatctctatcctggagacattctgcaaccttaccggcctgaaaacccagggccagaagtgtcatggcttctacatcaaacccaccaagaagagctacaccatcaacgactgcgccgcctggacaatcaacggcacccctctcaacatgatcgaccccggcgagtctgagaagtacctgggcctgcagttcgatccctggatcggcatcgctagaagcggcttgagcaccaagctggacttttggctccaacgcatagaccaggcccccctgaagcctcttcagaaactggacattttgaaaacttatacgatccccagactcatctacatcgccgaccactccgaggtcaagagcgctctgctggaaaccctggaccagaaaatcagaaccgccgtcaaggaatggctgcacctgcccccttgcacatgcgacgctatcctgtacagcagcaccagggacggcggcttaggaatcaccaagttagccggcctcatccccagcgtgcaggctaggagactccacagaatcgcccagagcagcgacgacaccatgaagtgcttcatggagaaggaaaagatggagcagctgcacaagaagctgtggatccaagcgggcggagatcgtgagaacattcccagcatctgggaggcccctcccagctcagaacctcccaataacgtgtccaccaattctgaatgggaggctcccacccagaaggataagtttcccaagccctgcaactggcggaagaacgagttcaaaaaatggacaaagctggctagccagggcaggggcatcgtgaacttcgaaagggacaagattagcaaccactggatccagtactacagaagaatcccccacagaaagctcctcaccgccctccagttacgtgcaaacgtgtacccaaccagagaattcctggccagaggcagacaggaccagtacatcaaggcctgccggcactgcgatgccgataacgagagctgtgctcacatcatcggcaactgccccgtcacccaggacgccagaatcaagagacacaactacatctgcgagttacttctggaggaagccaagaagaaggattgggttgtgttcaaggagccccacatcagagactccaacaaggagctgtacaagccagacctcatcttcgtgaaggacggcagagccctggtggtggacgtcaccgtcagatacgaggctgctaagtccagccttgaggaggctgccgccgagaaagtgcggaagtacaagcacctggaaacagaggtcagacacctcaccaacgccaaggacgttaccttcgtgggcttccccctaggtgctgccggcaaatggcaccaggacaacttcaagctgcttaccgagctgggcctctccaagagccgacaggttaagatggccgagaccttcagcaccgtcgccctgttctcttctgtggacattgtgcacatgttcgcctccagagccagaaagagcatggtgatgtgataataggctgccttctgcggggcttgccttctggccatgcccttcttctctcccttgcacctgtacctcttggtctttgaataaagcctgagtaggaaggaccggtaaaaaaaaaaaaaaaaaaaaaaaaaaaaaaacgttgactaaaaaaaaaaaaaaaaaaaaaaaaaaaaaaaaaaaaaaaaaaaaaaaaaaaaaaaaaaaaaaaaaaaaaa

SEQ ID NO: 11025 - DNA, 5327 bp, synthetic construct
  source 1..5327: mol_type = other DNA
gaaataagagagaaaagaagagtaagaagaaatataagagaattcgccaccatggccaccttcggcgagagcagcttcaacaacgagctgccccaggacagccaggaggtgacctgcacccctaagaaaaagcggaaggtgaatatcagcggctctagctgcggcagccccaacagcgccgacaccagcagcgacttcaaggacctgtggaccaagctgaaggaatgccacgaccgggaagtgcagggactccaggtgaaggtcaccaaactcaagcaagaaagaatcctggacgcccagagactggaagaattcttcaccaagaaccagcagctgagagagcagcagaaagtgctgcacgagacaatcaaggttctggaagatagactgcgggccggcctgtgcgacagatgcgccgtgaccgaggaacacatgcgcaaaaagcagcaggagttcgagaacattagacagcaaaatctgaaattgatcacagagctgatgaacgagagaaacacactgcaggaggagaacaagaagctgagcgagcagctgcaacagaagatcgagaatgatcagcaacaccaggccgctgagctggaatgtgaagaggacgtgatccccgacagcccaatcacagctttcagcttttctggcgtgaacagactgaggcggaaggaaaacccccacgtgcggtacatcgagcagacccataccaagctggaacacagcgtgtgtgccaacgagatgagaaaggtgtccaagtcctccacccatccccagcacaaccctaacgaaaatgagatcctggtggctgatacctacgaccagtctcagagccctatggccaaggcccacggcaccagctcttatacccctgataagagctccttcaacctggccaccgtggtggccgagacactgggcctgggcgtgcaggaggaaagcgagacacagggcccaatgagccctctgggagatgagctgtaccactgcctggaaggcaaccacaagaaacagccttttgagtccggctccgagactcctggaacaagcgagagcgctacacctgagggcagccctaagagaaaggtgtccagcgccgagggcgctgccaaggaagagcctaaacggagaagcgccagactgagcgccaagccccccgccaaggtggaagccaagcctaagaaggccgccgctaaggacaagagcagcgataagaaagtccagaccaagggcaagcggggcgccaaaggcaaacaggccgaggtggccaaccaggagacaaaggaagatctgcctgctgagaacggcgaaaccaagaccgaggaatctccagcttctgacgaggccggagagaaggaggccaaaagcgacagcggctctgagacacctggaacaagcgagagcgccaccccggaatcctatgaacaacttgcaccacaaccgtgtgtgggagaaactttacattctagcctcccacgagacagtgaactgtttgtgcctgaagaggggagcagcgagaaggagagcgaggacgcgccaaaaacatctcctccgacgcctgggaaacatggtttggaacagactggggaggaaaaagtgatggtgactgttcctgacaaaaatccaccttgtccttgctgtggtacccgggtaaactctgtgttgaatctgattgaacatctgaaagtgtcacacgggaaaaggggggtttgttttcggtgtgcaaaatgtggaaaggaaaatagtaactatcacagtgttgtttgtcattttaagaaatgcaggggtccagagacggagaaagccccagctggggagtggatttgtgaggtatgcaacagagattttacaaccaaaattggcctgggacaacacaagagattggcacacccagcagtgagaaatcaggaaaggatcgttgcttcccaaccgaaagaaacatcaaatagaggtgctcacaaaaggtgctggacaaaggaggaggaagaattactaataagactggaggctcagttcgagggaaacaaaaatattaataagcttattgcagaacacataaccaccaaaacagctaagcagatcagtgacaaaaggcgattgctgtccagaaagccagcagaggagccacgtgaggagcctggaacgtgtcatcacaccaggagagcagctgcgagcctgagaacggagcctgagatgagtcatcacgcccaggcagaggacagagataatggacctgggagacgccctctgccaggcagggcagctgccggagggagaacaatggacgagataagacgccaccctgataagggcaacggacagcagagacccaccaagcaaaaatcagaagaacagctgcaggcttactataaaaagacactagaggaacgactttcagctggggcacttaacaccttcccccgagcattcaagcaggtaatggaaggccgggatataaagctagtaatcaatcagacagcgcaggactgcttcggatgcctggaatccataagccaaataagaacggcaacccgagataaaaaggacacggtgacccgggagaaacacccaaagaaaccttttcagaagtggatgaagaagagagcaatcaaaaaaggtaattatcttcggttccagcgtttattttatcttgatagagggaaactggctaaaatcattttagatgatattgaatgcttgtcttgtgacataccactcagtgaaatttattcggtttttaaaacaagatgggaaacaactggtagctttaaaagccttggggactttaaaacttacgggaaggctgacaacactgccttcagagaattaattacggctaaagaaattgagaaaaatgtgcaggaaatgagcaaaggctcggctcccggtccagacgggattactcttggggacgtcgtaaagatggatcccgagttttcccggaccatggagattttcaatttatggttaacaactggtaaaatcccggacatggtgagggggtgcagaaccgttttgattccaaaatcatcaaagccggatcgtttgaaagacattaataactggagacctatcacgatcggttccatcttgctgagactgttctccaggattgtaacagctaggctgagcaaagcgtgccccctgaacccaaggcaaagaggctttatcagagcggcgggatgctctgaaaacttaaaactcctgcaaactataatttggtcggccaaaagagaacacagaccactgggtgttgtattcgtggacatcgccaaggcttttgacaccgtaagccaccagcacatcattcatgctttgcagcaaagagaggtggatccccacatcgtcggtctggtgagcaatatgtacgagaacatcagtacgtatatcaccacaaagaggaacacacacacagacaaaatccagatccgggttggagtaaagcagggtgacccgatgtcgccccttttatttaacctggcaatggaccctctattatgcaagctggaagagagtggcaaaggataccaccgaggacagagcagcatcacagcgatggcatttgcagacgatctggttttgctgagcgactcctgggaaaatatgaatacaaatattagcatactggagaccttctgcaatctgaccggactcaaaacacaggggcaaaagtgccacggcttttacatcaagccgacaaagaagtcttacaccatcaatgactgcgctgcctggactatcaacggcacacccctgaacatgatcgaccccggcgaatctgagaaatacctcggcctgcagtttgacccgtggattggaatagcaaggtccggtctctccacaaaactagatttttggcttcagcggatcgatcaagcaccacttaaacctctgcagaaaactgatattctcaaaacatacaccatccctcggctgatctacatagctgaccactcagaagtgaaaagcgcactactcgaaacccttgaccagaagatccggacagcggtcaaggaatggcttcacctacctccgtgcacctgcgatgccatcctgtactcgagcacgagagacggcggtttgggcatcaccaaattggcaggactgatccccagcgtgcaggcccgtagactgcatcggatcgcacagtcatctgacgatacgatgaaatgcttcatggaaaaagagaaaatggaacagctgcataagaaattgtggattcaagctggaggggacagagagaacataccctcgatttgggaagcaccaccgtcgagtgaaccaccaaacaacgtgagcacaaattcggaatgggaagcaccgacccagaaagataaatttccaaagccttgcaattggaggaaaaacgaattcaaaaaatggaccaaattggcatcccaaggccgcggaattgtaaattttgaaagagacaaaattagtaaccattggatccaatactacagacgcatacctcacaggaaactcctcactgcactacaactcagggccaacgtttaccccacgagagaatttctagccaggggtagacaagaccaatacatcaaggcgtgtaggcactgcgatgcggacaacgaatcctgcgcccacatcatcggcaactgcccagtgacacaggacgcccgaatcaagaggcacaattacatctgcgaactgcttctcgaggaggcgaagaagaaggactgggtagtgttcaaggaaccgcacataagggattccaacaaggaactgtacaaacctgacctgatatttgtgaaggatgggcgtgcacttgtcgtggatgtgacagtacggtatgaagcagccaaatcatcgctggaggaagccgctgcagagaaagtgagaaagtacaaacacctggaaacggaagtaagacatctcacgaatgcaaaggacgttacttttgtgggctttcccctaggagcgcgggggaaatggcaccaagataactttaaacttttgactgagcttggcctctccaaatcgaggcaagtgaaaatggcagagactttttccacagtagcgctcttttcatctgtggacattgtacatatgtttgccagtagggccagaaaatctatggttatgtgataataggctgccttctgcggggcttgccttctggccatgcccttcttctctcccttgcacctgtacctcttggtctttgaataaagcctgagtaggaaggaccggtaaaaaaaaaaaaaaaaaaaaaaaaaaaaaaacgttgactaaaaaaaaaaaaaaaaaaaaaaaaaaaaaaaaaaaaaaaaaaaaaaaaaaaaaaaaaaaaaaaaaaaaaa

SEQ ID NO: 11026 - DNA, 5480 bp, synthetic construct
  source 1..5480: mol_type = other DNA
gaaataagagagaaaagaagagtaagaagaaatataagagaattcgccaccatggccaagaagcagaccatgggcttcgaggtgcccggcgtgagcagcgaggagaacggccacagcttccacaccccccagaagggcccccccatcgaggacgccatcgccagcagcgacgtgctggagaccgccagcaagagcgccaaccccccccacaccatccaggccagcgaggagcagagcagcacccccgcccccgtgaagaagagcggcaagctgcctaagaaaaagcggaaggtgaatatcagcggctctagctgcggcagccccaacagcgccgacaccagcagcgacttcaaggacctgtggaccaagctgaaggaatgccacgaccgggaagtgcagggactccaggtgaaggtcaccaaactcaagcaagaaagaatcctggacgcccagagactggaagaattcttcaccaagaaccagcagctgagagagcagcagaaagtgctgcacgagacaatcaaggttctggaagatagactgcgggccggcctgtgcgacagatgcgccgtgaccgaggaacacatgcgcaaaaagcagcaggagttcgagaacattagacagcaaaatctgaaattgatcacagagctgatgaacgagagaaacacactgcaggaggagaacaagaagctgagcgagcagctgcaacagaagatcgagaatgatcagcaacaccaggccgctgagctggaatgtgaagaggacgtgatccccgacagcccaatcacagctttcagcttttctggcgtgaacagactgaggcggaaggaaaacccccacgtgcggtacatcgagcagacccataccaagctggaacacagcgtgtgtgccaacgagatgagaaaggtgtccaagtcctccacccatccccagcacaaccctaacgaaaatgagatcctggtggctgatacctacgaccagtctcagagccctatggccaaggcccacggcaccagctcttatacccctgataagagctccttcaacctggccaccgtggtggccgagacactgggcctgggcgtgcaggaggaaagcgagacacagggcccaatgagccctctgggagatgagctgtaccactgcctggaaggcaaccacaagaaacagccttttgagtccggctccgagactcctggaacaagcgagagcgctacacctgagggcagccctaagagaaaggtgtccagcgccgagggcgctgccaaggaagagcctaaacggagaagcgccagactgagcgccaagccccccgccaaggtggaagccaagcctaagaaggccgccgctaaggacaagagcagcgataagaaagtccagaccaagggcaagcggggcgccaaaggcaaacaggccgaggtggccaaccaggagacaaaggaagatctgcctgctgagaacggcgaaaccaagaccgaggaatctccagcttctgacgaggccggagagaaggaggccaaaagcgacagcggctctgagacacctggaacaagcgagagcgccaccccggaatcctatgaacaacttgcaccacaaccgtgtgtgggagaaactttacattctagcctcccacgagacagtgaactgtttgtgcctgaagaggggagcagcgagaaggagagcgaggacgcgccaaaaacatctcctccgacgcctgggaaacatggtttggaacagactggggaggaaaaagtgatggtgactgttcctgacaaaaatccaccttgtccttgctgtggtacccgggtaaactctgtgttgaatctgattgaacatctgaaagtgtcacacgggaaaaggggggtttgttttcggtgtgcaaaatgtggaaaggaaaatagtaactatcacagtgttgtttgtcattttaagaaatgcaggggtccagagacggagaaagccccagctggggagtggatttgtgaggtatgcaacagagattttacaaccaaaattggcctgggacaacacaagagattggcacacccagcagtgagaaatcaggaaaggatcgttgcttcccaaccgaaagaaacatcaaatagaggtgctcacaaaaggtgctggacaaaggaggaggaagaattactaataagactggaggctcagttcgagggaaacaaaaatattaataagcttattgcagaacacataaccaccaaaacagctaagcagatcagtgacaaaaggcgattgctgtccagaaagccagcagaggagccacgtgaggagcctggaacgtgtcatcacaccaggagagcagctgcgagcctgagaacggagcctgagatgagtcatcacgcccaggcagaggacagagataatggacctgggagacgccctctgccaggcagggcagctgccggagggagaacaatggacgagataagacgccaccctgataagggcaacggacagcagagacccaccaagcaaaaatcagaagaacagctgcaggcttactataaaaagacactagaggaacgactttcagctggggcacttaacaccttcccccgagcattcaagcaggtaatggaaggccgggatataaagctagtaatcaatcagacagcgcaggactgcttcggatgcctggaatccataagccaaataagaacggcaacccgagataaaaaggacacggtgacccgggagaaacacccaaagaaaccttttcagaagtggatgaagaagagagcaatcaaaaaaggtaattatcttcggttccagcgtttattttatcttgatagagggaaactggctaaaatcattttagatgatattgaatgcttgtcttgtgacataccactcagtgaaatttattcggtttttaaaacaagatgggaaacaactggtagctttaaaagccttggggactttaaaacttacgggaaggctgacaacactgccttcagagaattaattacggctaaagaaattgagaaaaatgtgcaggaaatgagcaaaggctcggctcccggtccagacgggattactcttggggacgtcgtaaagatggatcccgagttttcccggaccatggagattttcaatttatggttaacaactggtaaaatcccggacatggtgagggggtgcagaaccgttttgattccaaaatcatcaaagccggatcgtttgaaagacattaataactggagacctatcacgatcggttccatcttgctgagactgttctccaggattgtaacagctaggctgagcaaagcgtgccccctgaacccaaggcaaagaggctttatcagagcggcgggatgctctgaaaacttaaaactcctgcaaactataatttggtcggccaaaagagaacacagaccactgggtgttgtattcgtggacatcgccaaggcttttgacaccgtaagccaccagcacatcattcatgctttgcagcaaagagaggtggatccccacatcgtcggtctggtgagcaatatgtacgagaacatcagtacgtatatcaccacaaagaggaacacacacacagacaaaatccagatccgggttggagtaaagcagggtgacccgatgtcgccccttttatttaacctggcaatggaccctctattatgcaagctggaagagagtggcaaaggataccaccgaggacagagcagcatcacagcgatggcatttgcagacgatctggttttgctgagcgactcctgggaaaatatgaatacaaatattagcatactggagaccttctgcaatctgaccggactcaaaacacaggggcaaaagtgccacggcttttacatcaagccgacaaagaagtcttacaccatcaatgactgcgctgcctggactatcaacggcacacccctgaacatgatcgaccccggcgaatctgagaaatacctcggcctgcagtttgacccgtggattggaatagcaaggtccggtctctccacaaaactagatttttggcttcagcggatcgatcaagcaccacttaaacctctgcagaaaactgatattctcaaaacatacaccatccctcggctgatctacatagctgaccactcagaagtgaaaagcgcactactcgaaacccttgaccagaagatccggacagcggtcaaggaatggcttcacctacctccgtgcacctgcgatgccatcctgtactcgagcacgagagacggcggtttgggcatcaccaaattggcaggactgatccccagcgtgcaggcccgtagactgcatcggatcgcacagtcatctgacgatacgatgaaatgcttcatggaaaaagagaaaatggaacagctgcataagaaattgtggattcaagctggaggggacagagagaacataccctcgatttgggaagcaccaccgtcgagtgaaccaccaaacaacgtgagcacaaattcggaatgggaagcaccgacccagaaagataaatttccaaagccttgcaattggaggaaaaacgaattcaaaaaatggaccaaattggcatcccaaggccgcggaattgtaaattttgaaagagacaaaattagtaaccattggatccaatactacagacgcatacctcacaggaaactcctcactgcactacaactcagggccaacgtttaccccacgagagaatttctagccaggggtagacaagaccaatacatcaaggcgtgtaggcactgcgatgcggacaacgaatcctgcgcccacatcatcggcaactgcccagtgacacaggacgcccgaatcaagaggcacaattacatctgcgaactgcttctcgaggaggcgaagaagaaggactgggtagtgttcaaggaaccgcacataagggattccaacaaggaactgtacaaacctgacctgatatttgtgaaggatgggcgtgcacttgtcgtggatgtgacagtacggtatgaagcagccaaatcatcgctggaggaagccgctgcagagaaagtgagaaagtacaaacacctggaaacggaagtaagacatctcacgaatgcaaaggacgttacttttgtgggctttcccctaggagcgcgggggaaatggcaccaagataactttaaacttttgactgagcttggcctctccaaatcgaggcaagtgaaaatggcagagactttttccacagtagcgctcttttcatctgtggacattgtacatatgtttgccagtagggccagaaaatctatggttatgtgataataggctgccttctgcggggcttgccttctggccatgcccttcttctctcccttgcacctgtacctcttggtctttgaataaagcctgagtaggaaggaccggtaaaaaaaaaaaaaaaaaaaaaaaaaaaaaaacgttgactaaaaaaaaaaaaaaaaaaaaaaaaaaaaaaaaaaaaaaaaaaaaaaaaaaaaaaaaaaaaaaaaaaaaaa

SEQ ID NO: 11027 - skipped

SEQ ID NO: 11028 - DNA, 5264 bp, synthetic construct
  source 1..5264: mol_type = other DNA
gaaataagagagaaaagaagagtaagaagaaatataagagaattcgccaccatggcccctaagaaaaagcggaaggtgaatatcagcggctctagctgcggcagccccaacagcgccgacaccagcagcgacttcaaggacctgtggaccaagctgaaggaatgccacgaccgggaagtgcagggactccaggtgaaggtcaccaaactcaagcaagaaagaatcctggacgcccagagactggaagaattcttcaccaagaaccagcagctgagagagcagcagaaagtgctgcacgagacaatcaaggttctggaagatagactgcgggccggcctgtgcgacagatgcgccgtgaccgaggaacacatgcgcaaaaagcagcaggagttcgagaacattagacagcaaaatctgaaattgatcacagagctgatgaacgagagaaacacactgcaggaggagaacaagaagctgagcgagcagctgcaacagaagatcgagaatgatcagcaacaccaggccgctgagctggaatgtgaagaggacgtgatccccgacagcccaatcacagctttcagcttttctggcgtgaacagactgaggcggaaggaaaacccccacgtgcggtacatcgagcagacccataccaagctggaacacagcgtgtgtgccaacgagatgagaaaggtgtccaagtcctccacccatccccagcacaaccctaacgaaaatgagatcctggtggctgatacctacgaccagtctcagagccctatggccaaggcccacggcaccagctcttatacccctgataagagctccttcaacctggccaccgtggtggccgagacactgggcctgggcgtgcaggaggaaagcgagacacagggcccaatgagccctctgggagatgagctgtaccactgcctggaaggcaaccacaagaaacagccttttgagtccggctccgagactcctggaacaagcgagagcgctacacctgagggcagccctaagagaaaggtgtccagcgccgagggcgctgccaaggaagagcctaaacggagaagcgccagactgagcgccaagccccccgccaaggtggaagccaagcctaagaaggccgccgctaaggacaagagcagcgataagaaagtccagaccaagggcaagcggggcgccaaaggcaaacaggccgaggtggccaaccaggagacaaaggaagatctgcctgctgagaacggcgaaaccaagaccgaggaatctccagcttctgacgaggccggagagaaggaggccaaaagcgacagcggctctgagacacctggaacaagcgagagcgccaccccggaatcctatgaacaacttgcaccacaaccgtgtgtgggagaaactttacattctagcctcccacgagacagtgaactgtttgtgcctgaagaggggagcagcgagaaggagagcgaggacgcgccaaaaacatctcctccgacgcctgggaaacatggtttggaacagactggggaggaaaaagtgatggtgactgttcctgacaaaaatccaccttgtccttgctgtggtacccgggtaaactctgtgttgaatctgattgaacatctgaaagtgtcacacgggaaaaggggggtttgttttcggtgtgcaaaatgtggaaaggaaaatagtaactatcacagtgttgtttgtcattttaagaaatgcaggggtccagagacggagaaagccccagctggggagtggatttgtgaggtatgcaacagagattttacaaccaaaattggcctgggacaacacaagagattggcacacccagcagtgagaaatcaggaaaggatcgttgcttcccaaccgaaagaaacatcaaatagaggtgctcacaaaaggtgctggacaaaggaggaggaagaattactaataagactggaggctcagttcgagggaaacaaaaatattaataagcttattgcagaacacataaccaccaaaacagctaagcagatcagtgacaaaaggcgattgctgtccagaaagccagcagaggagccacgtgaggagcctggaacgtgtcatcacaccaggagagcagctgcgagcctgagaacggagcctgagatgagtcatcacgcccaggcagaggacagagataatggacctgggagacgccctctgccaggcagggcagctgccggagggagaacaatggacgagataagacgccaccctgataagggcaacggacagcagagacccaccaagcaaaaatcagaagaacagctgcaggcttactataaaaagacactagaggaacgactttcagctggggcacttaacaccttcccccgagcattcaagcaggtaatggaaggccgggatataaagctagtaatcaatcagacagcgcaggactgcttcggatgcctggaatccataagccaaataagaacggcaacccgagataaaaaggacacggtgacccgggagaaacacccaaagaaaccttttcagaagtggatgaagaagagagcaatcaaaaaaggtaattatcttcggttccagcgtttattttatcttgatagagggaaactggctaaaatcattttagatgatattgaatgcttgtcttgtgacataccactcagtgaaatttattcggtttttaaaacaagatgggaaacaactggtagctttaaaagccttggggactttaaaacttacgggaaggctgacaacactgccttcagagaattaattacggctaaagaaattgagaaaaatgtgcaggaaatgagcaaaggctcggctcccggtccagacgggattactcttggggacgtcgtaaagatggatcccgagttttcccggaccatggagattttcaatttatggttaacaactggtaaaatcccggacatggtgagggggtgcagaaccgttttgattccaaaatcatcaaagccggatcgtttgaaagacattaataactggagacctatcacgatcggttccatcttgctgagactgttctccaggattatgacagctaggctgagcaaagcgtgccccctgaacccaaggcaaagaggctttatcagagcggcgggatgctctgaaaacttaaaactcctgcaaactataatttggtcggccaaaagagaacacagaccactgggtgttgtattcgtggacatcgccaaggcttttgacaccgtaagccaccagcacatcattcatgctttgcagcaaagagaggtggatccccacatcgtcggtctggtgagcaatatgtacgagaacatcagtacgtatatcaccacaaagaggaacacacacacagacaaaatccagatccgggttggagtaaagcagggtgacccgatgtcgccccttttatttaacctggcaatggaccctctattatgcaagctggaagagagtggcaaaggataccaccgaggacagagcagcatcacagcgatggcatttgcagacgatctggttttgctgagcgactcctgggaaaatatgaatacaaatattagcatactggagaccttctgcaatctgaccggactcaaaacacaggggcaaaagtgccacggcttttacatcaagccgacaaaggactcttacaccatcaatgactgcgctgcctggactatcaacggcacacccctgaacatgatcgaccccggcgaatctgagaaatacctcggcctgcagtttgacccgtggattggaatagcaaggtccggtctctccacaaaactagatttttggcttcagcggatcgatcaagcaccacttaaacctctgcagaaaactgatattctcaaaacatacaccatccctcggctgatctacatagctgaccactcagaagtgaaaagcgcactactcgaaacccttgaccagaagatccggacagcggtcaaggaatggcttcacctacctccgtgcacctgcgatgccatcctgtactcgagcacgagagacggcggtttgggcatcaccaaattggcaggactgatccccagcgtgcaggcccgtagactgcatcggatcgcacagtcatctgacgatacgatgaaatgcttcatggaaaaagagaaaatggaacagctgcataagaaattgtggattcaagctggaggggacagagagaacataccctcgatttgggaagcaccaccgtcgagtgaaccaccaaacaacgtgagcacaaattcggaatgggaagcaccgacccagaaagataaatttccaaagccttgcaattggaggaaaaacgaattcaaaaaatggaccaaattggcatcccaaggccgcggaattgtaaattttgaaagagacaaaattagtaaccattggatccaatactacagacgcatacctcacaggaaactcctcactgcactacaactcagggccaacgtttaccccacgagagaatttctagccaggggtagacaagaccaatacatcaaggcgtgtaggcactgcgatgcggacaacgaatcctgcgcccacatcatcggcaactgcccagtgacacaggacgcccgaatcaagaggcacaattacatctgcgaactgcttctcgaggaggcgaagaagaaggactgggtagtgttcaaggaaccgcacataagggattccaacaaggaactgtacaaacctgacctgatatttgtgaaggatgggcgtgcacttgtcgtggatgtgacagtacggtatgaagcagccaaatcatcgctggaggaagccgctgcagagaaagtgagaaagtacaaacacctggaaacggaagtaagacatctcacgaatgcaaaggacgttacttttgtgggctttcccctaggagcgcgggggaaatggcaccaagataactttaaacttttgactgagcttggcctctccaaatcgaggcaagtgaaaatggcagagactttttccacagtagcgctcttttcatctgtggacattgtacatatgtttgccagtagggccagaaaatctatggttatgtgataataggctgccttctgcggggcttgccttctggccatgcccttcttctctcccttgcacctgtacctcttggtctttgaataaagcctgagtaggaaggaccggtaaaaaaaaaaaaaaaaaaaaaaaaaaaaaaacgttgactaaaaaaaaaaaaaaaaaaaaaaaaaaaaaaaaaaaaaaaaaaaaaaaaaaaaaaaaaaaaaaaaaaaaaa

SEQ ID NO: 11029 - DNA, 5264 bp, synthetic construct
  source 1..5264: mol_type = other DNA
gaaataagagagaaaagaagagtaagaagaaatataagagaattcgccaccatggcccctaagaaaaagcggaaggtgaatatcagcggctctagctgcggcagccccaacagcgccgacaccagcagcgacttcaaggacctgtggaccaagctgaaggaatgccacgaccgggaagtgcagggactccaggtgaaggtcaccaaactcaagcaagaaagaatcctggacgcccagagactggaagaattcttcaccaagaaccagcagctgagagagcagcagaaagtgctgcacgagacaatcaaggttctggaagatagactgcgggccggcctgtgcgacagatgcgccgtgaccgaggaacacatgcgcaaaaagcagcaggagttcgagaacattagacagcaaaatctgaaattgatcacagagctgatgaacgagagaaacacactgcaggaggagaacaagaagctgagcgagcagctgcaacagaagatcgagaatgatcagcaacaccaggccgctgagctggaatgtgaagaggacgtgatccccgacagcccaatcacagctttcagcttttctggcgtgaacagactgaggcggaaggaaaacccccacgtgcggtacatcgagcagacccataccaagctggaacacagcgtgtgtgccaacgagatgagaaaggtgtccaagtcctccacccatccccagcacaaccctaacgaaaatgagatcctggtggctgatacctacgaccagtctcagagccctatggccaaggcccacggcaccagctcttatacccctgataagagctccttcaacctggccaccgtggtggccgagacactgggcctgggcgtgcaggaggaaagcgagacacagggcccaatgagccctctgggagatgagctgtaccactgcctggaaggcaaccacaagaaacagccttttgagtccggctccgagactcctggaacaagcgagagcgctacacctgagggcagccctaagagaaaggtgtccagcgccgagggcgctgccaaggaagagcctaaacggagaagcgccagactgagcgccaagccccccgccaaggtggaagccaagcctaagaaggccgccgctaaggacaagagcagcgataagaaagtccagaccaagggcaagcggggcgccaaaggcaaacaggccgaggtggccaaccaggagacaaaggaagatctgcctgctgagaacggcgaaaccaagaccgaggaatctccagcttctgacgaggccggagagaaggaggccaaaagcgacagcggctctgagacacctggaacaagcgagagcgccaccccggaatcctatgaacaacttgcaccacaaccgtgtgtgggagaaactttacattctagcctcccacgagacagtgaactgtttgtgcctgaagaggggagcagcgagaaggagagcgaggacgcgccaaaaacatctcctccgacgcctgggaaacatggtttggaacagactggggaggaaaaagtgatggtgactgttcctgacaaaaatccaccttgtccttgctgtggtacccgggtaaactctgtgttgaatctgattgaacatctgaaagtgtcacacgggaaaaggggggtttgttttcggtgtgcaaaatgtggaaaggaaaatagtaactatcacagtgttgtttgtcattttaagaaatgcaggggtccagagacggagaaagccccagctggggagtggatttgtgaggtatgcaacagagattttacaaccaaaattggcctgggacaacacaagagattggcacacccagcagtgagaaatcaggaaaggatcgttgcttcccaaccgaaagaaacatcaaatagaggtgctcacaaaaggtgctggacaaaggaggaggaagaattactaataagactggaggctcagttcgagggaaacaaaaatattaataagcttattgcagaacacataaccaccaaaacagctaagcagatcagtgacaaaaggcgattgctgtccagaaagccagcagaggagccacgtgaggagcctggaacgtgtcatcacaccaggagagcagctgcgagcctgagaacggagcctgagatgagtcatcacgcccaggcagaggacagagataatggacctgggagacgccctctgccaggcagggcagctgccggagggagaacaatggacgagataagacgccaccctgataagggcaacggacagcagagacccaccaagcaaaaatcagaagaacagctgcaggcttactataaaaagacactagaggaacgactttcagctggggcacttaacaccttcccccgagcattcaagcaggtaatggaaggccgggatataaagctagtaatcaatcagacagcgcaggactgcttcggatgcctggaatccataagccaaataagaacggcaacccgagataaaaaggacacggtgacccgggagaaacacccaaagaaaccttttcagaagtggatgaagaagagagcaatcaaaaaaggtaattatcttcggttccagcgtttattttatcttgatagagggaaactggctaaaatcattttagatgatattgaatgcttgtcttgtgacataccactcagtgaaatttattcggtttttaaaacaagatgggaaacaactggtagctttaaaagccttggggactttaaaacttacgggaaggctgacaacactgccttcagagaattaattacggctaaagaaattgagaaaaatgtgcaggaaatgagcaaaggctcggctcccggtccagacgggattactcttggggacgtcgtaaagatggatcccgagttttcccggaccatggagattttcaatttatggttaacaactggtaaaatcccggacatggtgagggggtgcagaaccgttttgattccaaaatcatcaaagccggatcgtttgaaagacattaataactggagacctatcacgatcggttccatcttgctgagactgttctccaggattgtaacagctaggctgagcaaagcgtgccccctgaacccaaggcaaagaggctttatcagagcggcgggatgctctgaaaacttaaaactcctgcaaggcataatttggtcggccaaaagagaacacagaccactgggtgttgtattcgtggacatcgccaaggcttttgacaccgtaagccaccagcacatcattcatgctttgcagcaaagagaggtggatccccacatcgtcggtctggtgagcaatatgtacgagaacatcagtacgtatatcaccacaaagaggaacacacacacagacaaaatccagatccgggttggagtaaagcagggtgacccgatgtcgccccttttatttaacctggcaatggaccctctattatgcaagctggaagagagtggcaaaggataccaccgaggacagagcagcatcacagcgatggcatttgcagacgatctggttttgctgagcgactcctgggaaaatatgaatacaaatattagcatactggagaccttctgcaatctgaccggactcaaaacacaggggcaaaagtgccacggcttttacatcaagccgacaaaggactcttacaccatcaatgactgcgctgcctggactatcaacggcacacccctgaacatgatcgaccccggcgaatctgagaaatacctcggcctgcagtttgacccgtggattggaatagcaaggtccggtctctccacaaaactagatttttggcttcagcggatcgatcaagcaccacttaaacctctgcagaaaactgatattctcaaaacatacaccatccctcggctgatctacatagctgaccactcagaagtgaaaagcgcactactcgaaacccttgaccagaagatccggacagcggtcaaggaatggcttcacctacctccgtgcacctgcgatgccatcctgtactcgagcacgagagacggcggtttgggcatcaccaaattggcaggactgatccccagcgtgcaggcccgtagactgcatcggatcgcacagtcatctgacgatacgatgaaatgcttcatggaaaaagagaaaatggaacagctgcataagaaattgtggattcaagctggaggggacagagagaacataccctcgatttgggaagcaccaccgtcgagtgaaccaccaaacaacgtgagcacaaattcggaatgggaagcaccgacccagaaagataaatttccaaagccttgcaattggaggaaaaacgaattcaaaaaatggaccaaattggcatcccaaggccgcggaattgtaaattttgaaagagacaaaattagtaaccattggatccaatactacagacgcatacctcacaggaaactcctcactgcactacaactcagggccaacgtttaccccacgagagaatttctagccaggggtagacaagaccaatacatcaaggcgtgtaggcactgcgatgcggacaacgaatcctgcgcccacatcatcggcaactgcccagtgacacaggacgcccgaatcaagaggcacaattacatctgcgaactgcttctcgaggaggcgaagaagaaggactgggtagtgttcaaggaaccgcacataagggattccaacaaggaactgtacaaacctgacctgatatttgtgaaggatgggcgtgcacttgtcgtggatgtgacagtacggtatgaagcagccaaatcatcgctggaggaagccgctgcagagaaagtgagaaagtacaaacacctggaaacggaagtaagacatctcacgaatgcaaaggacgttacttttgtgggctttcccctaggagcgcgggggaaatggcaccaagataactttaaacttttgactgagcttggcctctccaaatcgaggcaagtgaaaatggcagagactttttccacagtagcgctcttttcatctgtggacattgtacatatgtttgccagtagggccagaaaatctatggttatgtgataataggctgccttctgcggggcttgccttctggccatgcccttcttctctcccttgcacctgtacctcttggtctttgaataaagcctgagtaggaaggaccggtaaaaaaaaaaaaaaaaaaaaaaaaaaaaaaacgttgactaaaaaaaaaaaaaaaaaaaaaaaaaaaaaaaaaaaaaaaaaaaaaaaaaaaaaaaaaaaaaaaaaaaaaa

SEQ ID NO: 11030 - DNA, 5264 bp, synthetic construct
  source 1..5264: mol_type = other DNA
gaaataagagagaaaagaagagtaagaagaaatataagagaattcgccaccatggcccctaagaaaaagcggaaggtgaatatcagcggctctagctgcggcagccccaacagcgccgacaccagcagcgacttcaaggacctgtggaccaagctgaaggaatgccacgaccgggaagtgcagggactccaggtgaaggtcaccaaactcaagcaagaaagaatcctggacgcccagagactggaagaattcttcaccaagaaccagcagctgagagagcagcagaaagtgctgcacgagacaatcaaggttctggaagatagactgcgggccggcctgtgcgacagatgcgccgtgaccgaggaacacatgcgcaaaaagcagcaggagttcgagaacattagacagcaaaatctgaaattgatcacagagctgatgaacgagagaaacacactgcaggaggagaacaagaagctgagcgagcagctgcaacagaagatcgagaatgatcagcaacaccaggccgctgagctggaatgtgaagaggacgtgatccccgacagcccaatcacagctttcagcttttctggcgtgaacagactgaggcggaaggaaaacccccacgtgcggtacatcgagcagacccataccaagctggaacacagcgtgtgtgccaacgagatgagaaaggtgtccaagtcctccacccatccccagcacaaccctaacgaaaatgagatcctggtggctgatacctacgaccagtctcagagccctatggccaaggcccacggcaccagctcttatacccctgataagagctccttcaacctggccaccgtggtggccgagacactgggcctgggcgtgcaggaggaaagcgagacacagggcccaatgagccctctgggagatgagctgtaccactgcctggaaggcaaccacaagaaacagccttttgagtccggctccgagactcctggaacaagcgagagcgctacacctgagggcagccctaagagaaaggtgtccagcgccgagggcgctgccaaggaagagcctaaacggagaagcgccagactgagcgccaagccccccgccaaggtggaagccaagcctaagaaggccgccgctaaggacaagagcagcgataagaaagtccagaccaagggcaagcggggcgccaaaggcaaacaggccgaggtggccaaccaggagacaaaggaagatctgcctgctgagaacggcgaaaccaagaccgaggaatctccagcttctgacgaggccggagagaaggaggccaaaagcgacagcggctctgagacacctggaacaagcgagagcgccaccccggaatcctatgaacaacttgcaccacaaccgtgtgtgggagaaactttacattctagcctcccacgagacagtgaactgtttgtgcctgaagaggggagcagcgagaaggagagcgaggacgcgccaaaaacatctcctccgacgcctgggaaacatggtttggaacagactggggaggaaaaagtgatggtgactgttcctgacaaaaatccaccttgtccttgctgtggtacccgggtaaactctgtgttgaatctgattgaacatctgaaagtgtcacacgggaaaaggggggtttgttttcggtgtgcaaaatgtggaaaggaaaatagtaactatcacagtgttgtttgtcattttaagaaatgcaggggtccagagacggagaaagccccagctggggagtggatttgtgaggtatgcaacagagattttacaaccaaaattggcctgggacaacacaagagattggcacacccagcagtgagaaatcaggaaaggatcgttgcttcccaaccgaaagaaacatcaaatagaggtgctcacaaaaggtgctggacaaaggaggaggaagaattactaataagactggaggctcagttcgagggaaacaaaaatattaataagcttattgcagaacacataaccaccaaaacagctaagcagatcagtgacaaaaggcgattgctgtccagaaagccagcagaggagccacgtgaggagcctggaacgtgtcatcacaccaggagagcagctgcgagcctgagaacggagcctgagatgagtcatcacgcccaggcagaggacagagataatggacctgggagacgccctctgccaggcagggcagctgccggagggagaacaatggacgagataagacgccaccctgataagggcaacggacagcagagacccaccaagcaaaaatcagaagaacagctgcaggcttactataaaaagacactagaggaacgactttcagctggggcacttaacaccttcccccgagcattcaagcaggtaatggaaggccgggatataaagctagtaatcaatcagacagcgcaggactgcttcggatgcctggaatccataagccaaataagaacggcaacccgagataaaaaggacacggtgacccgggagaaacacccaaagaaaccttttcagaagtggatgaagaagagagcaatcaaaaaaggtaattatcttcggttccagcgtttattttatcttgatagagggaaactggctaaaatcattttagatgatattgaatgcttgtcttgtgacataccactcagtgaaatttattcggtttttaaaacaagatgggaaacaactggtagctttaaaagccttggggactttaaaacttacgggaaggctgacaacactgccttcagagaattaattacggctaaagaaattgagaaaaatgtgcaggaaatgagcaaaggctcggctcccggtccagacgggattactcttggggacgtcgtaaagatggatcccgagttttcccggaccatggagattttcaatttatggttaacaactggtaaaatcccggacatggtgagggggtgcagaaccgttttgattccaaaatcatcaaagccggatcgtttgaaagacattaataactggagacctatcacgatcggttccatcttgctgagactgttctccaggattgtaacagctaggctgagcaaagcgtgccccctgaacccaaggcaaagaggctttatcagagcggcgggatgctctgaaaacttaaaactcctgcaaactataatttggtcggccaaaagagaacacagaccactgggtgttgtattcgtggacatcgccaaggcttttgacaccgtaagccaccagcacatcattcatgctttgcggcaaagagaggtggatccccacatcgtcggtctggtgagcaatatgtacgagaacatcagtacgtatatcaccacaaagaggaacacacacacagacaaaatccagatccgggttggagtaaagcagggtgacccgatgtcgccccttttatttaacctggcaatggaccctctattatgcaagctggaagagagtggcaaaggataccaccgaggacagagcagcatcacagcgatggcatttgcagacgatctggttttgctgagcgactcctgggaaaatatgaatacaaatattagcatactggagaccttctgcaatctgaccggactcaaaacacaggggcaaaagtgccacggcttttacatcaagccgacaaaggactcttacaccatcaatgactgcgctgcctggactatcaacggcacacccctgaacatgatcgaccccggcgaatctgagaaatacctcggcctgcagtttgacccgtggattggaatagcaaggtccggtctctccacaaaactagatttttggcttcagcggatcgatcaagcaccacttaaacctctgcagaaaactgatattctcaaaacatacaccatccctcggctgatctacatagctgaccactcagaagtgaaaagcgcactactcgaaacccttgaccagaagatccggacagcggtcaaggaatggcttcacctacctccgtgcacctgcgatgccatcctgtactcgagcacgagagacggcggtttgggcatcaccaaattggcaggactgatccccagcgtgcaggcccgtagactgcatcggatcgcacagtcatctgacgatacgatgaaatgcttcatggaaaaagagaaaatggaacagctgcataagaaattgtggattcaagctggaggggacagagagaacataccctcgatttgggaagcaccaccgtcgagtgaaccaccaaacaacgtgagcacaaattcggaatgggaagcaccgacccagaaagataaatttccaaagccttgcaattggaggaaaaacgaattcaaaaaatggaccaaattggcatcccaaggccgcggaattgtaaattttgaaagagacaaaattagtaaccattggatccaatactacagacgcatacctcacaggaaactcctcactgcactacaactcagggccaacgtttaccccacgagagaatttctagccaggggtagacaagaccaatacatcaaggcgtgtaggcactgcgatgcggacaacgaatcctgcgcccacatcatcggcaactgcccagtgacacaggacgcccgaatcaagaggcacaattacatctgcgaactgcttctcgaggaggcgaagaagaaggactgggtagtgttcaaggaaccgcacataagggattccaacaaggaactgtacaaacctgacctgatatttgtgaaggatgggcgtgcacttgtcgtggatgtgacagtacggtatgaagcagccaaatcatcgctggaggaagccgctgcagagaaagtgagaaagtacaaacacctggaaacggaagtaagacatctcacgaatgcaaaggacgttacttttgtgggctttcccctaggagcgcgggggaaatggcaccaagataactttaaacttttgactgagcttggcctctccaaatcgaggcaagtgaaaatggcagagactttttccacagtagcgctcttttcatctgtggacattgtacatatgtttgccagtagggccagaaaatctatggttatgtgataataggctgccttctgcggggcttgccttctggccatgcccttcttctctcccttgcacctgtacctcttggtctttgaataaagcctgagtaggaaggaccggtaaaaaaaaaaaaaaaaaaaaaaaaaaaaaaacgttgactaaaaaaaaaaaaaaaaaaaaaaaaaaaaaaaaaaaaaaaaaaaaaaaaaaaaaaaaaaaaaaaaaaaaaa

SEQ ID NO: 11031 - DNA, 5264 bp, synthetic construct
  source 1..5264: mol_type = other DNA
gaaataagagagaaaagaagagtaagaagaaatataagagaattcgccaccatggcccctaagaaaaagcggaaggtgaatatcagcggctctagctgcggcagccccaacagcgccgacaccagcagcgacttcaaggacctgtggaccaagctgaaggaatgccacgaccgggaagtgcagggactccaggtgaaggtcaccaaactcaagcaagaaagaatcctggacgcccagagactggaagaattcttcaccaagaaccagcagctgagagagcagcagaaagtgctgcacgagacaatcaaggttctggaagatagactgcgggccggcctgtgcgacagatgcgccgtgaccgaggaacacatgcgcaaaaagcagcaggagttcgagaacattagacagcaaaatctgaaattgatcacagagctgatgaacgagagaaacacactgcaggaggagaacaagaagctgagcgagcagctgcaacagaagatcgagaatgatcagcaacaccaggccgctgagctggaatgtgaagaggacgtgatccccgacagcccaatcacagctttcagcttttctggcgtgaacagactgaggcggaaggaaaacccccacgtgcggtacatcgagcagacccataccaagctggaacacagcgtgtgtgccaacgagatgagaaaggtgtccaagtcctccacccatccccagcacaaccctaacgaaaatgagatcctggtggctgatacctacgaccagtctcagagccctatggccaaggcccacggcaccagctcttatacccctgataagagctccttcaacctggccaccgtggtggccgagacactgggcctgggcgtgcaggaggaaagcgagacacagggcccaatgagccctctgggagatgagctgtaccactgcctggaaggcaaccacaagaaacagccttttgagtccggctccgagactcctggaacaagcgagagcgctacacctgagggcagccctaagagaaaggtgtccagcgccgagggcgctgccaaggaagagcctaaacggagaagcgccagactgagcgccaagccccccgccaaggtggaagccaagcctaagaaggccgccgctaaggacaagagcagcgataagaaagtccagaccaagggcaagcggggcgccaaaggcaaacaggccgaggtggccaaccaggagacaaaggaagatctgcctgctgagaacggcgaaaccaagaccgaggaatctccagcttctgacgaggccggagagaaggaggccaaaagcgacagcggctctgagacacctggaacaagcgagagcgccaccccggaatcctatgaacaacttgcaccacaaccgtgtgtgggagaaactttacattctagcctcccacgagacagtgaactgtttgtgcctgaagaggggagcagcgagaaggagagcgaggacgcgccaaaaacatctcctccgacgcctgggaaacatggtttggaacagactggggaggaaaaagtgatggtgactgttcctgacaaaaatccaccttgtccttgctgtggtacccgggtaaactctgtgttgaatctgattgaacatctgaaagtgtcacacgggaaaaggggggtttgttttcggtgtgcaaaatgtggaaaggaaaatagtaactatcacagtgttgtttgtcattttaagaaatgcaggggtccagagacggagaaagccccagctggggagtggatttgtgaggtatgcaacagagattttacaaccaaaattggcctgggacaacacaagagattggcacacccagcagtgagaaatcaggaaaggatcgttgcttcccaaccgaaagaaacatcaaatagaggtgctcacaaaaggtgctggacaaaggaggaggaagaattactaataagactggaggctcagttcgagggaaacaaaaatattaataagcttattgcagaacacataaccaccaaaacagctaagcagatcagtgacaaaaggcgattgctgtccagaaagccagcagaggagccacgtgaggagcctggaacgtgtcatcacaccaggagagcagctgcgagcctgagaacggagcctgagatgagtcatcacgcccaggcagaggacagagataatggacctgggagacgccctctgccaggcagggcagctgccggagggagaacaatggacgagataagacgccaccctgataagggcaacggacagcagagacccaccaagcaaaaatcagaagaacagctgcaggcttactataaaaagacactagaggaacgactttcagctggggcacttaacaccttcccccgagcattcaagcaggtaatggaaggccgggatataaagctagtaatcaatcagacagcgcaggactgcttcggatgcctggaatccataagccaaataagaacggcaacccgagataaaaaggacacggtgacccgggagaaacacccaaagaaaccttttcagaagtggatgaagaagagagcaatcaaaaaaggtaattatcttcggttccagcgtttattttatcttgatagagggaaactggctaaaatcattttagatgatattgaatgcttgtcttgtgacataccactcagtgaaatttattcggtttttaaaacaagatgggaaacaactggtagctttaaaagccttggggactttaaaacttacgggaaggctgacaacactgccttcagagaattaattacggctaaagaaattgagaaaaatgtgcaggaaatgagcaaaggctcggctcccggtccagacgggattactcttggggacgtcgtaaagatggatcccgagttttcccggaccatggagattttcaatttatggttaacaactggtaaaatcccggacatggtgagggggtgcagaaccgttttgattccaaaatcatcaaagccggatcgtttgaaagacattaataactggagacctatcacgatcggttccatcttgctgagactgttctccaggattgtaacagctaggctgagcaaagcgtgccccctgaacccaaggcaaagaggctttatcagagcggcgggatgctctgaaaacttaaaactcctgcaaactataatttggtcggccaaaagagaacacagaccactgggtgttgtattcgtggacatcgccaaggcttttgacaccgtaagccaccagcacatcattcatgctttgcagcaaagagaggtggatccccacatcgtcggtctggtgagcaatatgtacgagaactgcagtacgtatatcaccacaaagaggaacacacacacagacaaaatccagatccgggttggagtaaagcagggtgacccgatgtcgccccttttatttaacctggcaatggaccctctattatgcaagctggaagagagtggcaaaggataccaccgaggacagagcagcatcacagcgatggcatttgcagacgatctggttttgctgagcgactcctgggaaaatatgaatacaaatattagcatactggagaccttctgcaatctgaccggactcaaaacacaggggcaaaagtgccacggcttttacatcaagccgacaaaggactcttacaccatcaatgactgcgctgcctggactatcaacggcacacccctgaacatgatcgaccccggcgaatctgagaaatacctcggcctgcagtttgacccgtggattggaatagcaaggtccggtctctccacaaaactagatttttggcttcagcggatcgatcaagcaccacttaaacctctgcagaaaactgatattctcaaaacatacaccatccctcggctgatctacatagctgaccactcagaagtgaaaagcgcactactcgaaacccttgaccagaagatccggacagcggtcaaggaatggcttcacctacctccgtgcacctgcgatgccatcctgtactcgagcacgagagacggcggtttgggcatcaccaaattggcaggactgatccccagcgtgcaggcccgtagactgcatcggatcgcacagtcatctgacgatacgatgaaatgcttcatggaaaaagagaaaatggaacagctgcataagaaattgtggattcaagctggaggggacagagagaacataccctcgatttgggaagcaccaccgtcgagtgaaccaccaaacaacgtgagcacaaattcggaatgggaagcaccgacccagaaagataaatttccaaagccttgcaattggaggaaaaacgaattcaaaaaatggaccaaattggcatcccaaggccgcggaattgtaaattttgaaagagacaaaattagtaaccattggatccaatactacagacgcatacctcacaggaaactcctcactgcactacaactcagggccaacgtttaccccacgagagaatttctagccaggggtagacaagaccaatacatcaaggcgtgtaggcactgcgatgcggacaacgaatcctgcgcccacatcatcggcaactgcccagtgacacaggacgcccgaatcaagaggcacaattacatctgcgaactgcttctcgaggaggcgaagaagaaggactgggtagtgttcaaggaaccgcacataagggattccaacaaggaactgtacaaacctgacctgatatttgtgaaggatgggcgtgcacttgtcgtggatgtgacagtacggtatgaagcagccaaatcatcgctggaggaagccgctgcagagaaagtgagaaagtacaaacacctggaaacggaagtaagacatctcacgaatgcaaaggacgttacttttgtgggctttcccctaggagcgcgggggaaatggcaccaagataactttaaacttttgactgagcttggcctctccaaatcgaggcaagtgaaaatggcagagactttttccacagtagcgctcttttcatctgtggacattgtacatatgtttgccagtagggccagaaaatctatggttatgtgataataggctgccttctgcggggcttgccttctggccatgcccttcttctctcccttgcacctgtacctcttggtctttgaataaagcctgagtaggaaggaccggtaaaaaaaaaaaaaaaaaaaaaaaaaaaaaaacgttgactaaaaaaaaaaaaaaaaaaaaaaaaaaaaaaaaaaaaaaaaaaaaaaaaaaaaaaaaaaaaaaaaaaaaaa

SEQ ID NO: 11032 - DNA, 5264 bp, synthetic construct
  source 1..5264: mol_type = other DNA
gaaataagagagaaaagaagagtaagaagaaatataagagaattcgccaccatggcccctaagaaaaagcggaaggtgaatatcagcggctctagctgcggcagccccaacagcgccgacaccagcagcgacttcaaggacctgtggaccaagctgaaggaatgccacgaccgggaagtgcagggactccaggtgaaggtcaccaaactcaagcaagaaagaatcctggacgcccagagactggaagaattcttcaccaagaaccagcagctgagagagcagcagaaagtgctgcacgagacaatcaaggttctggaagatagactgcgggccggcctgtgcgacagatgcgccgtgaccgaggaacacatgcgcaaaaagcagcaggagttcgagaacattagacagcaaaatctgaaattgatcacagagctgatgaacgagagaaacacactgcaggaggagaacaagaagctgagcgagcagctgcaacagaagatcgagaatgatcagcaacaccaggccgctgagctggaatgtgaagaggacgtgatccccgacagcccaatcacagctttcagcttttctggcgtgaacagactgaggcggaaggaaaacccccacgtgcggtacatcgagcagacccataccaagctggaacacagcgtgtgtgccaacgagatgagaaaggtgtccaagtcctccacccatccccagcacaaccctaacgaaaatgagatcctggtggctgatacctacgaccagtctcagagccctatggccaaggcccacggcaccagctcttatacccctgataagagctccttcaacctggccaccgtggtggccgagacactgggcctgggcgtgcaggaggaaagcgagacacagggcccaatgagccctctgggagatgagctgtaccactgcctggaaggcaaccacaagaaacagccttttgagtccggctccgagactcctggaacaagcgagagcgctacacctgagggcagccctaagagaaaggtgtccagcgccgagggcgctgccaaggaagagcctaaacggagaagcgccagactgagcgccaagccccccgccaaggtggaagccaagcctaagaaggccgccgctaaggacaagagcagcgataagaaagtccagaccaagggcaagcggggcgccaaaggcaaacaggccgaggtggccaaccaggagacaaaggaagatctgcctgctgagaacggcgaaaccaagaccgaggaatctccagcttctgacgaggccggagagaaggaggccaaaagcgacagcggctctgagacacctggaacaagcgagagcgccaccccggaatcctatgaacaacttgcaccacaaccgtgtgtgggagaaactttacattctagcctcccacgagacagtgaactgtttgtgcctgaagaggggagcagcgagaaggagagcgaggacgcgccaaaaacatctcctccgacgcctgggaaacatggtttggaacagactggggaggaaaaagtgatggtgactgttcctgacaaaaatccaccttgtccttgctgtggtacccgggtaaactctgtgttgaatctgattgaacatctgaaagtgtcacacgggaaaaggggggtttgttttcggtgtgcaaaatgtggaaaggaaaatagtaactatcacagtgttgtttgtcattttaagaaatgcaggggtccagagacggagaaagccccagctggggagtggatttgtgaggtatgcaacagagattttacaaccaaaattggcctgggacaacacaagagattggcacacccagcagtgagaaatcaggaaaggatcgttgcttcccaaccgaaagaaacatcaaatagaggtgctcacaaaaggtgctggacaaaggaggaggaagaattactaataagactggaggctcagttcgagggaaacaaaaatattaataagcttattgcagaacacataaccaccaaaacagctaagcagatcagtgacaaaaggcgattgctgtccagaaagccagcagaggagccacgtgaggagcctggaacgtgtcatcacaccaggagagcagctgcgagcctgagaacggagcctgagatgagtcatcacgcccaggcagaggacagagataatggacctgggagacgccctctgccaggcagggcagctgccggagggagaacaatggacgagataagacgccaccctgataagggcaacggacagcagagacccaccaagcaaaaatcagaagaacagctgcaggcttactataaaaagacactagaggaacgactttcagctggggcacttaacaccttcccccgagcattcaagcaggtaatggaaggccgggatataaagctagtaatcaatcagacagcgcaggactgcttcggatgcctggaatccataagccaaataagaacggcaacccgagataaaaaggacacggtgacccgggagaaacacccaaagaaaccttttcagaagtggatgaagaagagagcaatcaaaaaaggtaattatcttcggttccagcgtttattttatcttgatagagggaaactggctaaaatcattttagatgatattgaatgcttgtcttgtgacataccactcagtgaaatttattcggtttttaaaacaagatgggaaacaactggtagctttaaaagccttggggactttaaaacttacgggaaggctgacaacactgccttcagagaattaattacggctaaagaaattgagaaaaatgtgcaggaaatgagcaaaggctcggctcccggtccagacgggattactcttggggacgtcgtaaagatggatcccgagttttcccggaccatggagattttcaatttatggttaacaactggtaaaatcccggacatggtgagggggtgcagaaccgttttgattccaaaatcatcaaagccggatcgtttgaaagacattaataactggagacctatcacgatcggttccatcttgctgagactgttctccaggattgtaacagctaggctgagcaaagcgtgccccctgaacccaaggcaaagaggctttatcagagcggcgggatgctctgaaaacttaaaactcctgcaaactataatttggtcggccaaaagagaacacagaccactgggtgttgtattcgtggacatcgccaaggcttttgacaccgtaagccaccagcacatcattcatgctttgcagcaaagagaggtggatccccacatcgtcggtctggtgagcaatatgtacgagaacatcagtacgagaatcaccacaaagaggaacacacacacagacaaaatccagatccgggttggagtaaagcagggtgacccgatgtcgccccttttatttaacctggcaatggaccctctattatgcaagctggaagagagtggcaaaggataccaccgaggacagagcagcatcacagcgatggcatttgcagacgatctggttttgctgagcgactcctgggaaaatatgaatacaaatattagcatactggagaccttctgcaatctgaccggactcaaaacacaggggcaaaagtgccacggcttttacatcaagccgacaaaggactcttacaccatcaatgactgcgctgcctggactatcaacggcacacccctgaacatgatcgaccccggcgaatctgagaaatacctcggcctgcagtttgacccgtggattggaatagcaaggtccggtctctccacaaaactagatttttggcttcagcggatcgatcaagcaccacttaaacctctgcagaaaactgatattctcaaaacatacaccatccctcggctgatctacatagctgaccactcagaagtgaaaagcgcactactcgaaacccttgaccagaagatccggacagcggtcaaggaatggcttcacctacctccgtgcacctgcgatgccatcctgtactcgagcacgagagacggcggtttgggcatcaccaaattggcaggactgatccccagcgtgcaggcccgtagactgcatcggatcgcacagtcatctgacgatacgatgaaatgcttcatggaaaaagagaaaatggaacagctgcataagaaattgtggattcaagctggaggggacagagagaacataccctcgatttgggaagcaccaccgtcgagtgaaccaccaaacaacgtgagcacaaattcggaatgggaagcaccgacccagaaagataaatttccaaagccttgcaattggaggaaaaacgaattcaaaaaatggaccaaattggcatcccaaggccgcggaattgtaaattttgaaagagacaaaattagtaaccattggatccaatactacagacgcatacctcacaggaaactcctcactgcactacaactcagggccaacgtttaccccacgagagaatttctagccaggggtagacaagaccaatacatcaaggcgtgtaggcactgcgatgcggacaacgaatcctgcgcccacatcatcggcaactgcccagtgacacaggacgcccgaatcaagaggcacaattacatctgcgaactgcttctcgaggaggcgaagaagaaggactgggtagtgttcaaggaaccgcacataagggattccaacaaggaactgtacaaacctgacctgatatttgtgaaggatgggcgtgcacttgtcgtggatgtgacagtacggtatgaagcagccaaatcatcgctggaggaagccgctgcagagaaagtgagaaagtacaaacacctggaaacggaagtaagacatctcacgaatgcaaaggacgttacttttgtgggctttcccctaggagcgcgggggaaatggcaccaagataactttaaacttttgactgagcttggcctctccaaatcgaggcaagtgaaaatggcagagactttttccacagtagcgctcttttcatctgtggacattgtacatatgtttgccagtagggccagaaaatctatggttatgtgataataggctgccttctgcggggcttgccttctggccatgcccttcttctctcccttgcacctgtacctcttggtctttgaataaagcctgagtaggaaggaccggtaaaaaaaaaaaaaaaaaaaaaaaaaaaaaaacgttgactaaaaaaaaaaaaaaaaaaaaaaaaaaaaaaaaaaaaaaaaaaaaaaaaaaaaaaaaaaaaaaaaaaaaaa

SEQ ID NO: 11033 - DNA, 5264 bp, synthetic construct
  source 1..5264: mol_type = other DNA
gaaataagagagaaaagaagagtaagaagaaatataagagaattcgccaccatggcccctaagaaaaagcggaaggtgaatatcagcggctctagctgcggcagccccaacagcgccgacaccagcagcgacttcaaggacctgtggaccaagctgaaggaatgccacgaccgggaagtgcagggactccaggtgaaggtcaccaaactcaagcaagaaagaatcctggacgcccagagactggaagaattcttcaccaagaaccagcagctgagagagcagcagaaagtgctgcacgagacaatcaaggttctggaagatagactgcgggccggcctgtgcgacagatgcgccgtgaccgaggaacacatgcgcaaaaagcagcaggagttcgagaacattagacagcaaaatctgaaattgatcacagagctgatgaacgagagaaacacactgcaggaggagaacaagaagctgagcgagcagctgcaacagaagatcgagaatgatcagcaacaccaggccgctgagctggaatgtgaagaggacgtgatccccgacagcccaatcacagctttcagcttttctggcgtgaacagactgaggcggaaggaaaacccccacgtgcggtacatcgagcagacccataccaagctggaacacagcgtgtgtgccaacgagatgagaaaggtgtccaagtcctccacccatccccagcacaaccctaacgaaaatgagatcctggtggctgatacctacgaccagtctcagagccctatggccaaggcccacggcaccagctcttatacccctgataagagctccttcaacctggccaccgtggtggccgagacactgggcctgggcgtgcaggaggaaagcgagacacagggcccaatgagccctctgggagatgagctgtaccactgcctggaaggcaaccacaagaaacagccttttgagtccggctccgagactcctggaacaagcgagagcgctacacctgagggcagccctaagagaaaggtgtccagcgccgagggcgctgccaaggaagagcctaaacggagaagcgccagactgagcgccaagccccccgccaaggtggaagccaagcctaagaaggccgccgctaaggacaagagcagcgataagaaagtccagaccaagggcaagcggggcgccaaaggcaaacaggccgaggtggccaaccaggagacaaaggaagatctgcctgctgagaacggcgaaaccaagaccgaggaatctccagcttctgacgaggccggagagaaggaggccaaaagcgacagcggctctgagacacctggaacaagcgagagcgccaccccggaatcctatgaacaacttgcaccacaaccgtgtgtgggagaaactttacattctagcctcccacgagacagtgaactgtttgtgcctgaagaggggagcagcgagaaggagagcgaggacgcgccaaaaacatctcctccgacgcctgggaaacatggtttggaacagactggggaggaaaaagtgatggtgactgttcctgacaaaaatccaccttgtccttgctgtggtacccgggtaaactctgtgttgaatctgattgaacatctgaaagtgtcacacgggaaaaggggggtttgttttcggtgtgcaaaatgtggaaaggaaaatagtaactatcacagtgttgtttgtcattttaagaaatgcaggggtccagagacggagaaagccccagctggggagtggatttgtgaggtatgcaacagagattttacaaccaaaattggcctgggacaacacaagagattggcacacccagcagtgagaaatcaggaaaggatcgttgcttcccaaccgaaagaaacatcaaatagaggtgctcacaaaaggtgctggacaaaggaggaggaagaattactaataagactggaggctcagttcgagggaaacaaaaatattaataagcttattgcagaacacataaccaccaaaacagctaagcagatcagtgacaaaaggcgattgctgtccagaaagccagcagaggagccacgtgaggagcctggaacgtgtcatcacaccaggagagcagctgcgagcctgagaacggagcctgagatgagtcatcacgcccaggcagaggacagagataatggacctgggagacgccctctgccaggcagggcagctgccggagggagaacaatggacgagataagacgccaccctgataagggcaacggacagcagagacccaccaagcaaaaatcagaagaacagctgcaggcttactataaaaagacactagaggaacgactttcagctggggcacttaacaccttcccccgagcattcaagcaggtaatggaaggccgggatataaagctagtaatcaatcagacagcgcaggactgcttcggatgcctggaatccataagccaaataagaacggcaacccgagataaaaaggacacggtgacccgggagaaacacccaaagaaaccttttcagaagtggatgaagaagagagcaatcaaaaaaggtaattatcttcggttccagcgtttattttatcttgatagagggaaactggctaaaatcattttagatgatattgaatgcttgtcttgtgacataccactcagtgaaatttattcggtttttaaaacaagatgggaaacaactggtagctttaaaagccttggggactttaaaacttacgggaaggctgacaacactgccttcagagaattaattacggctaaagaaattgagaaaaatgtgcaggaaatgagcaaaggctcggctcccggtccagacgggattactcttggggacgtcgtaaagatggatcccgagttttcccggaccatggagattttcaatttatggttaacaactggtaaaatcccggacatggtgagggggtgcagaaccgttttgattccaaaatcatcaaagccggatcgtttgaaagacattaataactggagacctatcacgatcggttccatcttgctgagactgttctccaggattgtaacagctaggctgagcaaagcgtgccccctgaacccaaggcaaagaggctttatcagagcggcgggatgctctgaaaacttaaaactcctgcaaactataatttggtcggccaaaagagaacacagaccactgggtgttgtattcgtggacatcgccaaggcttttgacaccgtaagccaccagcacatcattcatgctttgcagcaaagagaggtggatccccacatcgtcggtctggtgagcaatatgtacgagaacatcagtacgtatatcgagacaaagaggaacacacacacagacaaaatccagatccgggttggagtaaagcagggtgacccgatgtcgccccttttatttaacctggcaatggaccctctattatgcaagctggaagagagtggcaaaggataccaccgaggacagagcagcatcacagcgatggcatttgcagacgatctggttttgctgagcgactcctgggaaaatatgaatacaaatattagcatactggagaccttctgcaatctgaccggactcaaaacacaggggcaaaagtgccacggcttttacatcaagccgacaaaggactcttacaccatcaatgactgcgctgcctggactatcaacggcacacccctgaacatgatcgaccccggcgaatctgagaaatacctcggcctgcagtttgacccgtggattggaatagcaaggtccggtctctccacaaaactagatttttggcttcagcggatcgatcaagcaccacttaaacctctgcagaaaactgatattctcaaaacatacaccatccctcggctgatctacatagctgaccactcagaagtgaaaagcgcactactcgaaacccttgaccagaagatccggacagcggtcaaggaatggcttcacctacctccgtgcacctgcgatgccatcctgtactcgagcacgagagacggcggtttgggcatcaccaaattggcaggactgatccccagcgtgcaggcccgtagactgcatcggatcgcacagtcatctgacgatacgatgaaatgcttcatggaaaaagagaaaatggaacagctgcataagaaattgtggattcaagctggaggggacagagagaacataccctcgatttgggaagcaccaccgtcgagtgaaccaccaaacaacgtgagcacaaattcggaatgggaagcaccgacccagaaagataaatttccaaagccttgcaattggaggaaaaacgaattcaaaaaatggaccaaattggcatcccaaggccgcggaattgtaaattttgaaagagacaaaattagtaaccattggatccaatactacagacgcatacctcacaggaaactcctcactgcactacaactcagggccaacgtttaccccacgagagaatttctagccaggggtagacaagaccaatacatcaaggcgtgtaggcactgcgatgcggacaacgaatcctgcgcccacatcatcggcaactgcccagtgacacaggacgcccgaatcaagaggcacaattacatctgcgaactgcttctcgaggaggcgaagaagaaggactgggtagtgttcaaggaaccgcacataagggattccaacaaggaactgtacaaacctgacctgatatttgtgaaggatgggcgtgcacttgtcgtggatgtgacagtacggtatgaagcagccaaatcatcgctggaggaagccgctgcagagaaagtgagaaagtacaaacacctggaaacggaagtaagacatctcacgaatgcaaaggacgttacttttgtgggctttcccctaggagcgcgggggaaatggcaccaagataactttaaacttttgactgagcttggcctctccaaatcgaggcaagtgaaaatggcagagactttttccacagtagcgctcttttcatctgtggacattgtacatatgtttgccagtagggccagaaaatctatggttatgtgataataggctgccttctgcggggcttgccttctggccatgcccttcttctctcccttgcacctgtacctcttggtctttgaataaagcctgagtaggaaggaccggtaaaaaaaaaaaaaaaaaaaaaaaaaaaaaaacgttgactaaaaaaaaaaaaaaaaaaaaaaaaaaaaaaaaaaaaaaaaaaaaaaaaaaaaaaaaaaaaaaaaaaaaaa

SEQ ID NO: 11034 - DNA, 5264 bp, synthetic construct
  source 1..5264: mol_type = other DNA
gaaataagagagaaaagaagagtaagaagaaatataagagaattcgccaccatggcccctaagaaaaagcggaaggtgaatatcagcggctctagctgcggcagccccaacagcgccgacaccagcagcgacttcaaggacctgtggaccaagctgaaggaatgccacgaccgggaagtgcagggactccaggtgaaggtcaccaaactcaagcaagaaagaatcctggacgcccagagactggaagaattcttcaccaagaaccagcagctgagagagcagcagaaagtgctgcacgagacaatcaaggttctggaagatagactgcgggccggcctgtgcgacagatgcgccgtgaccgaggaacacatgcgcaaaaagcagcaggagttcgagaacattagacagcaaaatctgaaattgatcacagagctgatgaacgagagaaacacactgcaggaggagaacaagaagctgagcgagcagctgcaacagaagatcgagaatgatcagcaacaccaggccgctgagctggaatgtgaagaggacgtgatccccgacagcccaatcacagctttcagcttttctggcgtgaacagactgaggcggaaggaaaacccccacgtgcggtacatcgagcagacccataccaagctggaacacagcgtgtgtgccaacgagatgagaaaggtgtccaagtcctccacccatccccagcacaaccctaacgaaaatgagatcctggtggctgatacctacgaccagtctcagagccctatggccaaggcccacggcaccagctcttatacccctgataagagctccttcaacctggccaccgtggtggccgagacactgggcctgggcgtgcaggaggaaagcgagacacagggcccaatgagccctctgggagatgagctgtaccactgcctggaaggcaaccacaagaaacagccttttgagtccggctccgagactcctggaacaagcgagagcgctacacctgagggcagccctaagagaaaggtgtccagcgccgagggcgctgccaaggaagagcctaaacggagaagcgccagactgagcgccaagccccccgccaaggtggaagccaagcctaagaaggccgccgctaaggacaagagcagcgataagaaagtccagaccaagggcaagcggggcgccaaaggcaaacaggccgaggtggccaaccaggagacaaaggaagatctgcctgctgagaacggcgaaaccaagaccgaggaatctccagcttctgacgaggccggagagaaggaggccaaaagcgacagcggctctgagacacctggaacaagcgagagcgccaccccggaatcctatgaacaacttgcaccacaaccgtgtgtgggagaaactttacattctagcctcccacgagacagtgaactgtttgtgcctgaagaggggagcagcgagaaggagagcgaggacgcgccaaaaacatctcctccgacgcctgggaaacatggtttggaacagactggggaggaaaaagtgatggtgactgttcctgacaaaaatccaccttgtccttgctgtggtacccgggtaaactctgtgttgaatctgattgaacatctgaaagtgtcacacgggaaaaggggggtttgttttcggtgtgcaaaatgtggaaaggaaaatagtaactatcacagtgttgtttgtcattttaagaaatgcaggggtccagagacggagaaagccccagctggggagtggatttgtgaggtatgcaacagagattttacaaccaaaattggcctgggacaacacaagagattggcacacccagcagtgagaaatcaggaaaggatcgttgcttcccaaccgaaagaaacatcaaatagaggtgctcacaaaaggtgctggacaaaggaggaggaagaattactaataagactggaggctcagttcgagggaaacaaaaatattaataagcttattgcagaacacataaccaccaaaacagctaagcagatcagtgacaaaaggcgattgctgtccagaaagccagcagaggagccacgtgaggagcctggaacgtgtcatcacaccaggagagcagctgcgagcctgagaacggagcctgagatgagtcatcacgcccaggcagaggacagagataatggacctgggagacgccctctgccaggcagggcagctgccggagggagaacaatggacgagataagacgccaccctgataagggcaacggacagcagagacccaccaagcaaaaatcagaagaacagctgcaggcttactataaaaagacactagaggaacgactttcagctggggcacttaacaccttcccccgagcattcaagcaggtaatggaaggccgggatataaagctagtaatcaatcagacagcgcaggactgcttcggatgcctggaatccataagccaaataagaacggcaacccgagataaaaaggacacggtgacccgggagaaacacccaaagaaaccttttcagaagtggatgaagaagagagcaatcaaaaaaggtaattatcttcggttccagcgtttattttatcttgatagagggaaactggctaaaatcattttagatgatattgaatgcttgtcttgtgacataccactcagtgaaatttattcggtttttaaaacaagatgggaaacaactggtagctttaaaagccttggggactttaaaacttacgggaaggctgacaacactgccttcagagaattaattacggctaaagaaattgagaaaaatgtgcaggaaatgagcaaaggctcggctcccggtccagacgggattactcttggggacgtcgtaaagatggatcccgagttttcccggaccatggagattttcaatttatggttaacaactggtaaaatcccggacatggtgagggggtgcagaaccgttttgattccaaaatcatcaaagccggatcgtttgaaagacattaataactggagacctatcacgatcggttccatcttgctgagactgttctccaggattgtaacagctaggctgagcaaagcgtgccccctgaacccaaggcaaagaggctttatcagagcggcgggatgctctgaaaacttaaaactcctgcaaactataatttggtcggccaaaagagaacacagaccactgggtgttgtattcgtggacatcgccaaggcttttgacaccgtaagccaccagcacatcattcatgctttgcagcaaagagaggtggatccccacatcgtcggtctggtgagcaatatgtacgagaacatcagtacgtatatcaccacaaagaggaacacaaagacagacaaaatccagatccgggttggagtaaagcagggtgacccgatgtcgccccttttatttaacctggcaatggaccctctattatgcaagctggaagagagtggcaaaggataccaccgaggacagagcagcatcacagcgatggcatttgcagacgatctggttttgctgagcgactcctgggaaaatatgaatacaaatattagcatactggagaccttctgcaatctgaccggactcaaaacacaggggcaaaagtgccacggcttttacatcaagccgacaaaggactcttacaccatcaatgactgcgctgcctggactatcaacggcacacccctgaacatgatcgaccccggcgaatctgagaaatacctcggcctgcagtttgacccgtggattggaatagcaaggtccggtctctccacaaaactagatttttggcttcagcggatcgatcaagcaccacttaaacctctgcagaaaactgatattctcaaaacatacaccatccctcggctgatctacatagctgaccactcagaagtgaaaagcgcactactcgaaacccttgaccagaagatccggacagcggtcaaggaatggcttcacctacctccgtgcacctgcgatgccatcctgtactcgagcacgagagacggcggtttgggcatcaccaaattggcaggactgatccccagcgtgcaggcccgtagactgcatcggatcgcacagtcatctgacgatacgatgaaatgcttcatggaaaaagagaaaatggaacagctgcataagaaattgtggattcaagctggaggggacagagagaacataccctcgatttgggaagcaccaccgtcgagtgaaccaccaaacaacgtgagcacaaattcggaatgggaagcaccgacccagaaagataaatttccaaagccttgcaattggaggaaaaacgaattcaaaaaatggaccaaattggcatcccaaggccgcggaattgtaaattttgaaagagacaaaattagtaaccattggatccaatactacagacgcatacctcacaggaaactcctcactgcactacaactcagggccaacgtttaccccacgagagaatttctagccaggggtagacaagaccaatacatcaaggcgtgtaggcactgcgatgcggacaacgaatcctgcgcccacatcatcggcaactgcccagtgacacaggacgcccgaatcaagaggcacaattacatctgcgaactgcttctcgaggaggcgaagaagaaggactgggtagtgttcaaggaaccgcacataagggattccaacaaggaactgtacaaacctgacctgatatttgtgaaggatgggcgtgcacttgtcgtggatgtgacagtacggtatgaagcagccaaatcatcgctggaggaagccgctgcagagaaagtgagaaagtacaaacacctggaaacggaagtaagacatctcacgaatgcaaaggacgttacttttgtgggctttcccctaggagcgcgggggaaatggcaccaagataactttaaacttttgactgagcttggcctctccaaatcgaggcaagtgaaaatggcagagactttttccacagtagcgctcttttcatctgtggacattgtacatatgtttgccagtagggccagaaaatctatggttatgtgataataggctgccttctgcggggcttgccttctggccatgcccttcttctctcccttgcacctgtacctcttggtctttgaataaagcctgagtaggaaggaccggtaaaaaaaaaaaaaaaaaaaaaaaaaaaaaaacgttgactaaaaaaaaaaaaaaaaaaaaaaaaaaaaaaaaaaaaaaaaaaaaaaaaaaaaaaaaaaaaaaaaaaaaaa

SEQ ID NO: 11035 - DNA, 5264 bp, synthetic construct
  source 1..5264: mol_type = other DNA
gaaataagagagaaaagaagagtaagaagaaatataagagaattcgccaccatggcccctaagaaaaagcggaaggtgaatatcagcggctctagctgcggcagccccaacagcgccgacaccagcagcgacttcaaggacctgtggaccaagctgaaggaatgccacgaccgggaagtgcagggactccaggtgaaggtcaccaaactcaagcaagaaagaatcctggacgcccagagactggaagaattcttcaccaagaaccagcagctgagagagcagcagaaagtgctgcacgagacaatcaaggttctggaagatagactgcgggccggcctgtgcgacagatgcgccgtgaccgaggaacacatgcgcaaaaagcagcaggagttcgagaacattagacagcaaaatctgaaattgatcacagagctgatgaacgagagaaacacactgcaggaggagaacaagaagctgagcgagcagctgcaacagaagatcgagaatgatcagcaacaccaggccgctgagctggaatgtgaagaggacgtgatccccgacagcccaatcacagctttcagcttttctggcgtgaacagactgaggcggaaggaaaacccccacgtgcggtacatcgagcagacccataccaagctggaacacagcgtgtgtgccaacgagatgagaaaggtgtccaagtcctccacccatccccagcacaaccctaacgaaaatgagatcctggtggctgatacctacgaccagtctcagagccctatggccaaggcccacggcaccagctcttatacccctgataagagctccttcaacctggccaccgtggtggccgagacactgggcctgggcgtgcaggaggaaagcgagacacagggcccaatgagccctctgggagatgagctgtaccactgcctggaaggcaaccacaagaaacagccttttgagtccggctccgagactcctggaacaagcgagagcgctacacctgagggcagccctaagagaaaggtgtccagcgccgagggcgctgccaaggaagagcctaaacggagaagcgccagactgagcgccaagccccccgccaaggtggaagccaagcctaagaaggccgccgctaaggacaagagcagcgataagaaagtccagaccaagggcaagcggggcgccaaaggcaaacaggccgaggtggccaaccaggagacaaaggaagatctgcctgctgagaacggcgaaaccaagaccgaggaatctccagcttctgacgaggccggagagaaggaggccaaaagcgacagcggctctgagacacctggaacaagcgagagcgccaccccggaatcctatgaacaacttgcaccacaaccgtgtgtgggagaaactttacattctagcctcccacgagacagtgaactgtttgtgcctgaagaggggagcagcgagaaggagagcgaggacgcgccaaaaacatctcctccgacgcctgggaaacatggtttggaacagactggggaggaaaaagtgatggtgactgttcctgacaaaaatccaccttgtccttgctgtggtacccgggtaaactctgtgttgaatctgattgaacatctgaaagtgtcacacgggaaaaggggggtttgttttcggtgtgcaaaatgtggaaaggaaaatagtaactatcacagtgttgtttgtcattttaagaaatgcaggggtccagagacggagaaagccccagctggggagtggatttgtgaggtatgcaacagagattttacaaccaaaattggcctgggacaacacaagagattggcacacccagcagtgagaaatcaggaaaggatcgttgcttcccaaccgaaagaaacatcaaatagaggtgctcacaaaaggtgctggacaaaggaggaggaagaattactaataagactggaggctcagttcgagggaaacaaaaatattaataagcttattgcagaacacataaccaccaaaacagctaagcagatcagtgacaaaaggcgattgctgtccagaaagccagcagaggagccacgtgaggagcctggaacgtgtcatcacaccaggagagcagctgcgagcctgagaacggagcctgagatgagtcatcacgcccaggcagaggacagagataatggacctgggagacgccctctgccaggcagggcagctgccggagggagaacaatggacgagataagacgccaccctgataagggcaacggacagcagagacccaccaagcaaaaatcagaagaacagctgcaggcttactataaaaagacactagaggaacgactttcagctggggcacttaacaccttcccccgagcattcaagcaggtaatggaaggccgggatataaagctagtaatcaatcagacagcgcaggactgcttcggatgcctggaatccataagccaaataagaacggcaacccgagataaaaaggacacggtgacccgggagaaacacccaaagaaaccttttcagaagtggatgaagaagagagcaatcaaaaaaggtaattatcttcggttccagcgtttattttatcttgatagagggaaactggctaaaatcattttagatgatattgaatgcttgtcttgtgacataccactcagtgaaatttattcggtttttaaaacaagatgggaaacaactggtagctttaaaagccttggggactttaaaacttacgggaaggctgacaacactgccttcagagaattaattacggctaaagaaattgagaaaaatgtgcaggaaatgagcaaaggctcggctcccggtccagacgggattactcttggggacgtcgtaaagatggatcccgagttttcccggaccatggagattttcaatttatggttaacaactggtaaaatcccggacatggtgagggggtgcagaaccgttttgattccaaaatcatcaaagccggatcgtttgaaagacattaataactggagacctatcacgatcggttccatcttgctgagactgttctccaggattgtaacagctaggctgagcaaagcgtgccccctgaacccaaggcaaagaggctttatcagagcggcgggatgctctgaaaacttaaaactcctgcaaactataatttggtcggccaaaagagaacacagaccactgggtgttgtattcgtggacatcgccaaggcttttgacaccgtaagccaccagcacatcattcatgctttgcagcaaagagaggtggatccccacatcgtcggtctggtgagcaatatgtacgagaacatcagtacgtatatcaccacaaagaggaacacacacacagacaaaatccagatccgggttggagtaaagcagggtgacccgatgtcgccccttttatttaacctggcaatggaccctctattatgcaagctggaagagagtggcaaaggataccaccgaggagggagcagcatcacagcgatggcatttgcagacgatctggttttgctgagcgactcctgggaaaatatgaatacaaatattagcatactggagaccttctgcaatctgaccggactcaaaacacaggggcaaaagtgccacggcttttacatcaagccgacaaaggactcttacaccatcaatgactgcgctgcctggactatcaacggcacacccctgaacatgatcgaccccggcgaatctgagaaatacctcggcctgcagtttgacccgtggattggaatagcaaggtccggtctctccacaaaactagatttttggcttcagcggatcgatcaagcaccacttaaacctctgcagaaaactgatattctcaaaacatacaccatccctcggctgatctacatagctgaccactcagaagtgaaaagcgcactactcgaaacccttgaccagaagatccggacagcggtcaaggaatggcttcacctacctccgtgcacctgcgatgccatcctgtactcgagcacgagagacggcggtttgggcatcaccaaattggcaggactgatccccagcgtgcaggcccgtagactgcatcggatcgcacagtcatctgacgatacgatgaaatgcttcatggaaaaagagaaaatggaacagctgcataagaaattgtggattcaagctggaggggacagagagaacataccctcgatttgggaagcaccaccgtcgagtgaaccaccaaacaacgtgagcacaaattcggaatgggaagcaccgacccagaaagataaatttccaaagccttgcaattggaggaaaaacgaattcaaaaaatggaccaaattggcatcccaaggccgcggaattgtaaattttgaaagagacaaaattagtaaccattggatccaatactacagacgcatacctcacaggaaactcctcactgcactacaactcagggccaacgtttaccccacgagagaatttctagccaggggtagacaagaccaatacatcaaggcgtgtaggcactgcgatgcggacaacgaatcctgcgcccacatcatcggcaactgcccagtgacacaggacgcccgaatcaagaggcacaattacatctgcgaactgcttctcgaggaggcgaagaagaaggactgggtagtgttcaaggaaccgcacataagggattccaacaaggaactgtacaaacctgacctgatatttgtgaaggatgggcgtgcacttgtcgtggatgtgacagtacggtatgaagcagccaaatcatcgctggaggaagccgctgcagagaaagtgagaaagtacaaacacctggaaacggaagtaagacatctcacgaatgcaaaggacgttacttttgtgggctttcccctaggagcgcgggggaaatggcaccaagataactttaaacttttgactgagcttggcctctccaaatcgaggcaagtgaaaatggcagagactttttccacagtagcgctcttttcatctgtggacattgtacatatgtttgccagtagggccagaaaatctatggttatgtgataataggctgccttctgcggggcttgccttctggccatgcccttcttctctcccttgcacctgtacctcttggtctttgaataaagcctgagtaggaaggaccggtaaaaaaaaaaaaaaaaaaaaaaaaaaaaaaacgttgactaaaaaaaaaaaaaaaaaaaaaaaaaaaaaaaaaaaaaaaaaaaaaaaaaaaaaaaaaaaaaaaaaaaaaa

SEQ ID NO: 11036 - DNA, 5264 bp, synthetic construct
  source 1..5264: mol_type = other DNA
gaaataagagagaaaagaagagtaagaagaaatataagagaattcgccaccatggcccctaagaaaaagcggaaggtgaatatcagcggctctagctgcggcagccccaacagcgccgacaccagcagcgacttcaaggacctgtggaccaagctgaaggaatgccacgaccgggaagtgcagggactccaggtgaaggtcaccaaactcaagcaagaaagaatcctggacgcccagagactggaagaattcttcaccaagaaccagcagctgagagagcagcagaaagtgctgcacgagacaatcaaggttctggaagatagactgcgggccggcctgtgcgacagatgcgccgtgaccgaggaacacatgcgcaaaaagcagcaggagttcgagaacattagacagcaaaatctgaaattgatcacagagctgatgaacgagagaaacacactgcaggaggagaacaagaagctgagcgagcagctgcaacagaagatcgagaatgatcagcaacaccaggccgctgagctggaatgtgaagaggacgtgatccccgacagcccaatcacagctttcagcttttctggcgtgaacagactgaggcggaaggaaaacccccacgtgcggtacatcgagcagacccataccaagctggaacacagcgtgtgtgccaacgagatgagaaaggtgtccaagtcctccacccatccccagcacaaccctaacgaaaatgagatcctggtggctgatacctacgaccagtctcagagccctatggccaaggcccacggcaccagctcttatacccctgataagagctccttcaacctggccaccgtggtggccgagacactgggcctgggcgtgcaggaggaaagcgagacacagggcccaatgagccctctgggagatgagctgtaccactgcctggaaggcaaccacaagaaacagccttttgagtccggctccgagactcctggaacaagcgagagcgctacacctgagggcagccctaagagaaaggtgtccagcgccgagggcgctgccaaggaagagcctaaacggagaagcgccagactgagcgccaagccccccgccaaggtggaagccaagcctaagaaggccgccgctaaggacaagagcagcgataagaaagtccagaccaagggcaagcggggcgccaaaggcaaacaggccgaggtggccaaccaggagacaaaggaagatctgcctgctgagaacggcgaaaccaagaccgaggaatctccagcttctgacgaggccggagagaaggaggccaaaagcgacagcggctctgagacacctggaacaagcgagagcgccaccccggaatcctatgaacaacttgcaccacaaccgtgtgtgggagaaactttacattctagcctcccacgagacagtgaactgtttgtgcctgaagaggggagcagcgagaaggagagcgaggacgcgccaaaaacatctcctccgacgcctgggaaacatggtttggaacagactggggaggaaaaagtgatggtgactgttcctgacaaaaatccaccttgtccttgctgtggtacccgggtaaactctgtgttgaatctgattgaacatctgaaagtgtcacacgggaaaaggggggtttgttttcggtgtgcaaaatgtggaaaggaaaatagtaactatcacagtgttgtttgtcattttaagaaatgcaggggtccagagacggagaaagccccagctggggagtggatttgtgaggtatgcaacagagattttacaaccaaaattggcctgggacaacacaagagattggcacacccagcagtgagaaatcaggaaaggatcgttgcttcccaaccgaaagaaacatcaaatagaggtgctcacaaaaggtgctggacaaaggaggaggaagaattactaataagactggaggctcagttcgagggaaacaaaaatattaataagcttattgcagaacacataaccaccaaaacagctaagcagatcagtgacaaaaggcgattgctgtccagaaagccagcagaggagccacgtgaggagcctggaacgtgtcatcacaccaggagagcagctgcgagcctgagaacggagcctgagatgagtcatcacgcccaggcagaggacagagataatggacctgggagacgccctctgccaggcagggcagctgccggagggagaacaatggacgagataagacgccaccctgataagggcaacggacagcagagacccaccaagcaaaaatcagaagaacagctgcaggcttactataaaaagacactagaggaacgactttcagctggggcacttaacaccttcccccgagcattcaagcaggtaatggaaggccgggatataaagctagtaatcaatcagacagcgcaggactgcttcggatgcctggaatccataagccaaataagaacggcaacccgagataaaaaggacacggtgacccgggagaaacacccaaagaaaccttttcagaagtggatgaagaagagagcaatcaaaaaaggtaattatcttcggttccagcgtttattttatcttgatagagggaaactggctaaaatcattttagatgatattgaatgcttgtcttgtgacataccactcagtgaaatttattcggtttttaaaacaagatgggaaacaactggtagctttaaaagccttggggactttaaaacttacgggaaggctgacaacactgccttcagagaattaattacggctaaagaaattgagaaaaatgtgcaggaaatgagcaaaggctcggctcccggtccagacgggattactcttggggacgtcgtaaagatggatcccgagttttcccggaccatggagattttcaatttatggttaacaactggtaaaatcccggacatggtgagggggtgcagaaccgttttgattccaaaatcatcaaagccggatcgtttgaaagacattaataactggagacctatcacgatcggttccatcttgctgagactgttctccaggattgtaacagctaggctgagcaaagcgtgccccctgaacccaaggcaaagaggctttatcagagcggcgggatgctctgaaaacttaaaactcctgcaaactataatttggtcggccaaaagagaacacagaccactgggtgttgtattcgtggacatcgccaaggcttttgacaccgtaagccaccagcacatcattcatgctttgcagcaaagagaggtggatccccacatcgtcggtctggtgagcaatatgtacgagaacatcagtacgtatatcaccacaaagaggaacacacacacagacaaaatccagatccgggttggagtaaagcagggtgacccgatgtcgccccttttatttaacctggcaatggaccctctattatgcaagctggaagagagtggcaaaggataccaccgaggagacagcagcatcacagcgatggcatttgcagacgatctggttttgctgagcgactcctgggaaaatatgaatacaaatattagcatactggagaccttctgcaatctgaccggactcaaaacacaggggcaaaagtgccacggcttttacatcaagccgacaaaggactcttacaccatcaatgactgcgctgcctggactatcaacggcacacccctgaacatgatcgaccccggcgaatctgagaaatacctcggcctgcagtttgacccgtggattggaatagcaaggtccggtctctccacaaaactagatttttggcttcagcggatcgatcaagcaccacttaaacctctgcagaaaactgatattctcaaaacatacaccatccctcggctgatctacatagctgaccactcagaagtgaaaagcgcactactcgaaacccttgaccagaagatccggacagcggtcaaggaatggcttcacctacctccgtgcacctgcgatgccatcctgtactcgagcacgagagacggcggtttgggcatcaccaaattggcaggactgatccccagcgtgcaggcccgtagactgcatcggatcgcacagtcatctgacgatacgatgaaatgcttcatggaaaaagagaaaatggaacagctgcataagaaattgtggattcaagctggaggggacagagagaacataccctcgatttgggaagcaccaccgtcgagtgaaccaccaaacaacgtgagcacaaattcggaatgggaagcaccgacccagaaagataaatttccaaagccttgcaattggaggaaaaacgaattcaaaaaatggaccaaattggcatcccaaggccgcggaattgtaaattttgaaagagacaaaattagtaaccattggatccaatactacagacgcatacctcacaggaaactcctcactgcactacaactcagggccaacgtttaccccacgagagaatttctagccaggggtagacaagaccaatacatcaaggcgtgtaggcactgcgatgcggacaacgaatcctgcgcccacatcatcggcaactgcccagtgacacaggacgcccgaatcaagaggcacaattacatctgcgaactgcttctcgaggaggcgaagaagaaggactgggtagtgttcaaggaaccgcacataagggattccaacaaggaactgtacaaacctgacctgatatttgtgaaggatgggcgtgcacttgtcgtggatgtgacagtacggtatgaagcagccaaatcatcgctggaggaagccgctgcagagaaagtgagaaagtacaaacacctggaaacggaagtaagacatctcacgaatgcaaaggacgttacttttgtgggctttcccctaggagcgcgggggaaatggcaccaagataactttaaacttttgactgagcttggcctctccaaatcgaggcaagtgaaaatggcagagactttttccacagtagcgctcttttcatctgtggacattgtacatatgtttgccagtagggccagaaaatctatggttatgtgataataggctgccttctgcggggcttgccttctggccatgcccttcttctctcccttgcacctgtacctcttggtctttgaataaagcctgagtaggaaggaccggtaaaaaaaaaaaaaaaaaaaaaaaaaaaaaaacgttgactaaaaaaaaaaaaaaaaaaaaaaaaaaaaaaaaaaaaaaaaaaaaaaaaaaaaaaaaaaaaaaaaaaaaaa

SEQ ID NO: 11037 - DNA, 5264 bp, synthetic construct
  source 1..5264: mol_type = other DNA
gaaataagagagaaaagaagagtaagaagaaatataagagaattcgccaccatggcccctaagaaaaagcggaaggtgaatatcagcggctctagctgcggcagccccaacagcgccgacaccagcagcgacttcaaggacctgtggaccaagctgaaggaatgccacgaccgggaagtgcagggactccaggtgaaggtcaccaaactcaagcaagaaagaatcctggacgcccagagactggaagaattcttcaccaagaaccagcagctgagagagcagcagaaagtgctgcacgagacaatcaaggttctggaagatagactgcgggccggcctgtgcgacagatgcgccgtgaccgaggaacacatgcgcaaaaagcagcaggagttcgagaacattagacagcaaaatctgaaattgatcacagagctgatgaacgagagaaacacactgcaggaggagaacaagaagctgagcgagcagctgcaacagaagatcgagaatgatcagcaacaccaggccgctgagctggaatgtgaagaggacgtgatccccgacagcccaatcacagctttcagcttttctggcgtgaacagactgaggcggaaggaaaacccccacgtgcggtacatcgagcagacccataccaagctggaacacagcgtgtgtgccaacgagatgagaaaggtgtccaagtcctccacccatccccagcacaaccctaacgaaaatgagatcctggtggctgatacctacgaccagtctcagagccctatggccaaggcccacggcaccagctcttatacccctgataagagctccttcaacctggccaccgtggtggccgagacactgggcctgggcgtgcaggaggaaagcgagacacagggcccaatgagccctctgggagatgagctgtaccactgcctggaaggcaaccacaagaaacagccttttgagtccggctccgagactcctggaacaagcgagagcgctacacctgagggcagccctaagagaaaggtgtccagcgccgagggcgctgccaaggaagagcctaaacggagaagcgccagactgagcgccaagccccccgccaaggtggaagccaagcctaagaaggccgccgctaaggacaagagcagcgataagaaagtccagaccaagggcaagcggggcgccaaaggcaaacaggccgaggtggccaaccaggagacaaaggaagatctgcctgctgagaacggcgaaaccaagaccgaggaatctccagcttctgacgaggccggagagaaggaggccaaaagcgacagcggctctgagacacctggaacaagcgagagcgccaccccggaatcctatgaacaacttgcaccacaaccgtgtgtgggagaaactttacattctagcctcccacgagacagtgaactgtttgtgcctgaagaggggagcagcgagaaggagagcgaggacgcgccaaaaacatctcctccgacgcctgggaaacatggtttggaacagactggggaggaaaaagtgatggtgactgttcctgacaaaaatccaccttgtccttgctgtggtacccgggtaaactctgtgttgaatctgattgaacatctgaaagtgtcacacgggaaaaggggggtttgttttcggtgtgcaaaatgtggaaaggaaaatagtaactatcacagtgttgtttgtcattttaagaaatgcaggggtccagagacggagaaagccccagctggggagtggatttgtgaggtatgcaacagagattttacaaccaaaattggcctgggacaacacaagagattggcacacccagcagtgagaaatcaggaaaggatcgttgcttcccaaccgaaagaaacatcaaatagaggtgctcacaaaaggtgctggacaaaggaggaggaagaattactaataagactggaggctcagttcgagggaaacaaaaatattaataagcttattgcagaacacataaccaccaaaacagctaagcagatcagtgacaaaaggcgattgctgtccagaaagccagcagaggagccacgtgaggagcctggaacgtgtcatcacaccaggagagcagctgcgagcctgagaacggagcctgagatgagtcatcacgcccaggcagaggacagagataatggacctgggagacgccctctgccaggcagggcagctgccggagggagaacaatggacgagataagacgccaccctgataagggcaacggacagcagagacccaccaagcaaaaatcagaagaacagctgcaggcttactataaaaagacactagaggaacgactttcagctggggcacttaacaccttcccccgagcattcaagcaggtaatggaaggccgggatataaagctagtaatcaatcagacagcgcaggactgcttcggatgcctggaatccataagccaaataagaacggcaacccgagataaaaaggacacggtgacccgggagaaacacccaaagaaaccttttcagaagtggatgaagaagagagcaatcaaaaaaggtaattatcttcggttccagcgtttattttatcttgatagagggaaactggctaaaatcattttagatgatattgaatgcttgtcttgtgacataccactcagtgaaatttattcggtttttaaaacaagatgggaaacaactggtagctttaaaagccttggggactttaaaacttacgggaaggctgacaacactgccttcagagaattaattacggctaaagaaattgagaaaaatgtgcaggaaatgagcaaaggctcggctcccggtccagacgggattactcttggggacgtcgtaaagatggatcccgagttttcccggaccatggagattttcaatttatggttaacaactggtaaaatcccggacatggtgagggggtgcagaaccgttttgattccaaaatcatcaaagccggatcgtttgaaagacattaataactggagacctatcacgatcggttccatcttgctgagactgttctccaggattgtaacagctaggctgagcaaagcgtgccccctgaacccaaggcaaagaggctttatcagagcggcgggatgctctgaaaacttaaaactcctgcaaactataatttggtcggccaaaagagaacacagaccactgggtgttgtattcgtggacatcgccaaggcttttgacaccgtaagccaccagcacatcattcatgctttgcagcaaagagaggtggatccccacatcgtcggtctggtgagcaatatgtacgagaacatcagtacgtatatcaccacaaagaggaacacacacacagacaaaatccagatccgggttggagtaaagcagggtgacccgatgtcgccccttttatttaacctggcaatggaccctctattatgcaagctggaagagagtggcaaaggataccaccgaggacagagcagcatcacagcgatggcatttgcagacgatctggttttgctgagcgactcctgggaaaatatgaatacaaatattagcatactggagaccttctgcaatctgaccggactcaaaacacaggggaaaaagtgccacggcttttacatcaagccgacaaaggactcttacaccatcaatgactgcgctgcctggactatcaacggcacacccctgaacatgatcgaccccggcgaatctgagaaatacctcggcctgcagtttgacccgtggattggaatagcaaggtccggtctctccacaaaactagatttttggcttcagcggatcgatcaagcaccacttaaacctctgcagaaaactgatattctcaaaacatacaccatccctcggctgatctacatagctgaccactcagaagtgaaaagcgcactactcgaaacccttgaccagaagatccggacagcggtcaaggaatggcttcacctacctccgtgcacctgcgatgccatcctgtactcgagcacgagagacggcggtttgggcatcaccaaattggcaggactgatccccagcgtgcaggcccgtagactgcatcggatcgcacagtcatctgacgatacgatgaaatgcttcatggaaaaagagaaaatggaacagctgcataagaaattgtggattcaagctggaggggacagagagaacataccctcgatttgggaagcaccaccgtcgagtgaaccaccaaacaacgtgagcacaaattcggaatgggaagcaccgacccagaaagataaatttccaaagccttgcaattggaggaaaaacgaattcaaaaaatggaccaaattggcatcccaaggccgcggaattgtaaattttgaaagagacaaaattagtaaccattggatccaatactacagacgcatacctcacaggaaactcctcactgcactacaactcagggccaacgtttaccccacgagagaatttctagccaggggtagacaagaccaatacatcaaggcgtgtaggcactgcgatgcggacaacgaatcctgcgcccacatcatcggcaactgcccagtgacacaggacgcccgaatcaagaggcacaattacatctgcgaactgcttctcgaggaggcgaagaagaaggactgggtagtgttcaaggaaccgcacataagggattccaacaaggaactgtacaaacctgacctgatatttgtgaaggatgggcgtgcacttgtcgtggatgtgacagtacggtatgaagcagccaaatcatcgctggaggaagccgctgcagagaaagtgagaaagtacaaacacctggaaacggaagtaagacatctcacgaatgcaaaggacgttacttttgtgggctttcccctaggagcgcgggggaaatggcaccaagataactttaaacttttgactgagcttggcctctccaaatcgaggcaagtgaaaatggcagagactttttccacagtagcgctcttttcatctgtggacattgtacatatgtttgccagtagggccagaaaatctatggttatgtgataataggctgccttctgcggggcttgccttctggccatgcccttcttctctcccttgcacctgtacctcttggtctttgaataaagcctgagtaggaaggaccggtaaaaaaaaaaaaaaaaaaaaaaaaaaaaaaacgttgactaaaaaaaaaaaaaaaaaaaaaaaaaaaaaaaaaaaaaaaaaaaaaaaaaaaaaaaaaaaaaaaaaaaaaa

SEQ ID NO: 11038 - DNA, 5264 bp, synthetic construct
  source 1..5264: mol_type = other DNA
gaaataagagagaaaagaagagtaagaagaaatataagagaattcgccaccatggcccctaagaaaaagcggaaggtgaatatcagcggctctagctgcggcagccccaacagcgccgacaccagcagcgacttcaaggacctgtggaccaagctgaaggaatgccacgaccgggaagtgcagggactccaggtgaaggtcaccaaactcaagcaagaaagaatcctggacgcccagagactggaagaattcttcaccaagaaccagcagctgagagagcagcagaaagtgctgcacgagacaatcaaggttctggaagatagactgcgggccggcctgtgcgacagatgcgccgtgaccgaggaacacatgcgcaaaaagcagcaggagttcgagaacattagacagcaaaatctgaaattgatcacagagctgatgaacgagagaaacacactgcaggaggagaacaagaagctgagcgagcagctgcaacagaagatcgagaatgatcagcaacaccaggccgctgagctggaatgtgaagaggacgtgatccccgacagcccaatcacagctttcagcttttctggcgtgaacagactgaggcggaaggaaaacccccacgtgcggtacatcgagcagacccataccaagctggaacacagcgtgtgtgccaacgagatgagaaaggtgtccaagtcctccacccatccccagcacaaccctaacgaaaatgagatcctggtggctgatacctacgaccagtctcagagccctatggccaaggcccacggcaccagctcttatacccctgataagagctccttcaacctggccaccgtggtggccgagacactgggcctgggcgtgcaggaggaaagcgagacacagggcccaatgagccctctgggagatgagctgtaccactgcctggaaggcaaccacaagaaacagccttttgagtccggctccgagactcctggaacaagcgagagcgctacacctgagggcagccctaagagaaaggtgtccagcgccgagggcgctgccaaggaagagcctaaacggagaagcgccagactgagcgccaagccccccgccaaggtggaagccaagcctaagaaggccgccgctaaggacaagagcagcgataagaaagtccagaccaagggcaagcggggcgccaaaggcaaacaggccgaggtggccaaccaggagacaaaggaagatctgcctgctgagaacggcgaaaccaagaccgaggaatctccagcttctgacgaggccggagagaaggaggccaaaagcgacagcggctctgagacacctggaacaagcgagagcgccaccccggaatcctatgaacaacttgcaccacaaccgtgtgtgggagaaactttacattctagcctcccacgagacagtgaactgtttgtgcctgaagaggggagcagcgagaaggagagcgaggacgcgccaaaaacatctcctccgacgcctgggaaacatggtttggaacagactggggaggaaaaagtgatggtgactgttcctgacaaaaatccaccttgtccttgctgtggtacccgggtaaactctgtgttgaatctgattgaacatctgaaagtgtcacacgggaaaaggggggtttgttttcggtgtgcaaaatgtggaaaggaaaatagtaactatcacagtgttgtttgtcattttaagaaatgcaggggtccagagacggagaaagccccagctggggagtggatttgtgaggtatgcaacagagattttacaaccaaaattggcctgggacaacacaagagattggcacacccagcagtgagaaatcaggaaaggatcgttgcttcccaaccgaaagaaacatcaaatagaggtgctcacaaaaggtgctggacaaaggaggaggaagaattactaataagactggaggctcagttcgagggaaacaaaaatattaataagcttattgcagaacacataaccaccaaaacagctaagcagatcagtgacaaaaggcgattgctgtccagaaagccagcagaggagccacgtgaggagcctggaacgtgtcatcacaccaggagagcagctgcgagcctgagaacggagcctgagatgagtcatcacgcccaggcagaggacagagataatggacctgggagacgccctctgccaggcagggcagctgccggagggagaacaatggacgagataagacgccaccctgataagggcaacggacagcagagacccaccaagcaaaaatcagaagaacagctgcaggcttactataaaaagacactagaggaacgactttcagctggggcacttaacaccttcccccgagcattcaagcaggtaatggaaggccgggatataaagctagtaatcaatcagacagcgcaggactgcttcggatgcctggaatccataagccaaataagaacggcaacccgagataaaaaggacacggtgacccgggagaaacacccaaagaaaccttttcagaagtggatgaagaagagagcaatcaaaaaaggtaattatcttcggttccagcgtttattttatcttgatagagggaaactggctaaaatcattttagatgatattgaatgcttgtcttgtgacataccactcagtgaaatttattcggtttttaaaacaagatgggaaacaactggtagctttaaaagccttggggactttaaaacttacgggaaggctgacaacactgccttcagagaattaattacggctaaagaaattgagaaaaatgtgcaggaaatgagcaaaggctcggctcccggtccagacgggattactcttggggacgtcgtaaagatggatcccgagttttcccggaccatggagattttcaatttatggttaacaactggtaaaatcccggacatggtgagggggtgcagaaccgttttgattccaaaatcatcaaagccggatcgtttgaaagacattaataactggagacctatcacgatcggttccatcttgctgagactgttctccaggattgtaacagctaggctgagcaaagcgtgccccctgaacccaaggcaaagaggctttatcagagcggcgggatgctctgaaaacttaaaactcctgcaaactataatttggtcggccaaaagagaacacagaccactgggtgttgtattcgtggacatcgccaaggcttttgacaccgtaagccaccagcacatcattcatgctttgcagcaaagagaggtggatccccacatcgtcggtctggtgagcaatatgtacgagaacatcagtacgtatatcaccacaaagaggaacacacacacagacaaaatccagatccgggttggagtaaagcagggtgacccgatgtcgccccttttatttaacctggcaatggaccctctattatgcaagctggaagagagtggcaaaggataccaccgaggacagagcagcatcacagcgatggcatttgcagacgatctggttttgctgagcgactcctgggaaaatatgaatacaaatattagcatactggagaccttctgcaatctgaccggactcaaaacacaggggtcaaagtgccacggcttttacatcaagccgacaaaggactcttacaccatcaatgactgcgctgcctggactatcaacggcacacccctgaacatgatcgaccccggcgaatctgagaaatacctcggcctgcagtttgacccgtggattggaatagcaaggtccggtctctccacaaaactagatttttggcttcagcggatcgatcaagcaccacttaaacctctgcagaaaactgatattctcaaaacatacaccatccctcggctgatctacatagctgaccactcagaagtgaaaagcgcactactcgaaacccttgaccagaagatccggacagcggtcaaggaatggcttcacctacctccgtgcacctgcgatgccatcctgtactcgagcacgagagacggcggtttgggcatcaccaaattggcaggactgatccccagcgtgcaggcccgtagactgcatcggatcgcacagtcatctgacgatacgatgaaatgcttcatggaaaaagagaaaatggaacagctgcataagaaattgtggattcaagctggaggggacagagagaacataccctcgatttgggaagcaccaccgtcgagtgaaccaccaaacaacgtgagcacaaattcggaatgggaagcaccgacccagaaagataaatttccaaagccttgcaattggaggaaaaacgaattcaaaaaatggaccaaattggcatcccaaggccgcggaattgtaaattttgaaagagacaaaattagtaaccattggatccaatactacagacgcatacctcacaggaaactcctcactgcactacaactcagggccaacgtttaccccacgagagaatttctagccaggggtagacaagaccaatacatcaaggcgtgtaggcactgcgatgcggacaacgaatcctgcgcccacatcatcggcaactgcccagtgacacaggacgcccgaatcaagaggcacaattacatctgcgaactgcttctcgaggaggcgaagaagaaggactgggtagtgttcaaggaaccgcacataagggattccaacaaggaactgtacaaacctgacctgatatttgtgaaggatgggcgtgcacttgtcgtggatgtgacagtacggtatgaagcagccaaatcatcgctggaggaagccgctgcagagaaagtgagaaagtacaaacacctggaaacggaagtaagacatctcacgaatgcaaaggacgttacttttgtgggctttcccctaggagcgcgggggaaatggcaccaagataactttaaacttttgactgagcttggcctctccaaatcgaggcaagtgaaaatggcagagactttttccacagtagcgctcttttcatctgtggacattgtacatatgtttgccagtagggccagaaaatctatggttatgtgataataggctgccttctgcggggcttgccttctggccatgcccttcttctctcccttgcacctgtacctcttggtctttgaataaagcctgagtaggaaggaccggtaaaaaaaaaaaaaaaaaaaaaaaaaaaaaaacgttgactaaaaaaaaaaaaaaaaaaaaaaaaaaaaaaaaaaaaaaaaaaaaaaaaaaaaaaaaaaaaaaaaaaaaaa

SEQ ID NO: 11039 - DNA, 5264 bp, synthetic construct
  source 1..5264: mol_type = other DNA
gaaataagagagaaaagaagagtaagaagaaatataagagaattcgccaccatggcccctaagaaaaagcggaaggtgaatatcagcggctctagctgcggcagccccaacagcgccgacaccagcagcgacttcaaggacctgtggaccaagctgaaggaatgccacgaccgggaagtgcagggactccaggtgaaggtcaccaaactcaagcaagaaagaatcctggacgcccagagactggaagaattcttcaccaagaaccagcagctgagagagcagcagaaagtgctgcacgagacaatcaaggttctggaagatagactgcgggccggcctgtgcgacagatgcgccgtgaccgaggaacacatgcgcaaaaagcagcaggagttcgagaacattagacagcaaaatctgaaattgatcacagagctgatgaacgagagaaacacactgcaggaggagaacaagaagctgagcgagcagctgcaacagaagatcgagaatgatcagcaacaccaggccgctgagctggaatgtgaagaggacgtgatccccgacagcccaatcacagctttcagcttttctggcgtgaacagactgaggcggaaggaaaacccccacgtgcggtacatcgagcagacccataccaagctggaacacagcgtgtgtgccaacgagatgagaaaggtgtccaagtcctccacccatccccagcacaaccctaacgaaaatgagatcctggtggctgatacctacgaccagtctcagagccctatggccaaggcccacggcaccagctcttatacccctgataagagctccttcaacctggccaccgtggtggccgagacactgggcctgggcgtgcaggaggaaagcgagacacagggcccaatgagccctctgggagatgagctgtaccactgcctggaaggcaaccacaagaaacagccttttgagtccggctccgagactcctggaacaagcgagagcgctacacctgagggcagccctaagagaaaggtgtccagcgccgagggcgctgccaaggaagagcctaaacggagaagcgccagactgagcgccaagccccccgccaaggtggaagccaagcctaagaaggccgccgctaaggacaagagcagcgataagaaagtccagaccaagggcaagcggggcgccaaaggcaaacaggccgaggtggccaaccaggagacaaaggaagatctgcctgctgagaacggcgaaaccaagaccgaggaatctccagcttctgacgaggccggagagaaggaggccaaaagcgacagcggctctgagacacctggaacaagcgagagcgccaccccggaatcctatgaacaacttgcaccacaaccgtgtgtgggagaaactttacattctagcctcccacgagacagtgaactgtttgtgcctgaagaggggagcagcgagaaggagagcgaggacgcgccaaaaacatctcctccgacgcctgggaaacatggtttggaacagactggggaggaaaaagtgatggtgactgttcctgacaaaaatccaccttgtccttgctgtggtacccgggtaaactctgtgttgaatctgattgaacatctgaaagtgtcacacgggaaaaggggggtttgttttcggtgtgcaaaatgtggaaaggaaaatagtaactatcacagtgttgtttgtcattttaagaaatgcaggggtccagagacggagaaagccccagctggggagtggatttgtgaggtatgcaacagagattttacaaccaaaattggcctgggacaacacaagagattggcacacccagcagtgagaaatcaggaaaggatcgttgcttcccaaccgaaagaaacatcaaatagaggtgctcacaaaaggtgctggacaaaggaggaggaagaattactaataagactggaggctcagttcgagggaaacaaaaatattaataagcttattgcagaacacataaccaccaaaacagctaagcagatcagtgacaaaaggcgattgctgtccagaaagccagcagaggagccacgtgaggagcctggaacgtgtcatcacaccaggagagcagctgcgagcctgagaacggagcctgagatgagtcatcacgcccaggcagaggacagagataatggacctgggagacgccctctgccaggcagggcagctgccggagggagaacaatggacgagataagacgccaccctgataagggcaacggacagcagagacccaccaagcaaaaatcagaagaacagctgcaggcttactataaaaagacactagaggaacgactttcagctggggcacttaacaccttcccccgagcattcaagcaggtaatggaaggccgggatataaagctagtaatcaatcagacagcgcaggactgcttcggatgcctggaatccataagccaaataagaacggcaacccgagataaaaaggacacggtgacccgggagaaacacccaaagaaaccttttcagaagtggatgaagaagagagcaatcaaaaaaggtaattatcttcggttccagcgtttattttatcttgatagagggaaactggctaaaatcattttagatgatattgaatgcttgtcttgtgacataccactcagtgaaatttattcggtttttaaaacaagatgggaaacaactggtagctttaaaagccttggggactttaaaacttacgggaaggctgacaacactgccttcagagaattaattacggctaaagaaattgagaaaaatgtgcaggaaatgagcaaaggctcggctcccggtccagacgggattactcttggggacgtcgtaaagatggatcccgagttttcccggaccatggagattttcaatttatggttaacaactggtaaaatcccggacatggtgagggggtgcagaaccgttttgattccaaaatcatcaaagccggatcgtttgaaagacattaataactggagacctatcacgatcggttccatcttgctgagactgttctccaggattgtaacagctaggctgagcaaagcgtgccccctgaacccaaggcaaagaggctttatcagagcggcgggatgctctgaaaacttaaaactcctgcaaactataatttggtcggccaaaagagaacacagaccactgggtgttgtattcgtggacatcgccaaggcttttgacaccgtaagccaccagcacatcattcatgctttgcagcaaagagaggtggatccccacatcgtcggtctggtgagcaatatgtacgagaacatcagtacgtatatcaccacaaagaggaacacacacacagacaaaatccagatccgggttggagtaaagcagggtgacccgatgtcgccccttttatttaacctggcaatggaccctctattatgcaagctggaagagagtggcaaaggataccaccgaggacagagcagcatcacagcgatggcatttgcagacgatctggttttgctgagcgactcctgggaaaatatgaatacaaatattagcatactggagaccttctgcaatctgaccggactcaaaacacaggggcaaaagtgccacggcttttacatcaagccgacaaaggactcttacaccatcaatgactgccctgcctggactatcaacggcacacccctgaacatgatcgaccccggcgaatctgagaaatacctcggcctgcagtttgacccgtggattggaatagcaaggtccggtctctccacaaaactagatttttggcttcagcggatcgatcaagcaccacttaaacctctgcagaaaactgatattctcaaaacatacaccatccctcggctgatctacatagctgaccactcagaagtgaaaagcgcactactcgaaacccttgaccagaagatccggacagcggtcaaggaatggcttcacctacctccgtgcacctgcgatgccatcctgtactcgagcacgagagacggcggtttgggcatcaccaaattggcaggactgatccccagcgtgcaggcccgtagactgcatcggatcgcacagtcatctgacgatacgatgaaatgcttcatggaaaaagagaaaatggaacagctgcataagaaattgtggattcaagctggaggggacagagagaacataccctcgatttgggaagcaccaccgtcgagtgaaccaccaaacaacgtgagcacaaattcggaatgggaagcaccgacccagaaagataaatttccaaagccttgcaattggaggaaaaacgaattcaaaaaatggaccaaattggcatcccaaggccgcggaattgtaaattttgaaagagacaaaattagtaaccattggatccaatactacagacgcatacctcacaggaaactcctcactgcactacaactcagggccaacgtttaccccacgagagaatttctagccaggggtagacaagaccaatacatcaaggcgtgtaggcactgcgatgcggacaacgaatcctgcgcccacatcatcggcaactgcccagtgacacaggacgcccgaatcaagaggcacaattacatctgcgaactgcttctcgaggaggcgaagaagaaggactgggtagtgttcaaggaaccgcacataagggattccaacaaggaactgtacaaacctgacctgatatttgtgaaggatgggcgtgcacttgtcgtggatgtgacagtacggtatgaagcagccaaatcatcgctggaggaagccgctgcagagaaagtgagaaagtacaaacacctggaaacggaagtaagacatctcacgaatgcaaaggacgttacttttgtgggctttcccctaggagcgcgggggaaatggcaccaagataactttaaacttttgactgagcttggcctctccaaatcgaggcaagtgaaaatggcagagactttttccacagtagcgctcttttcatctgtggacattgtacatatgtttgccagtagggccagaaaatctatggttatgtgataataggctgccttctgcggggcttgccttctggccatgcccttcttctctcccttgcacctgtacctcttggtctttgaataaagcctgagtaggaaggaccggtaaaaaaaaaaaaaaaaaaaaaaaaaaaaaaacgttgactaaaaaaaaaaaaaaaaaaaaaaaaaaaaaaaaaaaaaaaaaaaaaaaaaaaaaaaaaaaaaaaaaaaaaa

SEQ ID NO: 11040 - DNA, 5264 bp, synthetic construct
  source 1..5264: mol_type = other DNA
gaaataagagagaaaagaagagtaagaagaaatataagagaattcgccaccatggcccctaagaaaaagcggaaggtgaatatcagcggctctagctgcggcagccccaacagcgccgacaccagcagcgacttcaaggacctgtggaccaagctgaaggaatgccacgaccgggaagtgcagggactccaggtgaaggtcaccaaactcaagcaagaaagaatcctggacgcccagagactggaagaattcttcaccaagaaccagcagctgagagagcagcagaaagtgctgcacgagacaatcaaggttctggaagatagactgcgggccggcctgtgcgacagatgcgccgtgaccgaggaacacatgcgcaaaaagcagcaggagttcgagaacattagacagcaaaatctgaaattgatcacagagctgatgaacgagagaaacacactgcaggaggagaacaagaagctgagcgagcagctgcaacagaagatcgagaatgatcagcaacaccaggccgctgagctggaatgtgaagaggacgtgatccccgacagcccaatcacagctttcagcttttctggcgtgaacagactgaggcggaaggaaaacccccacgtgcggtacatcgagcagacccataccaagctggaacacagcgtgtgtgccaacgagatgagaaaggtgtccaagtcctccacccatccccagcacaaccctaacgaaaatgagatcctggtggctgatacctacgaccagtctcagagccctatggccaaggcccacggcaccagctcttatacccctgataagagctccttcaacctggccaccgtggtggccgagacactgggcctgggcgtgcaggaggaaagcgagacacagggcccaatgagccctctgggagatgagctgtaccactgcctggaaggcaaccacaagaaacagccttttgagtccggctccgagactcctggaacaagcgagagcgctacacctgagggcagccctaagagaaaggtgtccagcgccgagggcgctgccaaggaagagcctaaacggagaagcgccagactgagcgccaagccccccgccaaggtggaagccaagcctaagaaggccgccgctaaggacaagagcagcgataagaaagtccagaccaagggcaagcggggcgccaaaggcaaacaggccgaggtggccaaccaggagacaaaggaagatctgcctgctgagaacggcgaaaccaagaccgaggaatctccagcttctgacgaggccggagagaaggaggccaaaagcgacagcggctctgagacacctggaacaagcgagagcgccaccccggaatcctatgaacaacttgcaccacaaccgtgtgtgggagaaactttacattctagcctcccacgagacagtgaactgtttgtgcctgaagaggggagcagcgagaaggagagcgaggacgcgccaaaaacatctcctccgacgcctgggaaacatggtttggaacagactggggaggaaaaagtgatggtgactgttcctgacaaaaatccaccttgtccttgctgtggtacccgggtaaactctgtgttgaatctgattgaacatctgaaagtgtcacacgggaaaaggggggtttgttttcggtgtgcaaaatgtggaaaggaaaatagtaactatcacagtgttgtttgtcattttaagaaatgcaggggtccagagacggagaaagccccagctggggagtggatttgtgaggtatgcaacagagattttacaaccaaaattggcctgggacaacacaagagattggcacacccagcagtgagaaatcaggaaaggatcgttgcttcccaaccgaaagaaacatcaaatagaggtgctcacaaaaggtgctggacaaaggaggaggaagaattactaataagactggaggctcagttcgagggaaacaaaaatattaataagcttattgcagaacacataaccaccaaaacagctaagcagatcagtgacaaaaggcgattgctgtccagaaagccagcagaggagccacgtgaggagcctggaacgtgtcatcacaccaggagagcagctgcgagcctgagaacggagcctgagatgagtcatcacgcccaggcagaggacagagataatggacctgggagacgccctctgccaggcagggcagctgccggagggagaacaatggacgagataagacgccaccctgataagggcaacggacagcagagacccaccaagcaaaaatcagaagaacagctgcaggcttactataaaaagacactagaggaacgactttcagctggggcacttaacaccttcccccgagcattcaagcaggtaatggaaggccgggatataaagctagtaatcaatcagacagcgcaggactgcttcggatgcctggaatccataagccaaataagaacggcaacccgagataaaaaggacacggtgacccgggagaaacacccaaagaaaccttttcagaagtggatgaagaagagagcaatcaaaaaaggtaattatcttcggttccagcgtttattttatcttgatagagggaaactggctaaaatcattttagatgatattgaatgcttgtcttgtgacataccactcagtgaaatttattcggtttttaaaacaagatgggaaacaactggtagctttaaaagccttggggactttaaaacttacgggaaggctgacaacactgccttcagagaattaattacggctaaagaaattgagaaaaatgtgcaggaaatgagcaaaggctcggctcccggtccagacgggattactcttggggacgtcgtaaagatggatcccgagttttcccggaccatggagattttcaatttatggttaacaactggtaaaatcccggacatggtgagggggtgcagaaccgttttgattccaaaatcatcaaagccggatcgtttgaaagacattaataactggagacctatcacgatcggttccatcttgctgagactgttctccaggattgtaacagctaggctgagcaaagcgtgccccctgaacccaaggcaaagaggctttatcagagcggcgggatgctctgaaaacttaaaactcctgcaaactataatttggtcggccaaaagagaacacagaccactgggtgttgtattcgtggacatcgccaaggcttttgacaccgtaagccaccagcacatcattcatgctttgcagcaaagagaggtggatccccacatcgtcggtctggtgagcaatatgtacgagaacatcagtacgtatatcaccacaaagaggaacacacacacagacaaaatccagatccgggttggagtaaagcagggtgacccgatgtcgccccttttatttaacctggcaatggaccctctattatgcaagctggaagagagtggcaaaggataccaccgaggacagagcagcatcacagcgatggcatttgcagacgatctggttttgctgagcgactcctgggaaaatatgaatacaaatattagcatactggagaccttctgcaatctgaccggactcaaaacacaggggcaaaagtgccacggcttttacatcaagccgacaaaggactcttacaccatcaatgactgcgctgcctggactatcaacggcacacccctgaacatgatcggccccggcgaatctgagaaatacctcggcctgcagtttgacccgtggattggaatagcaaggtccggtctctccacaaaactagatttttggcttcagcggatcgatcaagcaccacttaaacctctgcagaaaactgatattctcaaaacatacaccatccctcggctgatctacatagctgaccactcagaagtgaaaagcgcactactcgaaacccttgaccagaagatccggacagcggtcaaggaatggcttcacctacctccgtgcacctgcgatgccatcctgtactcgagcacgagagacggcggtttgggcatcaccaaattggcaggactgatccccagcgtgcaggcccgtagactgcatcggatcgcacagtcatctgacgatacgatgaaatgcttcatggaaaaagagaaaatggaacagctgcataagaaattgtggattcaagctggaggggacagagagaacataccctcgatttgggaagcaccaccgtcgagtgaaccaccaaacaacgtgagcacaaattcggaatgggaagcaccgacccagaaagataaatttccaaagccttgcaattggaggaaaaacgaattcaaaaaatggaccaaattggcatcccaaggccgcggaattgtaaattttgaaagagacaaaattagtaaccattggatccaatactacagacgcatacctcacaggaaactcctcactgcactacaactcagggccaacgtttaccccacgagagaatttctagccaggggtagacaagaccaatacatcaaggcgtgtaggcactgcgatgcggacaacgaatcctgcgcccacatcatcggcaactgcccagtgacacaggacgcccgaatcaagaggcacaattacatctgcgaactgcttctcgaggaggcgaagaagaaggactgggtagtgttcaaggaaccgcacataagggattccaacaaggaactgtacaaacctgacctgatatttgtgaaggatgggcgtgcacttgtcgtggatgtgacagtacggtatgaagcagccaaatcatcgctggaggaagccgctgcagagaaagtgagaaagtacaaacacctggaaacggaagtaagacatctcacgaatgcaaaggacgttacttttgtgggctttcccctaggagcgcgggggaaatggcaccaagataactttaaacttttgactgagcttggcctctccaaatcgaggcaagtgaaaatggcagagactttttccacagtagcgctcttttcatctgtggacattgtacatatgtttgccagtagggccagaaaatctatggttatgtgataataggctgccttctgcggggcttgccttctggccatgcccttcttctctcccttgcacctgtacctcttggtctttgaataaagcctgagtaggaaggaccggtaaaaaaaaaaaaaaaaaaaaaaaaaaaaaaacgttgactaaaaaaaaaaaaaaaaaaaaaaaaaaaaaaaaaaaaaaaaaaaaaaaaaaaaaaaaaaaaaaaaaaaaaa

SEQ ID NO: 11041 - DNA, 5264 bp, synthetic construct
  source 1..5264: mol_type = other DNA
gaaataagagagaaaagaagagtaagaagaaatataagagaattcgccaccatggcccctaagaaaaagcggaaggtgaatatcagcggctctagctgcggcagccccaacagcgccgacaccagcagcgacttcaaggacctgtggaccaagctgaaggaatgccacgaccgggaagtgcagggactccaggtgaaggtcaccaaactcaagcaagaaagaatcctggacgcccagagactggaagaattcttcaccaagaaccagcagctgagagagcagcagaaagtgctgcacgagacaatcaaggttctggaagatagactgcgggccggcctgtgcgacagatgcgccgtgaccgaggaacacatgcgcaaaaagcagcaggagttcgagaacattagacagcaaaatctgaaattgatcacagagctgatgaacgagagaaacacactgcaggaggagaacaagaagctgagcgagcagctgcaacagaagatcgagaatgatcagcaacaccaggccgctgagctggaatgtgaagaggacgtgatccccgacagcccaatcacagctttcagcttttctggcgtgaacagactgaggcggaaggaaaacccccacgtgcggtacatcgagcagacccataccaagctggaacacagcgtgtgtgccaacgagatgagaaaggtgtccaagtcctccacccatccccagcacaaccctaacgaaaatgagatcctggtggctgatacctacgaccagtctcagagccctatggccaaggcccacggcaccagctcttatacccctgataagagctccttcaacctggccaccgtggtggccgagacactgggcctgggcgtgcaggaggaaagcgagacacagggcccaatgagccctctgggagatgagctgtaccactgcctggaaggcaaccacaagaaacagccttttgagtccggctccgagactcctggaacaagcgagagcgctacacctgagggcagccctaagagaaaggtgtccagcgccgagggcgctgccaaggaagagcctaaacggagaagcgccagactgagcgccaagccccccgccaaggtggaagccaagcctaagaaggccgccgctaaggacaagagcagcgataagaaagtccagaccaagggcaagcggggcgccaaaggcaaacaggccgaggtggccaaccaggagacaaaggaagatctgcctgctgagaacggcgaaaccaagaccgaggaatctccagcttctgacgaggccggagagaaggaggccaaaagcgacagcggctctgagacacctggaacaagcgagagcgccaccccggaatcctatgaacaacttgcaccacaaccgtgtgtgggagaaactttacattctagcctcccacgagacagtgaactgtttgtgcctgaagaggggagcagcgagaaggagagcgaggacgcgccaaaaacatctcctccgacgcctgggaaacatggtttggaacagactggggaggaaaaagtgatggtgactgttcctgacaaaaatccaccttgtccttgctgtggtacccgggtaaactctgtgttgaatctgattgaacatctgaaagtgtcacacgggaaaaggggggtttgttttcggtgtgcaaaatgtggaaaggaaaatagtaactatcacagtgttgtttgtcattttaagaaatgcaggggtccagagacggagaaagccccagctggggagtggatttgtgaggtatgcaacagagattttacaaccaaaattggcctgggacaacacaagagattggcacacccagcagtgagaaatcaggaaaggatcgttgcttcccaaccgaaagaaacatcaaatagaggtgctcacaaaaggtgctggacaaaggaggaggaagaattactaataagactggaggctcagttcgagggaaacaaaaatattaataagcttattgcagaacacataaccaccaaaacagctaagcagatcagtgacaaaaggcgattgctgtccagaaagccagcagaggagccacgtgaggagcctggaacgtgtcatcacaccaggagagcagctgcgagcctgagaacggagcctgagatgagtcatcacgcccaggcagaggacagagataatggacctgggagacgccctctgccaggcagggcagctgccggagggagaacaatggacgagataagacgccaccctgataagggcaacggacagcagagacccaccaagcaaaaatcagaagaacagctgcaggcttactataaaaagacactagaggaacgactttcagctggggcacttaacaccttcccccgagcattcaagcaggtaatggaaggccgggatataaagctagtaatcaatcagacagcgcaggactgcttcggatgcctggaatccataagccaaataagaacggcaacccgagataaaaaggacacggtgacccgggagaaacacccaaagaaaccttttcagaagtggatgaagaagagagcaatcaaaaaaggtaattatcttcggttccagcgtttattttatcttgatagagggaaactggctaaaatcattttagatgatattgaatgcttgtcttgtgacataccactcagtgaaatttattcggtttttaaaacaagatgggaaacaactggtagctttaaaagccttggggactttaaaacttacgggaaggctgacaacactgccttcagagaattaattacggctaaagaaattgagaaaaatgtgcaggaaatgagcaaaggctcggctcccggtccagacgggattactcttggggacgtcgtaaagatggatcccgagttttcccggaccatggagattttcaatttatggttaacaactggtaaaatcccggacatggtgagggggtgcagaaccgttttgattccaaaatcatcaaagccggatcgtttgaaagacattaataactggagacctatcacgatcggttccatcttgctgagactgttctccaggattgtaacagctaggctgagcaaagcgtgccccctgaacccaaggcaaagaggctttatcagagcggcgggatgctctgaaaacttaaaactcctgcaaactataatttggtcggccaaaagagaacacagaccactgggtgttgtattcgtggacatcgccaaggcttttgacaccgtaagccaccagcacatcattcatgctttgcagcaaagagaggtggatccccacatcgtcggtctggtgagcaatatgtacgagaacatcagtacgtatatcaccacaaagaggaacacacacacagacaaaatccagatccgggttggagtaaagcagggtgacccgatgtcgccccttttatttaacctggcaatggaccctctattatgcaagctggaagagagtggcaaaggataccaccgaggacagagcagcatcacagcgatggcatttgcagacgatctggttttgctgagcgactcctgggaaaatatgaatacaaatattagcatactggagaccttctgcaatctgaccggactcaaaacacaggggcaaaagtgccacggcttttacatcaagccgacaaaggactcttacaccatcaatgactgcgctgcctggactatcaacggcacacccctgaacatgatcgaccccggcgaatctgagaaatacctcggcctgcagtttgacccgtggattggaatagcaaggtccggtctctccacaaaactagattcctggcttcagcggatcgatcaagcaccacttaaacctctgcagaaaactgatattctcaaaacatacaccatccctcggctgatctacatagctgaccactcagaagtgaaaagcgcactactcgaaacccttgaccagaagatccggacagcggtcaaggaatggcttcacctacctccgtgcacctgcgatgccatcctgtactcgagcacgagagacggcggtttgggcatcaccaaattggcaggactgatccccagcgtgcaggcccgtagactgcatcggatcgcacagtcatctgacgatacgatgaaatgcttcatggaaaaagagaaaatggaacagctgcataagaaattgtggattcaagctggaggggacagagagaacataccctcgatttgggaagcaccaccgtcgagtgaaccaccaaacaacgtgagcacaaattcggaatgggaagcaccgacccagaaagataaatttccaaagccttgcaattggaggaaaaacgaattcaaaaaatggaccaaattggcatcccaaggccgcggaattgtaaattttgaaagagacaaaattagtaaccattggatccaatactacagacgcatacctcacaggaaactcctcactgcactacaactcagggccaacgtttaccccacgagagaatttctagccaggggtagacaagaccaatacatcaaggcgtgtaggcactgcgatgcggacaacgaatcctgcgcccacatcatcggcaactgcccagtgacacaggacgcccgaatcaagaggcacaattacatctgcgaactgcttctcgaggaggcgaagaagaaggactgggtagtgttcaaggaaccgcacataagggattccaacaaggaactgtacaaacctgacctgatatttgtgaaggatgggcgtgcacttgtcgtggatgtgacagtacggtatgaagcagccaaatcatcgctggaggaagccgctgcagagaaagtgagaaagtacaaacacctggaaacggaagtaagacatctcacgaatgcaaaggacgttacttttgtgggctttcccctaggagcgcgggggaaatggcaccaagataactttaaacttttgactgagcttggcctctccaaatcgaggcaagtgaaaatggcagagactttttccacagtagcgctcttttcatctgtggacattgtacatatgtttgccagtagggccagaaaatctatggttatgtgataataggctgccttctgcggggcttgccttctggccatgcccttcttctctcccttgcacctgtacctcttggtctttgaataaagcctgagtaggaaggaccggtaaaaaaaaaaaaaaaaaaaaaaaaaaaaaaacgttgactaaaaaaaaaaaaaaaaaaaaaaaaaaaaaaaaaaaaaaaaaaaaaaaaaaaaaaaaaaaaaaaaaaaaaa

SEQ ID NO: 11042 - DNA, 5264 bp, synthetic construct
  source 1..5264: mol_type = other DNA
gaaataagagagaaaagaagagtaagaagaaatataagagaattcgccaccatggcccctaagaaaaagcggaaggtgaatatcagcggctctagctgcggcagccccaacagcgccgacaccagcagcgacttcaaggacctgtggaccaagctgaaggaatgccacgaccgggaagtgcagggactccaggtgaaggtcaccaaactcaagcaagaaagaatcctggacgcccagagactggaagaattcttcaccaagaaccagcagctgagagagcagcagaaagtgctgcacgagacaatcaaggttctggaagatagactgcgggccggcctgtgcgacagatgcgccgtgaccgaggaacacatgcgcaaaaagcagcaggagttcgagaacattagacagcaaaatctgaaattgatcacagagctgatgaacgagagaaacacactgcaggaggagaacaagaagctgagcgagcagctgcaacagaagatcgagaatgatcagcaacaccaggccgctgagctggaatgtgaagaggacgtgatccccgacagcccaatcacagctttcagcttttctggcgtgaacagactgaggcggaaggaaaacccccacgtgcggtacatcgagcagacccataccaagctggaacacagcgtgtgtgccaacgagatgagaaaggtgtccaagtcctccacccatccccagcacaaccctaacgaaaatgagatcctggtggctgatacctacgaccagtctcagagccctatggccaaggcccacggcaccagctcttatacccctgataagagctccttcaacctggccaccgtggtggccgagacactgggcctgggcgtgcaggaggaaagcgagacacagggcccaatgagccctctgggagatgagctgtaccactgcctggaaggcaaccacaagaaacagccttttgagtccggctccgagactcctggaacaagcgagagcgctacacctgagggcagccctaagagaaaggtgtccagcgccgagggcgctgccaaggaagagcctaaacggagaagcgccagactgagcgccaagccccccgccaaggtggaagccaagcctaagaaggccgccgctaaggacaagagcagcgataagaaagtccagaccaagggcaagcggggcgccaaaggcaaacaggccgaggtggccaaccaggagacaaaggaagatctgcctgctgagaacggcgaaaccaagaccgaggaatctccagcttctgacgaggccggagagaaggaggccaaaagcgacagcggctctgagacacctggaacaagcgagagcgccaccccggaatcctatgaacaacttgcaccacaaccgtgtgtgggagaaactttacattctagcctcccacgagacagtgaactgtttgtgcctgaagaggggagcagcgagaaggagagcgaggacgcgccaaaaacatctcctccgacgcctgggaaacatggtttggaacagactggggaggaaaaagtgatggtgactgttcctgacaaaaatccaccttgtccttgctgtggtacccgggtaaactctgtgttgaatctgattgaacatctgaaagtgtcacacgggaaaaggggggtttgttttcggtgtgcaaaatgtggaaaggaaaatagtaactatcacagtgttgtttgtcattttaagaaatgcaggggtccagagacggagaaagccccagctggggagtggatttgtgaggtatgcaacagagattttacaaccaaaattggcctgggacaacacaagagattggcacacccagcagtgagaaatcaggaaaggatcgttgcttcccaaccgaaagaaacatcaaatagaggtgctcacaaaaggtgctggacaaaggaggaggaagaattactaataagactggaggctcagttcgagggaaacaaaaatattaataagcttattgcagaacacataaccaccaaaacagctaagcagatcagtgacaaaaggcgattgctgtccagaaagccagcagaggagccacgtgaggagcctggaacgtgtcatcacaccaggagagcagctgcgagcctgagaacggagcctgagatgagtcatcacgcccaggcagaggacagagataatggacctgggagacgccctctgccaggcagggcagctgccggagggagaacaatggacgagataagacgccaccctgataagggcaacggacagcagagacccaccaagcaaaaatcagaagaacagctgcaggcttactataaaaagacactagaggaacgactttcagctggggcacttaacaccttcccccgagcattcaagcaggtaatggaaggccgggatataaagctagtaatcaatcagacagcgcaggactgcttcggatgcctggaatccataagccaaataagaacggcaacccgagataaaaaggacacggtgacccgggagaaacacccaaagaaaccttttcagaagtggatgaagaagagagcaatcaaaaaaggtaattatcttcggttccagcgtttattttatcttgatagagggaaactggctaaaatcattttagatgatattgaatgcttgtcttgtgacataccactcagtgaaatttattcggtttttaaaacaagatgggaaacaactggtagctttaaaagccttggggactttaaaacttacgggaaggctgacaacactgccttcagagaattaattacggctaaagaaattgagaaaaatgtgcaggaaatgagcaaaggctcggctcccggtccagacgggattactcttggggacgtcgtaaagatggatcccgagttttcccggaccatggagattttcaatttatggttaacaactggtaaaatcccggacatggtgagggggtgcagaaccgttttgattccaaaatcatcaaagccggatcgtttgaaagacattaataactggagacctatcacgatcggttccatcttgctgagactgttctccaggattgtaacagctaggctgagcaaagcgtgccccctgaacccaaggcaaagaggctttatcagagcggcgggatgctctgaaaacttaaaactcctgcaaactataatttggtcggccaaaagagaacacagaccactgggtgttgtattcgtggacatcgccaaggcttttgacaccgtaagccaccagcacatcattcatgctttgcagcaaagagaggtggatccccacatcgtcggtctggtgagcaatatgtacgagaacatcagtacgtatatcaccacaaagaggaacacacacacagacaaaatccagatccgggttggagtaaagcagggtgacccgatgtcgccccttttatttaacctggcaatggaccctctattatgcaagctggaagagagtggcaaaggataccaccgaggacagagcagcatcacagcgatggcatttgcagacgatctggttttgctgagcgactcctgggaaaatatgaatacaaatattagcatactggagaccttctgcaatctgaccggactcaaaacacaggggcaaaagtgccacggcttttacatcaagccgacaaaggactcttacaccatcaatgactgcgctgcctggactatcaacggcacacccctgaacatgatcgaccccggcgaatctgagaaatacctcggcctgcagtttgacccgtggattggaatagcaaggtccggtctctccacaaaactagatttttggcttcagcggatcgatcaagcaccacttaaacctctgcagaaaactgatattctcaaaacatacaccatccctcggctgatctacatagctgaccactcagaagtgaaaagctccctactcgaaacccttgaccagaagatccggacagcggtcaaggaatggcttcacctacctccgtgcacctgcgatgccatcctgtactcgagcacgagagacggcggtttgggcatcaccaaattggcaggactgatccccagcgtgcaggcccgtagactgcatcggatcgcacagtcatctgacgatacgatgaaatgcttcatggaaaaagagaaaatggaacagctgcataagaaattgtggattcaagctggaggggacagagagaacataccctcgatttgggaagcaccaccgtcgagtgaaccaccaaacaacgtgagcacaaattcggaatgggaagcaccgacccagaaagataaatttccaaagccttgcaattggaggaaaaacgaattcaaaaaatggaccaaattggcatcccaaggccgcggaattgtaaattttgaaagagacaaaattagtaaccattggatccaatactacagacgcatacctcacaggaaactcctcactgcactacaactcagggccaacgtttaccccacgagagaatttctagccaggggtagacaagaccaatacatcaaggcgtgtaggcactgcgatgcggacaacgaatcctgcgcccacatcatcggcaactgcccagtgacacaggacgcccgaatcaagaggcacaattacatctgcgaactgcttctcgaggaggcgaagaagaaggactgggtagtgttcaaggaaccgcacataagggattccaacaaggaactgtacaaacctgacctgatatttgtgaaggatgggcgtgcacttgtcgtggatgtgacagtacggtatgaagcagccaaatcatcgctggaggaagccgctgcagagaaagtgagaaagtacaaacacctggaaacggaagtaagacatctcacgaatgcaaaggacgttacttttgtgggctttcccctaggagcgcgggggaaatggcaccaagataactttaaacttttgactgagcttggcctctccaaatcgaggcaagtgaaaatggcagagactttttccacagtagcgctcttttcatctgtggacattgtacatatgtttgccagtagggccagaaaatctatggttatgtgataataggctgccttctgcggggcttgccttctggccatgcccttcttctctcccttgcacctgtacctcttggtctttgaataaagcctgagtaggaaggaccggtaaaaaaaaaaaaaaaaaaaaaaaaaaaaaaacgttgactaaaaaaaaaaaaaaaaaaaaaaaaaaaaaaaaaaaaaaaaaaaaaaaaaaaaaaaaaaaaaaaaaaaaaa

SEQ ID NO: 11043 - DNA, 5264 bp, synthetic construct
  source 1..5264: mol_type = other DNA
gaaataagagagaaaagaagagtaagaagaaatataagagaattcgccaccatggcccctaagaaaaagcggaaggtgaatatcagcggctctagctgcggcagccccaacagcgccgacaccagcagcgacttcaaggacctgtggaccaagctgaaggaatgccacgaccgggaagtgcagggactccaggtgaaggtcaccaaactcaagcaagaaagaatcctggacgcccagagactggaagaattcttcaccaagaaccagcagctgagagagcagcagaaagtgctgcacgagacaatcaaggttctggaagatagactgcgggccggcctgtgcgacagatgcgccgtgaccgaggaacacatgcgcaaaaagcagcaggagttcgagaacattagacagcaaaatctgaaattgatcacagagctgatgaacgagagaaacacactgcaggaggagaacaagaagctgagcgagcagctgcaacagaagatcgagaatgatcagcaacaccaggccgctgagctggaatgtgaagaggacgtgatccccgacagcccaatcacagctttcagcttttctggcgtgaacagactgaggcggaaggaaaacccccacgtgcggtacatcgagcagacccataccaagctggaacacagcgtgtgtgccaacgagatgagaaaggtgtccaagtcctccacccatccccagcacaaccctaacgaaaatgagatcctggtggctgatacctacgaccagtctcagagccctatggccaaggcccacggcaccagctcttatacccctgataagagctccttcaacctggccaccgtggtggccgagacactgggcctgggcgtgcaggaggaaagcgagacacagggcccaatgagccctctgggagatgagctgtaccactgcctggaaggcaaccacaagaaacagccttttgagtccggctccgagactcctggaacaagcgagagcgctacacctgagggcagccctaagagaaaggtgtccagcgccgagggcgctgccaaggaagagcctaaacggagaagcgccagactgagcgccaagccccccgccaaggtggaagccaagcctaagaaggccgccgctaaggacaagagcagcgataagaaagtccagaccaagggcaagcggggcgccaaaggcaaacaggccgaggtggccaaccaggagacaaaggaagatctgcctgctgagaacggcgaaaccaagaccgaggaatctccagcttctgacgaggccggagagaaggaggccaaaagcgacagcggctctgagacacctggaacaagcgagagcgccaccccggaatcctatgaacaacttgcaccacaaccgtgtgtgggagaaactttacattctagcctcccacgagacagtgaactgtttgtgcctgaagaggggagcagcgagaaggagagcgaggacgcgccaaaaacatctcctccgacgcctgggaaacatggtttggaacagactggggaggaaaaagtgatggtgactgttcctgacaaaaatccaccttgtccttgctgtggtacccgggtaaactctgtgttgaatctgattgaacatctgaaagtgtcacacgggaaaaggggggtttgttttcggtgtgcaaaatgtggaaaggaaaatagtaactatcacagtgttgtttgtcattttaagaaatgcaggggtccagagacggagaaagccccagctggggagtggatttgtgaggtatgcaacagagattttacaaccaaaattggcctgggacaacacaagagattggcacacccagcagtgagaaatcaggaaaggatcgttgcttcccaaccgaaagaaacatcaaatagaggtgctcacaaaaggtgctggacaaaggaggaggaagaattactaataagactggaggctcagttcgagggaaacaaaaatattaataagcttattgcagaacacataaccaccaaaacagctaagcagatcagtgacaaaaggcgattgctgtccagaaagccagcagaggagccacgtgaggagcctggaacgtgtcatcacaccaggagagcagctgcgagcctgagaacggagcctgagatgagtcatcacgcccaggcagaggacagagataatggacctgggagacgccctctgccaggcagggcagctgccggagggagaacaatggacgagataagacgccaccctgataagggcaacggacagcagagacccaccaagcaaaaatcagaagaacagctgcaggcttactataaaaagacactagaggaacgactttcagctggggcacttaacaccttcccccgagcattcaagcaggtaatggaaggccgggatataaagctagtaatcaatcagacagcgcaggactgcttcggatgcctggaatccataagccaaataagaacggcaacccgagataaaaaggacacggtgacccgggagaaacacccaaagaaaccttttcagaagtggatgaagaagagagcaatcaaaaaaggtaattatcttcggttccagcgtttattttatcttgatagagggaaactggctaaaatcattttagatgatattgaatgcttgtcttgtgacataccactcagtgaaatttattcggtttttaaaacaagatgggaaacaactggtagctttaaaagccttggggactttaaaacttacgggaaggctgacaacactgccttcagagaattaattacggctaaagaaattgagaaaaatgtgcaggaaatgagcaaaggctcggctcccggtccagacgggattacttatggggacgtcgtaaagatggatcccgagttttcccggaccatggagattttcaatttatggttaacaactggtaaaatcccggacatggtgagggggtgcagaaccgttttgattccaaaatcatcaaagccggatcgtttgaaagacattaataactggagacctatcacgatcggttccatcttgctgagactgttctccaggattgtaacagctaggctgagcaaagcgtgccccctgaacccaaggcaaagaggctttatcagagcggcgggatgctctgaaaacttaaaactcctgcaaactataatttggtcggccaaaagagaacacagaccactgggtgttgtattcgtggacatcgccaaggcttttgacaccgtaagccaccagcacatcattcatgctttgcagcaaagagaggtggatccccacatcgtcggtctggtgagcaatatgtacgagaacatcagtacgtatatcaccacaaagaggaacacacacacagacaaaatccagatccgggttggagtaaagcagggtgacccgatgtcgccccttttatttaacctggcaatggaccctctattatgcaagctggaagagagtggcaaaggataccaccgaggacagagcagcatcacagcgatggcatttgcagacgatctggttttgctgagcgactcctgggaaaatatgaatacaaatattagcatactggagaccttctgcaatctgaccggactcaaaacacaggggcaaaagtgccacggcttttacatcaagccgacaaaggactcttacaccatcaatgactgcgctgcctggactatcaacggcacacccctgaacatgatcgaccccggcgaatctgagaaatacctcggcctgcagtttgacccgtggattggaatagcaaggtccggtctctccacaaaactagatttttggcttcagcggatcgatcaagcaccacttaaacctctgcagaaaactgatattctcaaaacatacaccatccctcggctgatctacatagctgaccactcagaagtgaaaagcgcactactcgaaacccttgaccagaagatccggacagcggtcaaggaatggcttcacctacctccgtgcacctgcgatgccatcctgtactcgagcacgagagacggcggtttgggcatcaccaaattggcaggactgatccccagcgtgcaggcccgtagactgcatcggatcgcacagtcatctgacgatacgatgaaatgcttcatggaaaaagagaaaatggaacagctgcataagaaattgtggattcaagctggaggggacagagagaacataccctcgatttgggaagcaccaccgtcgagtgaaccaccaaacaacgtgagcacaaattcggaatgggaagcaccgacccagaaagataaatttccaaagccttgcaattggaggaaaaacgaattcaaaaaatggaccaaattggcatcccaaggccgcggaattgtaaattttgaaagagacaaaattagtaaccattggatccaatactacagacgcatacctcacaggaaactcctcactgcactacaactcagggccaacgtttaccccacgagagaatttctagccaggggtagacaagaccaatacatcaaggcgtgtaggcactgcgatgcggacaacgaatcctgcgcccacatcatcggcaactgcccagtgacacaggacgcccgaatcaagaggcacaattacatctgcgaactgcttctcgaggaggcgaagaagaaggactgggtagtgttcaaggaaccgcacataagggattccaacaaggaactgtacaaacctgacctgatatttgtgaaggatgggcgtgcacttgtcgtggatgtgacagtacggtatgaagcagccaaatcatcgctggaggaagccgctgcagagaaagtgagaaagtacaaacacctggaaacggaagtaagacatctcacgaatgcaaaggacgttacttttgtgggctttcccctaggagcgcgggggaaatggcaccaagataactttaaacttttgactgagcttggcctctccaaatcgaggcaagtgaaaatggcagagactttttccacagtagcgctcttttcatctgtggacattgtacatatgtttgccagtagggccagaaaatctatggttatgtgataataggctgccttctgcggggcttgccttctggccatgcccttcttctctcccttgcacctgtacctcttggtctttgaataaagcctgagtaggaaggaccggtaaaaaaaaaaaaaaaaaaaaaaaaaaaaaaacgttgactaaaaaaaaaaaaaaaaaaaaaaaaaaaaaaaaaaaaaaaaaaaaaaaaaaaaaaaaaaaaaaaaaaaaaa

SEQ ID NO: 11044 - DNA, 5264 bp, synthetic construct
  source 1..5264: mol_type = other DNA
gaaataagagagaaaagaagagtaagaagaaatataagagaattcgccaccatggcccctaagaaaaagcggaaggtgaatatcagcggctctagctgcggcagccccaacagcgccgacaccagcagcgacttcaaggacctgtggaccaagctgaaggaatgccacgaccgggaagtgcagggactccaggtgaaggtcaccaaactcaagcaagaaagaatcctggacgcccagagactggaagaattcttcaccaagaaccagcagctgagagagcagcagaaagtgctgcacgagacaatcaaggttctggaagatagactgcgggccggcctgtgcgacagatgcgccgtgaccgaggaacacatgcgcaaaaagcagcaggagttcgagaacattagacagcaaaatctgaaattgatcacagagctgatgaacgagagaaacacactgcaggaggagaacaagaagctgagcgagcagctgcaacagaagatcgagaatgatcagcaacaccaggccgctgagctggaatgtgaagaggacgtgatccccgacagcccaatcacagctttcagcttttctggcgtgaacagactgaggcggaaggaaaacccccacgtgcggtacatcgagcagacccataccaagctggaacacagcgtgtgtgccaacgagatgagaaaggtgtccaagtcctccacccatccccagcacaaccctaacgaaaatgagatcctggtggctgatacctacgaccagtctcagagccctatggccaaggcccacggcaccagctcttatacccctgataagagctccttcaacctggccaccgtggtggccgagacactgggcctgggcgtgcaggaggaaagcgagacacagggcccaatgagccctctgggagatgagctgtaccactgcctggaaggcaaccacaagaaacagccttttgagtccggctccgagactcctggaacaagcgagagcgctacacctgagggcagccctaagagaaaggtgtccagcgccgagggcgctgccaaggaagagcctaaacggagaagcgccagactgagcgccaagccccccgccaaggtggaagccaagcctaagaaggccgccgctaaggacaagagcagcgataagaaagtccagaccaagggcaagcggggcgccaaaggcaaacaggccgaggtggccaaccaggagacaaaggaagatctgcctgctgagaacggcgaaaccaagaccgaggaatctccagcttctgacgaggccggagagaaggaggccaaaagcgacagcggctctgagacacctggaacaagcgagagcgccaccccggaatcctatgaacaacttgcaccacaaccgtgtgtgggagaaactttacattctagcctcccacgagacagtgaactgtttgtgcctgaagaggggagcagcgagaaggagagcgaggacgcgccaaaaacatctcctccgacgcctgggaaacatggtttggaacagactggggaggaaaaagtgatggtgactgttcctgacaaaaatccaccttgtccttgctgtggtacccgggtaaactctgtgttgaatctgattgaacatctgaaagtgtcacacgggaaaaggggggtttgttttcggtgtgcaaaatgtggaaaggaaaatagtaactatcacagtgttgtttgtcattttaagaaatgcaggggtccagagacggagaaagccccagctggggagtggatttgtgaggtatgcaacagagattttacaaccaaaattggcctgggacaacacaagagattggcacacccagcagtgagaaatcaggaaaggatcgttgcttcccaaccgaaagaaacatcaaatagaggtgctcacaaaaggtgctggacaaaggaggaggaagaattactaataagactggaggctcagttcgagggaaacaaaaatattaataagcttattgcagaacacataaccaccaaaacagctaagcagatcagtgacaaaaggcgattgctgtccagaaagccagcagaggagccacgtgaggagcctggaacgtgtcatcacaccaggagagcagctgcgagcctgagaacggagcctgagatgagtcatcacgcccaggcagaggacagagataatggacctgggagacgccctctgccaggcagggcagctgccggagggagaacaatggacgagataagacgccaccctgataagggcaacggacagcagagacccaccaagcaaaaatcagaagaacagctgcaggcttactataaaaagacactagaggaacgactttcagctggggcacttaacaccttcccccgagcattcaagcaggtaatggaaggccgggatataaagctagtaatcaatcagacagcgcaggactgcttcggatgcctggaatccataagccaaataagaacggcaacccgagataaaaaggacacggtgacccgggagaaacacccaaagaaaccttttcagaagtggatgaagaagagagcaatcaaaaaaggtaattatcttcggttccagcgtttattttatcttgatagagggaaactggctaaaatcattttagatgatattgaatgcttgtcttgtgacataccactcagtgaaatttattcggtttttaaaacaagatgggaaacaactggtagctttaaaagccttggggactttaaaacttacgggaaggctgacaacactgccttcagagaattaattacggctaaagaaattgagaaaaatgtgcaggaaatgagcaaaggctcggctcccggtccagacgggattactcttggggacgtcgtaaagatggatcccgagttttcccggaccatggagattttcaatttatggttaacaactggtaaaatcccggacatggtgagggggtgcagaaccgttttgattccaaaatcaggaaagccggatcgtttgaaagacattaataactggagacctatcacgatcggttccatcttgctgagactgttctccaggattgtaacagctaggctgagcaaagcgtgccccctgaacccaaggcaaagaggctttatcagagcggcgggatgctctgaaaacttaaaactcctgcaaactataatttggtcggccaaaagagaacacagaccactgggtgttgtattcgtggacatcgccaaggcttttgacaccgtaagccaccagcacatcattcatgctttgcagcaaagagaggtggatccccacatcgtcggtctggtgagcaatatgtacgagaacatcagtacgtatatcaccacaaagaggaacacacacacagacaaaatccagatccgggttggagtaaagcagggtgacccgatgtcgccccttttatttaacctggcaatggaccctctattatgcaagctggaagagagtggcaaaggataccaccgaggacagagcagcatcacagcgatggcatttgcagacgatctggttttgctgagcgactcctgggaaaatatgaatacaaatattagcatactggagaccttctgcaatctgaccggactcaaaacacaggggcaaaagtgccacggcttttacatcaagccgacaaaggactcttacaccatcaatgactgcgctgcctggactatcaacggcacacccctgaacatgatcgaccccggcgaatctgagaaatacctcggcctgcagtttgacccgtggattggaatagcaaggtccggtctctccacaaaactagatttttggcttcagcggatcgatcaagcaccacttaaacctctgcagaaaactgatattctcaaaacatacaccatccctcggctgatctacatagctgaccactcagaagtgaaaagcgcactactcgaaacccttgaccagaagatccggacagcggtcaaggaatggcttcacctacctccgtgcacctgcgatgccatcctgtactcgagcacgagagacggcggtttgggcatcaccaaattggcaggactgatccccagcgtgcaggcccgtagactgcatcggatcgcacagtcatctgacgatacgatgaaatgcttcatggaaaaagagaaaatggaacagctgcataagaaattgtggattcaagctggaggggacagagagaacataccctcgatttgggaagcaccaccgtcgagtgaaccaccaaacaacgtgagcacaaattcggaatgggaagcaccgacccagaaagataaatttccaaagccttgcaattggaggaaaaacgaattcaaaaaatggaccaaattggcatcccaaggccgcggaattgtaaattttgaaagagacaaaattagtaaccattggatccaatactacagacgcatacctcacaggaaactcctcactgcactacaactcagggccaacgtttaccccacgagagaatttctagccaggggtagacaagaccaatacatcaaggcgtgtaggcactgcgatgcggacaacgaatcctgcgcccacatcatcggcaactgcccagtgacacaggacgcccgaatcaagaggcacaattacatctgcgaactgcttctcgaggaggcgaagaagaaggactgggtagtgttcaaggaaccgcacataagggattccaacaaggaactgtacaaacctgacctgatatttgtgaaggatgggcgtgcacttgtcgtggatgtgacagtacggtatgaagcagccaaatcatcgctggaggaagccgctgcagagaaagtgagaaagtacaaacacctggaaacggaagtaagacatctcacgaatgcaaaggacgttacttttgtgggctttcccctaggagcgcgggggaaatggcaccaagataactttaaacttttgactgagcttggcctctccaaatcgaggcaagtgaaaatggcagagactttttccacagtagcgctcttttcatctgtggacattgtacatatgtttgccagtagggccagaaaatctatggttatgtgataataggctgccttctgcggggcttgccttctggccatgcccttcttctctcccttgcacctgtacctcttggtctttgaataaagcctgagtaggaaggaccggtaaaaaaaaaaaaaaaaaaaaaaaaaaaaaaacgttgactaaaaaaaaaaaaaaaaaaaaaaaaaaaaaaaaaaaaaaaaaaaaaaaaaaaaaaaaaaaaaaaaaaaaaa

SEQ ID NO: 11045 - DNA, 5264 bp, synthetic construct
  source 1..5264: mol_type = other DNA
gaaataagagagaaaagaagagtaagaagaaatataagagaattcgccaccatggcccctaagaaaaagcggaaggtgaatatcagcggctctagctgcggcagccccaacagcgccgacaccagcagcgacttcaaggacctgtggaccaagctgaaggaatgccacgaccgggaagtgcagggactccaggtgaaggtcaccaaactcaagcaagaaagaatcctggacgcccagagactggaagaattcttcaccaagaaccagcagctgagagagcagcagaaagtgctgcacgagacaatcaaggttctggaagatagactgcgggccggcctgtgcgacagatgcgccgtgaccgaggaacacatgcgcaaaaagcagcaggagttcgagaacattagacagcaaaatctgaaattgatcacagagctgatgaacgagagaaacacactgcaggaggagaacaagaagctgagcgagcagctgcaacagaagatcgagaatgatcagcaacaccaggccgctgagctggaatgtgaagaggacgtgatccccgacagcccaatcacagctttcagcttttctggcgtgaacagactgaggcggaaggaaaacccccacgtgcggtacatcgagcagacccataccaagctggaacacagcgtgtgtgccaacgagatgagaaaggtgtccaagtcctccacccatccccagcacaaccctaacgaaaatgagatcctggtggctgatacctacgaccagtctcagagccctatggccaaggcccacggcaccagctcttatacccctgataagagctccttcaacctggccaccgtggtggccgagacactgggcctgggcgtgcaggaggaaagcgagacacagggcccaatgagccctctgggagatgagctgtaccactgcctggaaggcaaccacaagaaacagccttttgagtccggctccgagactcctggaacaagcgagagcgctacacctgagggcagccctaagagaaaggtgtccagcgccgagggcgctgccaaggaagagcctaaacggagaagcgccagactgagcgccaagccccccgccaaggtggaagccaagcctaagaaggccgccgctaaggacaagagcagcgataagaaagtccagaccaagggcaagcggggcgccaaaggcaaacaggccgaggtggccaaccaggagacaaaggaagatctgcctgctgagaacggcgaaaccaagaccgaggaatctccagcttctgacgaggccggagagaaggaggccaaaagcgacagcggctctgagacacctggaacaagcgagagcgccaccccggaatcctatgaacaacttgcaccacaaccgtgtgtgggagaaactttacattctagcctcccacgagacagtgaactgtttgtgcctgaagaggggagcagcgagaaggagagcgaggacgcgccaaaaacatctcctccgacgcctgggaaacatggtttggaacagactggggaggaaaaagtgatggtgactgttcctgacaaaaatccaccttgtccttgctgtggtacccgggtaaactctgtgttgaatctgattgaacatctgaaagtgtcacacgggaaaaggggggtttgttttcggtgtgcaaaatgtggaaaggaaaatagtaactatcacagtgttgtttgtcattttaagaaatgcaggggtccagagacggagaaagccccagctggggagtggatttgtgaggtatgcaacagagattttacaaccaaaattggcctgggacaacacaagagattggcacacccagcagtgagaaatcaggaaaggatcgttgcttcccaaccgaaagaaacatcaaatagaggtgctcacaaaaggtgctggacaaaggaggaggaagaattactaataagactggaggctcagttcgagggaaacaaaaatattaataagcttattgcagaacacataaccaccaaaacagctaagcagatcagtgacaaaaggcgattgctgtccagaaagccagcagaggagccacgtgaggagcctggaacgtgtcatcacaccaggagagcagctgcgagcctgagaacggagcctgagatgagtcatcacgcccaggcagaggacagagataatggacctgggagacgccctctgccaggcagggcagctgccggagggagaacaatggacgagataagacgccaccctgataagggcaacggacagcagagacccaccaagcaaaaatcagaagaacagctgcaggcttactataaaaagacactagaggaacgactttcagctggggcacttaacaccttcccccgagcattcaagcaggtaatggaaggccgggatataaagctagtaatcaatcagacagcgcaggactgcttcggatgcctggaatccataagccaaataagaacggcaacccgagataaaaaggacacggtgacccgggagaaacacccaaagaaaccttttcagaagtggatgaagaagagagcaatcaaaaaaggtaattatcttcggttccagcgtttattttatcttgatagagggaaactggctaaaatcattttagatgatattgaatgcttgtcttgtgacataccactcagtgaaatttattcggtttttaaaacaagatgggaaacaactggtagctttaaaagccttggggactttaaaacttacgggaaggctgacaacactgccttcagagaattaattacggctaaagaaattgagaaaaatgtgcaggaaatgagcaaaggctcggctcccggtccagacgggattactcttggggacgtcgtaaagatggatcccgagttttcccggaccatggagattttcaatttatggttaacaactggtaaaatcccggacatggtgagggggtgcagaaccgttttgattccaaaatcatcaaagccggatcgtttgaaagaccctaataactggagacctatcacgatcggttccatcttgctgagactgttctccaggattgtaacagctaggctgagcaaagcgtgccccctgaacccaaggcaaagaggctttatcagagcggcgggatgctctgaaaacttaaaactcctgcaaactataatttggtcggccaaaagagaacacagaccactgggtgttgtattcgtggacatcgccaaggcttttgacaccgtaagccaccagcacatcattcatgctttgcagcaaagagaggtggatccccacatcgtcggtctggtgagcaatatgtacgagaacatcagtacgtatatcaccacaaagaggaacacacacacagacaaaatccagatccgggttggagtaaagcagggtgacccgatgtcgccccttttatttaacctggcaatggaccctctattatgcaagctggaagagagtggcaaaggataccaccgaggacagagcagcatcacagcgatggcatttgcagacgatctggttttgctgagcgactcctgggaaaatatgaatacaaatattagcatactggagaccttctgcaatctgaccggactcaaaacacaggggcaaaagtgccacggcttttacatcaagccgacaaaggactcttacaccatcaatgactgcgctgcctggactatcaacggcacacccctgaacatgatcgaccccggcgaatctgagaaatacctcggcctgcagtttgacccgtggattggaatagcaaggtccggtctctccacaaaactagatttttggcttcagcggatcgatcaagcaccacttaaacctctgcagaaaactgatattctcaaaacatacaccatccctcggctgatctacatagctgaccactcagaagtgaaaagcgcactactcgaaacccttgaccagaagatccggacagcggtcaaggaatggcttcacctacctccgtgcacctgcgatgccatcctgtactcgagcacgagagacggcggtttgggcatcaccaaattggcaggactgatccccagcgtgcaggcccgtagactgcatcggatcgcacagtcatctgacgatacgatgaaatgcttcatggaaaaagagaaaatggaacagctgcataagaaattgtggattcaagctggaggggacagagagaacataccctcgatttgggaagcaccaccgtcgagtgaaccaccaaacaacgtgagcacaaattcggaatgggaagcaccgacccagaaagataaatttccaaagccttgcaattggaggaaaaacgaattcaaaaaatggaccaaattggcatcccaaggccgcggaattgtaaattttgaaagagacaaaattagtaaccattggatccaatactacagacgcatacctcacaggaaactcctcactgcactacaactcagggccaacgtttaccccacgagagaatttctagccaggggtagacaagaccaatacatcaaggcgtgtaggcactgcgatgcggacaacgaatcctgcgcccacatcatcggcaactgcccagtgacacaggacgcccgaatcaagaggcacaattacatctgcgaactgcttctcgaggaggcgaagaagaaggactgggtagtgttcaaggaaccgcacataagggattccaacaaggaactgtacaaacctgacctgatatttgtgaaggatgggcgtgcacttgtcgtggatgtgacagtacggtatgaagcagccaaatcatcgctggaggaagccgctgcagagaaagtgagaaagtacaaacacctggaaacggaagtaagacatctcacgaatgcaaaggacgttacttttgtgggctttcccctaggagcgcgggggaaatggcaccaagataactttaaacttttgactgagcttggcctctccaaatcgaggcaagtgaaaatggcagagactttttccacagtagcgctcttttcatctgtggacattgtacatatgtttgccagtagggccagaaaatctatggttatgtgataataggctgccttctgcggggcttgccttctggccatgcccttcttctctcccttgcacctgtacctcttggtctttgaataaagcctgagtaggaaggaccggtaaaaaaaaaaaaaaaaaaaaaaaaaaaaaaacgttgactaaaaaaaaaaaaaaaaaaaaaaaaaaaaaaaaaaaaaaaaaaaaaaaaaaaaaaaaaaaaaaaaaaaaaa

SEQ ID NO: 11046 - DNA, 5264 bp, synthetic construct
  source 1..5264: mol_type = other DNA
gaaataagagagaaaagaagagtaagaagaaatataagagaattcgccaccatggcccctaagaaaaagcggaaggtgaatatcagcggctctagctgcggcagccccaacagcgccgacaccagcagcgacttcaaggacctgtggaccaagctgaaggaatgccacgaccgggaagtgcagggactccaggtgaaggtcaccaaactcaagcaagaaagaatcctggacgcccagagactggaagaattcttcaccaagaaccagcagctgagagagcagcagaaagtgctgcacgagacaatcaaggttctggaagatagactgcgggccggcctgtgcgacagatgcgccgtgaccgaggaacacatgcgcaaaaagcagcaggagttcgagaacattagacagcaaaatctgaaattgatcacagagctgatgaacgagagaaacacactgcaggaggagaacaagaagctgagcgagcagctgcaacagaagatcgagaatgatcagcaacaccaggccgctgagctggaatgtgaagaggacgtgatccccgacagcccaatcacagctttcagcttttctggcgtgaacagactgaggcggaaggaaaacccccacgtgcggtacatcgagcagacccataccaagctggaacacagcgtgtgtgccaacgagatgagaaaggtgtccaagtcctccacccatccccagcacaaccctaacgaaaatgagatcctggtggctgatacctacgaccagtctcagagccctatggccaaggcccacggcaccagctcttatacccctgataagagctccttcaacctggccaccgtggtggccgagacactgggcctgggcgtgcaggaggaaagcgagacacagggcccaatgagccctctgggagatgagctgtaccactgcctggaaggcaaccacaagaaacagccttttgagtccggctccgagactcctggaacaagcgagagcgctacacctgagggcagccctaagagaaaggtgtccagcgccgagggcgctgccaaggaagagcctaaacggagaagcgccagactgagcgccaagccccccgccaaggtggaagccaagcctaagaaggccgccgctaaggacaagagcagcgataagaaagtccagaccaagggcaagcggggcgccaaaggcaaacaggccgaggtggccaaccaggagacaaaggaagatctgcctgctgagaacggcgaaaccaagaccgaggaatctccagcttctgacgaggccggagagaaggaggccaaaagcgacagcggctctgagacacctggaacaagcgagagcgccaccccggaatcctatgaacaacttgcaccacaaccgtgtgtgggagaaactttacattctagcctcccacgagacagtgaactgtttgtgcctgaagaggggagcagcgagaaggagagcgaggacgcgccaaaaacatctcctccgacgcctgggaaacatggtttggaacagactggggaggaaaaagtgatggtgactgttcctgacaaaaatccaccttgtccttgctgtggtacccgggtaaactctgtgttgaatctgattgaacatctgaaagtgtcacacgggaaaaggggggtttgttttcggtgtgcaaaatgtggaaaggaaaatagtaactatcacagtgttgtttgtcattttaagaaatgcaggggtccagagacggagaaagccccagctggggagtggatttgtgaggtatgcaacagagattttacaaccaaaattggcctgggacaacacaagagattggcacacccagcagtgagaaatcaggaaaggatcgttgcttcccaaccgaaagaaacatcaaatagaggtgctcacaaaaggtgctggacaaaggaggaggaagaattactaataagactggaggctcagttcgagggaaacaaaaatattaataagcttattgcagaacacataaccaccaaaacagctaagcagatcagtgacaaaaggcgattgctgtccagaaagccagcagaggagccacgtgaggagcctggaacgtgtcatcacaccaggagagcagctgcgagcctgagaacggagcctgagatgagtcatcacgcccaggcagaggacagagataatggacctgggagacgccctctgccaggcagggcagctgccggagggagaacaatggacgagataagacgccaccctgataagggcaacggacagcagagacccaccaagcaaaaatcagaagaacagctgcaggcttactataaaaagacactagaggaacgactttcagctggggcacttaacaccttcccccgagcattcaagcaggtaatggaaggccgggatataaagctagtaatcaatcagacagcgcaggactgcttcggatgcctggaatccataagccaaataagaacggcaacccgagataaaaaggacacggtgacccgggagaaacacccaaagaaaccttttcagaagtggatgaagaagagagcaatcaaaaaaggtaattatcttcggttccagcgtttattttatcttgatagagggaaactggctaaaatcattttagatgatattgaatgcttgtcttgtgacataccactcagtgaaatttattcggtttttaaaacaagatgggaaacaactggtagctttaaaagccttggggactttaaaacttacgggaaggctgacaacactgccttcagagaattaattacggctaaagaaattgagaaaaatgtgcaggaaatgagcaaaggctcggctcccggtccagacgggattactcttggggacgtcgtaaagatggatcccgagttttcccggaccatggagattttcaatttatggttaacaactggtaaaatcccggacatggtgagggggtgcagaaccgttttgattccaaaatcatcaaagccggatcgtttgaaagacattaataactatagacctatcacgatcggttccatcttgctgagactgttctccaggattgtaacagctaggctgagcaaagcgtgccccctgaacccaaggcaaagaggctttatcagagcggcgggatgctctgaaaacttaaaactcctgcaaactataatttggtcggccaaaagagaacacagaccactgggtgttgtattcgtggacatcgccaaggcttttgacaccgtaagccaccagcacatcattcatgctttgcagcaaagagaggtggatccccacatcgtcggtctggtgagcaatatgtacgagaacatcagtacgtatatcaccacaaagaggaacacacacacagacaaaatccagatccgggttggagtaaagcagggtgacccgatgtcgccccttttatttaacctggcaatggaccctctattatgcaagctggaagagagtggcaaaggataccaccgaggacagagcagcatcacagcgatggcatttgcagacgatctggttttgctgagcgactcctgggaaaatatgaatacaaatattagcatactggagaccttctgcaatctgaccggactcaaaacacaggggcaaaagtgccacggcttttacatcaagccgacaaaggactcttacaccatcaatgactgcgctgcctggactatcaacggcacacccctgaacatgatcgaccccggcgaatctgagaaatacctcggcctgcagtttgacccgtggattggaatagcaaggtccggtctctccacaaaactagatttttggcttcagcggatcgatcaagcaccacttaaacctctgcagaaaactgatattctcaaaacatacaccatccctcggctgatctacatagctgaccactcagaagtgaaaagcgcactactcgaaacccttgaccagaagatccggacagcggtcaaggaatggcttcacctacctccgtgcacctgcgatgccatcctgtactcgagcacgagagacggcggtttgggcatcaccaaattggcaggactgatccccagcgtgcaggcccgtagactgcatcggatcgcacagtcatctgacgatacgatgaaatgcttcatggaaaaagagaaaatggaacagctgcataagaaattgtggattcaagctggaggggacagagagaacataccctcgatttgggaagcaccaccgtcgagtgaaccaccaaacaacgtgagcacaaattcggaatgggaagcaccgacccagaaagataaatttccaaagccttgcaattggaggaaaaacgaattcaaaaaatggaccaaattggcatcccaaggccgcggaattgtaaattttgaaagagacaaaattagtaaccattggatccaatactacagacgcatacctcacaggaaactcctcactgcactacaactcagggccaacgtttaccccacgagagaatttctagccaggggtagacaagaccaatacatcaaggcgtgtaggcactgcgatgcggacaacgaatcctgcgcccacatcatcggcaactgcccagtgacacaggacgcccgaatcaagaggcacaattacatctgcgaactgcttctcgaggaggcgaagaagaaggactgggtagtgttcaaggaaccgcacataagggattccaacaaggaactgtacaaacctgacctgatatttgtgaaggatgggcgtgcacttgtcgtggatgtgacagtacggtatgaagcagccaaatcatcgctggaggaagccgctgcagagaaagtgagaaagtacaaacacctggaaacggaagtaagacatctcacgaatgcaaaggacgttacttttgtgggctttcccctaggagcgcgggggaaatggcaccaagataactttaaacttttgactgagcttggcctctccaaatcgaggcaagtgaaaatggcagagactttttccacagtagcgctcttttcatctgtggacattgtacatatgtttgccagtagggccagaaaatctatggttatgtgataataggctgccttctgcggggcttgccttctggccatgcccttcttctctcccttgcacctgtacctcttggtctttgaataaagcctgagtaggaaggaccggtaaaaaaaaaaaaaaaaaaaaaaaaaaaaaaacgttgactaaaaaaaaaaaaaaaaaaaaaaaaaaaaaaaaaaaaaaaaaaaaaaaaaaaaaaaaaaaaaaaaaaaaaa

SEQ ID NO: 11047 - DNA, 5264 bp, synthetic construct
  source 1..5264: mol_type = other DNA
gaaataagagagaaaagaagagtaagaagaaatataagagaattcgccaccatggcccctaagaaaaagcggaaggtgaatatcagcggctctagctgcggcagccccaacagcgccgacaccagcagcgacttcaaggacctgtggaccaagctgaaggaatgccacgaccgggaagtgcagggactccaggtgaaggtcaccaaactcaagcaagaaagaatcctggacgcccagagactggaagaattcttcaccaagaaccagcagctgagagagcagcagaaagtgctgcacgagacaatcaaggttctggaagatagactgcgggccggcctgtgcgacagatgcgccgtgaccgaggaacacatgcgcaaaaagcagcaggagttcgagaacattagacagcaaaatctgaaattgatcacagagctgatgaacgagagaaacacactgcaggaggagaacaagaagctgagcgagcagctgcaacagaagatcgagaatgatcagcaacaccaggccgctgagctggaatgtgaagaggacgtgatccccgacagcccaatcacagctttcagcttttctggcgtgaacagactgaggcggaaggaaaacccccacgtgcggtacatcgagcagacccataccaagctggaacacagcgtgtgtgccaacgagatgagaaaggtgtccaagtcctccacccatccccagcacaaccctaacgaaaatgagatcctggtggctgatacctacgaccagtctcagagccctatggccaaggcccacggcaccagctcttatacccctgataagagctccttcaacctggccaccgtggtggccgagacactgggcctgggcgtgcaggaggaaagcgagacacagggcccaatgagccctctgggagatgagctgtaccactgcctggaaggcaaccacaagaaacagccttttgagtccggctccgagactcctggaacaagcgagagcgctacacctgagggcagccctaagagaaaggtgtccagcgccgagggcgctgccaaggaagagcctaaacggagaagcgccagactgagcgccaagccccccgccaaggtggaagccaagcctaagaaggccgccgctaaggacaagagcagcgataagaaagtccagaccaagggcaagcggggcgccaaaggcaaacaggccgaggtggccaaccaggagacaaaggaagatctgcctgctgagaacggcgaaaccaagaccgaggaatctccagcttctgacgaggccggagagaaggaggccaaaagcgacagcggctctgagacacctggaacaagcgagagcgccaccccggaatcctatgaacaacttgcaccacaaccgtgtgtgggagaaactttacattctagcctcccacgagacagtgaactgtttgtgcctgaagaggggagcagcgagaaggagagcgaggacgcgccaaaaacatctcctccgacgcctgggaaacatggtttggaacagactggggaggaaaaagtgatggtgactgttcctgacaaaaatccaccttgtccttgctgtggtacccgggtaaactctgtgttgaatctgattgaacatctgaaagtgtcacacgggaaaaggggggtttgttttcggtgtgcaaaatgtggaaaggaaaatagtaactatcacagtgttgtttgtcattttaagaaatgcaggggtccagagacggagaaagccccagctggggagtggatttgtgaggtatgcaacagagattttacaaccaaaattggcctgggacaacacaagagattggcacacccagcagtgagaaatcaggaaaggatcgttgcttcccaaccgaaagaaacatcaaatagaggtgctcacaaaaggtgctggacaaaggaggaggaagaattactaataagactggaggctcagttcgagggaaacaaaaatattaataagcttattgcagaacacataaccaccaaaacagctaagcagatcagtgacaaaaggcgattgctgtccagaaagccagcagaggagccacgtgaggagcctggaacgtgtcatcacaccaggagagcagctgcgagcctgagaacggagcctgagatgagtcatcacgcccaggcagaggacagagataatggacctgggagacgccctctgccaggcagggcagctgccggagggagaacaatggacgagataagacgccaccctgataagggcaacggacagcagagacccaccaagcaaaaatcagaagaacagctgcaggcttactataaaaagacactagaggaacgactttcagctggggcacttaacaccttcccccgagcattcaagcaggtaatggaaggccgggatataaagctagtaatcaatcagacagcgcaggactgcttcggatgcctggaatccataagccaaataagaacggcaacccgagataaaaaggacacggtgacccgggagaaacacccaaagaaaccttttcagaagtggatgaagaagagagcaatcaaaaaaggtaattatcttcggttccagcgtttattttatcttgatagagggaaactggctaaaatcattttagatgatattgaatgcttgtcttgtgacataccactcagtgaaatttattcggtttttaaaacaagatgggaaacaactggtagctttaaaagccttggggactttaaaacttacgggaaggctgacaacactgccttcagagaattaattacggctaaagaaattgagaaaaatgtgcaggaaatgagcaaaggctcggctcccggtccagacgggattactcttggggacgtcgtaaagatggatcccgagttttcccggaccatggagattttcaatttatggttaacaactggtaaaatcccggacatggtgagggggtgcagaaccgttttgattccaaaatcatcaaagccggatcgtttgaaagacattaataactggagacctatcgccatcggttccatcttgctgagactgttctccaggattgtaacagctaggctgagcaaagcgtgccccctgaacccaaggcaaagaggctttatcagagcggcgggatgctctgaaaacttaaaactcctgcaaactataatttggtcggccaaaagagaacacagaccactgggtgttgtattcgtggacatcgccaaggcttttgacaccgtaagccaccagcacatcattcatgctttgcagcaaagagaggtggatccccacatcgtcggtctggtgagcaatatgtacgagaacatcagtacgtatatcaccacaaagaggaacacacacacagacaaaatccagatccgggttggagtaaagcagggtgacccgatgtcgccccttttatttaacctggcaatggaccctctattatgcaagctggaagagagtggcaaaggataccaccgaggacagagcagcatcacagcgatggcatttgcagacgatctggttttgctgagcgactcctgggaaaatatgaatacaaatattagcatactggagaccttctgcaatctgaccggactcaaaacacaggggcaaaagtgccacggcttttacatcaagccgacaaaggactcttacaccatcaatgactgcgctgcctggactatcaacggcacacccctgaacatgatcgaccccggcgaatctgagaaatacctcggcctgcagtttgacccgtggattggaatagcaaggtccggtctctccacaaaactagatttttggcttcagcggatcgatcaagcaccacttaaacctctgcagaaaactgatattctcaaaacatacaccatccctcggctgatctacatagctgaccactcagaagtgaaaagcgcactactcgaaacccttgaccagaagatccggacagcggtcaaggaatggcttcacctacctccgtgcacctgcgatgccatcctgtactcgagcacgagagacggcggtttgggcatcaccaaattggcaggactgatccccagcgtgcaggcccgtagactgcatcggatcgcacagtcatctgacgatacgatgaaatgcttcatggaaaaagagaaaatggaacagctgcataagaaattgtggattcaagctggaggggacagagagaacataccctcgatttgggaagcaccaccgtcgagtgaaccaccaaacaacgtgagcacaaattcggaatgggaagcaccgacccagaaagataaatttccaaagccttgcaattggaggaaaaacgaattcaaaaaatggaccaaattggcatcccaaggccgcggaattgtaaattttgaaagagacaaaattagtaaccattggatccaatactacagacgcatacctcacaggaaactcctcactgcactacaactcagggccaacgtttaccccacgagagaatttctagccaggggtagacaagaccaatacatcaaggcgtgtaggcactgcgatgcggacaacgaatcctgcgcccacatcatcggcaactgcccagtgacacaggacgcccgaatcaagaggcacaattacatctgcgaactgcttctcgaggaggcgaagaagaaggactgggtagtgttcaaggaaccgcacataagggattccaacaaggaactgtacaaacctgacctgatatttgtgaaggatgggcgtgcacttgtcgtggatgtgacagtacggtatgaagcagccaaatcatcgctggaggaagccgctgcagagaaagtgagaaagtacaaacacctggaaacggaagtaagacatctcacgaatgcaaaggacgttacttttgtgggctttcccctaggagcgcgggggaaatggcaccaagataactttaaacttttgactgagcttggcctctccaaatcgaggcaagtgaaaatggcagagactttttccacagtagcgctcttttcatctgtggacattgtacatatgtttgccagtagggccagaaaatctatggttatgtgataataggctgccttctgcggggcttgccttctggccatgcccttcttctctcccttgcacctgtacctcttggtctttgaataaagcctgagtaggaaggaccggtaaaaaaaaaaaaaaaaaaaaaaaaaaaaaaacgttgactaaaaaaaaaaaaaaaaaaaaaaaaaaaaaaaaaaaaaaaaaaaaaaaaaaaaaaaaaaaaaaaaaaaaaa

SEQ ID NO: 11048 - DNA, 5264 bp, synthetic construct
  source 1..5264: mol_type = other DNA
gaaataagagagaaaagaagagtaagaagaaatataagagaattcgccaccatggcccctaagaaaaagcggaaggtgaatatcagcggctctagctgcggcagccccaacagcgccgacaccagcagcgacttcaaggacctgtggaccaagctgaaggaatgccacgaccgggaagtgcagggactccaggtgaaggtcaccaaactcaagcaagaaagaatcctggacgcccagagactggaagaattcttcaccaagaaccagcagctgagagagcagcagaaagtgctgcacgagacaatcaaggttctggaagatagactgcgggccggcctgtgcgacagatgcgccgtgaccgaggaacacatgcgcaaaaagcagcaggagttcgagaacattagacagcaaaatctgaaattgatcacagagctgatgaacgagagaaacacactgcaggaggagaacaagaagctgagcgagcagctgcaacagaagatcgagaatgatcagcaacaccaggccgctgagctggaatgtgaagaggacgtgatccccgacagcccaatcacagctttcagcttttctggcgtgaacagactgaggcggaaggaaaacccccacgtgcggtacatcgagcagacccataccaagctggaacacagcgtgtgtgccaacgagatgagaaaggtgtccaagtcctccacccatccccagcacaaccctaacgaaaatgagatcctggtggctgatacctacgaccagtctcagagccctatggccaaggcccacggcaccagctcttatacccctgataagagctccttcaacctggccaccgtggtggccgagacactgggcctgggcgtgcaggaggaaagcgagacacagggcccaatgagccctctgggagatgagctgtaccactgcctggaaggcaaccacaagaaacagccttttgagtccggctccgagactcctggaacaagcgagagcgctacacctgagggcagccctaagagaaaggtgtccagcgccgagggcgctgccaaggaagagcctaaacggagaagcgccagactgagcgccaagccccccgccaaggtggaagccaagcctaagaaggccgccgctaaggacaagagcagcgataagaaagtccagaccaagggcaagcggggcgccaaaggcaaacaggccgaggtggccaaccaggagacaaaggaagatctgcctgctgagaacggcgaaaccaagaccgaggaatctccagcttctgacgaggccggagagaaggaggccaaaagcgacagcggctctgagacacctggaacaagcgagagcgccaccccggaatcctatgaacaacttgcaccacaaccgtgtgtgggagaaactttacattctagcctcccacgagacagtgaactgtttgtgcctgaagaggggagcagcgagaaggagagcgaggacgcgccaaaaacatctcctccgacgcctgggaaacatggtttggaacagactggggaggaaaaagtgatggtgactgttcctgacaaaaatccaccttgtccttgctgtggtacccgggtaaactctgtgttgaatctgattgaacatctgaaagtgtcacacgggaaaaggggggtttgttttcggtgtgcaaaatgtggaaaggaaaatagtaactatcacagtgttgtttgtcattttaagaaatgcaggggtccagagacggagaaagccccagctggggagtggatttgtgaggtatgcaacagagattttacaaccaaaattggcctgggacaacacaagagattggcacacccagcagtgagaaatcaggaaaggatcgttgcttcccaaccgaaagaaacatcaaatagaggtgctcacaaaaggtgctggacaaaggaggaggaagaattactaataagactggaggctcagttcgagggaaacaaaaatattaataagcttattgcagaacacataaccaccaaaacagctaagcagatcagtgacaaaaggcgattgctgtccagaaagccagcagaggagccacgtgaggagcctggaacgtgtcatcacaccaggagagcagctgcgagcctgagaacggagcctgagatgagtcatcacgcccaggcagaggacagagataatggacctgggagacgccctctgccaggcagggcagctgccggagggagaacaatggacgagataagacgccaccctgataagggcaacggacagcagagacccaccaagcaaaaatcagaagaacagctgcaggcttactataaaaagacactagaggaacgactttcagctggggcacttaacaccttcccccgagcattcaagcaggtaatggaaggccgggatataaagctagtaatcaatcagacagcgcaggactgcttcggatgcctggaatccataagccaaataagaacggcaacccgagataaaaaggacacggtgacccgggagaaacacccaaagaaaccttttcagaagtggatgaagaagagagcaatcaaaaaaggtaattatcttcggttccagcgtttattttatcttgatagagggaaactggctaaaatcattttagatgatattgaatgcttgtcttgtgacataccactcagtgaaatttattcggtttttaaaacaagatgggaaacaactggtagctttaaaagccttggggactttaaaacttacgggaaggctgacaacactgccttcagagaattaattacggctaaagaaattgagaaaaatgtgcaggaaatgagcaaaggctcggctcccggtccagacgggattactcttggggacgtcgtaaagatggatcccgagttttcccggaccatggagattttcaatttatggttaacaactggtaaaatcccggacatggtgagggggtgcagaaccgttttgattccaaaatcatcaaagccggatcgtttgaaagacattaataactggagacctatcacgatcggttccaccttgctgagactgttctccaggattgtaacagctaggctgagcaaagcgtgccccctgaacccaaggcaaagaggctttatcagagcggcgggatgctctgaaaacttaaaactcctgcaaactataatttggtcggccaaaagagaacacagaccactgggtgttgtattcgtggacatcgccaaggcttttgacaccgtaagccaccagcacatcattcatgctttgcagcaaagagaggtggatccccacatcgtcggtctggtgagcaatatgtacgagaacatcagtacgtatatcaccacaaagaggaacacacacacagacaaaatccagatccgggttggagtaaagcagggtgacccgatgtcgccccttttatttaacctggcaatggaccctctattatgcaagctggaagagagtggcaaaggataccaccgaggacagagcagcatcacagcgatggcatttgcagacgatctggttttgctgagcgactcctgggaaaatatgaatacaaatattagcatactggagaccttctgcaatctgaccggactcaaaacacaggggcaaaagtgccacggcttttacatcaagccgacaaaggactcttacaccatcaatgactgcgctgcctggactatcaacggcacacccctgaacatgatcgaccccggcgaatctgagaaatacctcggcctgcagtttgacccgtggattggaatagcaaggtccggtctctccacaaaactagatttttggcttcagcggatcgatcaagcaccacttaaacctctgcagaaaactgatattctcaaaacatacaccatccctcggctgatctacatagctgaccactcagaagtgaaaagcgcactactcgaaacccttgaccagaagatccggacagcggtcaaggaatggcttcacctacctccgtgcacctgcgatgccatcctgtactcgagcacgagagacggcggtttgggcatcaccaaattggcaggactgatccccagcgtgcaggcccgtagactgcatcggatcgcacagtcatctgacgatacgatgaaatgcttcatggaaaaagagaaaatggaacagctgcataagaaattgtggattcaagctggaggggacagagagaacataccctcgatttgggaagcaccaccgtcgagtgaaccaccaaacaacgtgagcacaaattcggaatgggaagcaccgacccagaaagataaatttccaaagccttgcaattggaggaaaaacgaattcaaaaaatggaccaaattggcatcccaaggccgcggaattgtaaattttgaaagagacaaaattagtaaccattggatccaatactacagacgcatacctcacaggaaactcctcactgcactacaactcagggccaacgtttaccccacgagagaatttctagccaggggtagacaagaccaatacatcaaggcgtgtaggcactgcgatgcggacaacgaatcctgcgcccacatcatcggcaactgcccagtgacacaggacgcccgaatcaagaggcacaattacatctgcgaactgcttctcgaggaggcgaagaagaaggactgggtagtgttcaaggaaccgcacataagggattccaacaaggaactgtacaaacctgacctgatatttgtgaaggatgggcgtgcacttgtcgtggatgtgacagtacggtatgaagcagccaaatcatcgctggaggaagccgctgcagagaaagtgagaaagtacaaacacctggaaacggaagtaagacatctcacgaatgcaaaggacgttacttttgtgggctttcccctaggagcgcgggggaaatggcaccaagataactttaaacttttgactgagcttggcctctccaaatcgaggcaagtgaaaatggcagagactttttccacagtagcgctcttttcatctgtggacattgtacatatgtttgccagtagggccagaaaatctatggttatgtgataataggctgccttctgcggggcttgccttctggccatgcccttcttctctcccttgcacctgtacctcttggtctttgaataaagcctgagtaggaaggaccggtaaaaaaaaaaaaaaaaaaaaaaaaaaaaaaacgttgactaaaaaaaaaaaaaaaaaaaaaaaaaaaaaaaaaaaaaaaaaaaaaaaaaaaaaaaaaaaaaaaaaaaaaa

SEQ ID NO: 11049 - DNA, 5264 bp, synthetic construct
  source 1..5264: mol_type = other DNA
gaaataagagagaaaagaagagtaagaagaaatataagagaattcgccaccatggcccctaagaaaaagcggaaggtgaatatcagcggctctagctgcggcagccccaacagcgccgacaccagcagcgacttcaaggacctgtggaccaagctgaaggaatgccacgaccgggaagtgcagggactccaggtgaaggtcaccaaactcaagcaagaaagaatcctggacgcccagagactggaagaattcttcaccaagaaccagcagctgagagagcagcagaaagtgctgcacgagacaatcaaggttctggaagatagactgcgggccggcctgtgcgacagatgcgccgtgaccgaggaacacatgcgcaaaaagcagcaggagttcgagaacattagacagcaaaatctgaaattgatcacagagctgatgaacgagagaaacacactgcaggaggagaacaagaagctgagcgagcagctgcaacagaagatcgagaatgatcagcaacaccaggccgctgagctggaatgtgaagaggacgtgatccccgacagcccaatcacagctttcagcttttctggcgtgaacagactgaggcggaaggaaaacccccacgtgcggtacatcgagcagacccataccaagctggaacacagcgtgtgtgccaacgagatgagaaaggtgtccaagtcctccacccatccccagcacaaccctaacgaaaatgagatcctggtggctgatacctacgaccagtctcagagccctatggccaaggcccacggcaccagctcttatacccctgataagagctccttcaacctggccaccgtggtggccgagacactgggcctgggcgtgcaggaggaaagcgagacacagggcccaatgagccctctgggagatgagctgtaccactgcctggaaggcaaccacaagaaacagccttttgagtccggctccgagactcctggaacaagcgagagcgctacacctgagggcagccctaagagaaaggtgtccagcgccgagggcgctgccaaggaagagcctaaacggagaagcgccagactgagcgccaagccccccgccaaggtggaagccaagcctaagaaggccgccgctaaggacaagagcagcgataagaaagtccagaccaagggcaagcggggcgccaaaggcaaacaggccgaggtggccaaccaggagacaaaggaagatctgcctgctgagaacggcgaaaccaagaccgaggaatctccagcttctgacgaggccggagagaaggaggccaaaagcgacagcggctctgagacacctggaacaagcgagagcgccaccccggaatcctatgaacaacttgcaccacaaccgtgtgtgggagaaactttacattctagcctcccacgagacagtgaactgtttgtgcctgaagaggggagcagcgagaaggagagcgaggacgcgccaaaaacatctcctccgacgcctgggaaacatggtttggaacagactggggaggaaaaagtgatggtgactgttcctgacaaaaatccaccttgtccttgctgtggtacccgggtaaactctgtgttgaatctgattgaacatctgaaagtgtcacacgggaaaaggggggtttgttttcggtgtgcaaaatgtggaaaggaaaatagtaactatcacagtgttgtttgtcattttaagaaatgcaggggtccagagacggagaaagccccagctggggagtggatttgtgaggtatgcaacagagattttacaaccaaaattggcctgggacaacacaagagattggcacacccagcagtgagaaatcaggaaaggatcgttgcttcccaaccgaaagaaacatcaaatagaggtgctcacaaaaggtgctggacaaaggaggaggaagaattactaataagactggaggctcagttcgagggaaacaaaaatattaataagcttattgcagaacacataaccaccaaaacagctaagcagatcagtgacaaaaggcgattgctgtccagaaagccagcagaggagccacgtgaggagcctggaacgtgtcatcacaccaggagagcagctgcgagcctgagaacggagcctgagatgagtcatcacgcccaggcagaggacagagataatggacctgggagacgccctctgccaggcagggcagctgccggagggagaacaatggacgagataagacgccaccctgataagggcaacggacagcagagacccaccaagcaaaaatcagaagaacagctgcaggcttactataaaaagacactagaggaacgactttcagctggggcacttaacaccttcccccgagcattcaagcaggtaatggaaggccgggatataaagctagtaatcaatcagacagcgcaggactgcttcggatgcctggaatccataagccaaataagaacggcaacccgagataaaaaggacacggtgacccgggagaaacacccaaagaaaccttttcagaagtggatgaagaagagagcaatcaaaaaaggtaattatcttcggttccagcgtttattttatcttgatagagggaaactggctaaaatcattttagatgatattgaatgcttgtcttgtgacataccactcagtgaaatttattcggtttttaaaacaagatgggaaacaactggtagctttaaaagccttggggactttaaaacttacgggaaggctgacaacactgccttcagagaattaattacggctaaagaaattgagaaaaatgtgcaggaaatgagcaaaggctcggctcccggtccagacgggattactcttggggacgtcgtaaagatggatcccgagttttcccggaccatggagattttcaatttatggttaacaactggtaaaatcccggacatggtgagggggtgcagaaccgttttgattccaaaatcatcaaagccggatcgtttgaaagacattaataactggagacctatcacgatcggttccatcttgctgagactgttctccagggtggtaacagctaggctgagcaaagcgtgccccctgaacccaaggcaaagaggctttatcagagcggcgggatgctctgaaaacttaaaactcctgcaaactataatttggtcggccaaaagagaacacagaccactgggtgttgtattcgtggacatcgccaaggcttttgacaccgtaagccaccagcacatcattcatgctttgcagcaaagagaggtggatccccacatcgtcggtctggtgagcaatatgtacgagaacatcagtacgtatatcaccacaaagaggaacacacacacagacaaaatccagatccgggttggagtaaagcagggtgacccgatgtcgccccttttatttaacctggcaatggaccctctattatgcaagctggaagagagtggcaaaggataccaccgaggacagagcagcatcacagcgatggcatttgcagacgatctggttttgctgagcgactcctgggaaaatatgaatacaaatattagcatactggagaccttctgcaatctgaccggactcaaaacacaggggcaaaagtgccacggcttttacatcaagccgacaaaggactcttacaccatcaatgactgcgctgcctggactatcaacggcacacccctgaacatgatcgaccccggcgaatctgagaaatacctcggcctgcagtttgacccgtggattggaatagcaaggtccggtctctccacaaaactagatttttggcttcagcggatcgatcaagcaccacttaaacctctgcagaaaactgatattctcaaaacatacaccatccctcggctgatctacatagctgaccactcagaagtgaaaagcgcactactcgaaacccttgaccagaagatccggacagcggtcaaggaatggcttcacctacctccgtgcacctgcgatgccatcctgtactcgagcacgagagacggcggtttgggcatcaccaaattggcaggactgatccccagcgtgcaggcccgtagactgcatcggatcgcacagtcatctgacgatacgatgaaatgcttcatggaaaaagagaaaatggaacagctgcataagaaattgtggattcaagctggaggggacagagagaacataccctcgatttgggaagcaccaccgtcgagtgaaccaccaaacaacgtgagcacaaattcggaatgggaagcaccgacccagaaagataaatttccaaagccttgcaattggaggaaaaacgaattcaaaaaatggaccaaattggcatcccaaggccgcggaattgtaaattttgaaagagacaaaattagtaaccattggatccaatactacagacgcatacctcacaggaaactcctcactgcactacaactcagggccaacgtttaccccacgagagaatttctagccaggggtagacaagaccaatacatcaaggcgtgtaggcactgcgatgcggacaacgaatcctgcgcccacatcatcggcaactgcccagtgacacaggacgcccgaatcaagaggcacaattacatctgcgaactgcttctcgaggaggcgaagaagaaggactgggtagtgttcaaggaaccgcacataagggattccaacaaggaactgtacaaacctgacctgatatttgtgaaggatgggcgtgcacttgtcgtggatgtgacagtacggtatgaagcagccaaatcatcgctggaggaagccgctgcagagaaagtgagaaagtacaaacacctggaaacggaagtaagacatctcacgaatgcaaaggacgttacttttgtgggctttcccctaggagcgcgggggaaatggcaccaagataactttaaacttttgactgagcttggcctctccaaatcgaggcaagtgaaaatggcagagactttttccacagtagcgctcttttcatctgtggacattgtacatatgtttgccagtagggccagaaaatctatggttatgtgataataggctgccttctgcggggcttgccttctggccatgcccttcttctctcccttgcacctgtacctcttggtctttgaataaagcctgagtaggaaggaccggtaaaaaaaaaaaaaaaaaaaaaaaaaaaaaaacgttgactaaaaaaaaaaaaaaaaaaaaaaaaaaaaaaaaaaaaaaaaaaaaaaaaaaaaaaaaaaaaaaaaaaaaaa

SEQ ID NO: 11050 - DNA, 5264 bp, synthetic construct
  source 1..5264: mol_type = other DNA
gaaataagagagaaaagaagagtaagaagaaatataagagaattcgccaccatggcccctaagaaaaagcggaaggtgaatatcagcggctctagctgcggcagccccaacagcgccgacaccagcagcgacttcaaggacctgtggaccaagctgaaggaatgccacgaccgggaagtgcagggactccaggtgaaggtcaccaaactcaagcaagaaagaatcctggacgcccagagactggaagaattcttcaccaagaaccagcagctgagagagcagcagaaagtgctgcacgagacaatcaaggttctggaagatagactgcgggccggcctgtgcgacagatgcgccgtgaccgaggaacacatgcgcaaaaagcagcaggagttcgagaacattagacagcaaaatctgaaattgatcacagagctgatgaacgagagaaacacactgcaggaggagaacaagaagctgagcgagcagctgcaacagaagatcgagaatgatcagcaacaccaggccgctgagctggaatgtgaagaggacgtgatccccgacagcccaatcacagctttcagcttttctggcgtgaacagactgaggcggaaggaaaacccccacgtgcggtacatcgagcagacccataccaagctggaacacagcgtgtgtgccaacgagatgagaaaggtgtccaagtcctccacccatccccagcacaaccctaacgaaaatgagatcctggtggctgatacctacgaccagtctcagagccctatggccaaggcccacggcaccagctcttatacccctgataagagctccttcaacctggccaccgtggtggccgagacactgggcctgggcgtgcaggaggaaagcgagacacagggcccaatgagccctctgggagatgagctgtaccactgcctggaaggcaaccacaagaaacagccttttgagtccggctccgagactcctggaacaagcgagagcgctacacctgagggcagccctaagagaaaggtgtccagcgccgagggcgctgccaaggaagagcctaaacggagaagcgccagactgagcgccaagccccccgccaaggtggaagccaagcctaagaaggccgccgctaaggacaagagcagcgataagaaagtccagaccaagggcaagcggggcgccaaaggcaaacaggccgaggtggccaaccaggagacaaaggaagatctgcctgctgagaacggcgaaaccaagaccgaggaatctccagcttctgacgaggccggagagaaggaggccaaaagcgacagcggctctgagacacctggaacaagcgagagcgccaccccggaatcctatgaacaacttgcaccacaaccgtgtgtgggagaaactttacattctagcctcccacgagacagtgaactgtttgtgcctgaagaggggagcagcgagaaggagagcgaggacgcgccaaaaacatctcctccgacgcctgggaaacatggtttggaacagactggggaggaaaaagtgatggtgactgttcctgacaaaaatccaccttgtccttgctgtggtacccgggtaaactctgtgttgaatctgattgaacatctgaaagtgtcacacgggaaaaggggggtttgttttcggtgtgcaaaatgtggaaaggaaaatagtaactatcacagtgttgtttgtcattttaagaaatgcaggggtccagagacggagaaagccccagctggggagtggatttgtgaggtatgcaacagagattttacaaccaaaattggcctgggacaacacaagagattggcacacccagcagtgagaaatcaggaaaggatcgttgcttcccaaccgaaagaaacatcaaatagaggtgctcacaaaaggtgctggacaaaggaggaggaagaattactaataagactggaggctcagttcgagggaaacaaaaatattaataagcttattgcagaacacataaccaccaaaacagctaagcagatcagtgacaaaaggcgattgctgtccagaaagccagcagaggagccacgtgaggagcctggaacgtgtcatcacaccaggagagcagctgcgagcctgagaacggagcctgagatgagtcatcacgcccaggcagaggacagagataatggacctgggagacgccctctgccaggcagggcagctgccggagggagaacaatggacgagataagacgccaccctgataagggcaacggacagcagagacccaccaagcaaaaatcagaagaacagctgcaggcttactataaaaagacactagaggaacgactttcagctggggcacttaacaccttcccccgagcattcaagcaggtaatggaaggccgggatataaagctagtaatcaatcagacagcgcaggactgcttcggatgcctggaatccataagccaaataagaacggcaacccgagataaaaaggacacggtgacccgggagaaacacccaaagaaaccttttcagaagtggatgaagaagagagcaatcaaaaaaggtaattatcttcggttccagcgtttattttatcttgatagagggaaactggctaaaatcattttagatgatattgaatgcttgtcttgtgacataccactcagtgaaatttattcggtttttaaaacaagatgggaaacaactggtagctttaaaagccttggggactttaaaacttacgggaaggctgacaacactgccttcagagaattaattacggctaaagaaattgagaaaaatgtgcaggaaatgagcaaaggctcggctcccggtccagacgggattactcttggggacgtcgtaaagatggatcccgagttttcccggaccatggagattttcaatttatggttaacaactggtaaaatcccggacatggtgagggggtgcagaaccgttttgattccaaaatcatcaaagccggatcgtttgaaagacattaataactggagacctatcacgatcggttccatcttgctgagactgttctccaggattgtaacagctaggctgagcaaagcgtgccccctgaacccaaggcaaagaggctttatcagagcggcgggatgctctgaaaacttaaaactcctgcaaactataatttggtcggccaaaagagaacacagaccactgggtgttgtattcgtggacatctccaaggcttttgacaccgtaagccaccagcacatcattcatgctttgcagcaaagagaggtggatccccacatcgtcggtctggtgagcaatatgtacgagaacatcagtacgtatatcaccacaaagaggaacacacacacagacaaaatccagatccgggttggagtaaagcagggtgacccgatgtcgccccttttatttaacctggcaatggaccctctattatgcaagctggaagagagtggcaaaggataccaccgaggacagagcagcatcacagcgatggcatttgcagacgatctggttttgctgagcgactcctgggaaaatatgaatacaaatattagcatactggagaccttctgcaatctgaccggactcaaaacacaggggcaaaagtgccacggcttttacatcaagccgacaaaggactcttacaccatcaatgactgcgctgcctggactatcaacggcacacccctgaacatgatcgaccccggcgaatctgagaaatacctcggcctgcagtttgacccgtggattggaatagcaaggtccggtctctccacaaaactagatttttggcttcagcggatcgatcaagcaccacttaaacctctgcagaaaactgatattctcaaaacatacaccatccctcggctgatctacatagctgaccactcagaagtgaaaagcgcactactcgaaacccttgaccagaagatccggacagcggtcaaggaatggcttcacctacctccgtgcacctgcgatgccatcctgtactcgagcacgagagacggcggtttgggcatcaccaaattggcaggactgatccccagcgtgcaggcccgtagactgcatcggatcgcacagtcatctgacgatacgatgaaatgcttcatggaaaaagagaaaatggaacagctgcataagaaattgtggattcaagctggaggggacagagagaacataccctcgatttgggaagcaccaccgtcgagtgaaccaccaaacaacgtgagcacaaattcggaatgggaagcaccgacccagaaagataaatttccaaagccttgcaattggaggaaaaacgaattcaaaaaatggaccaaattggcatcccaaggccgcggaattgtaaattttgaaagagacaaaattagtaaccattggatccaatactacagacgcatacctcacaggaaactcctcactgcactacaactcagggccaacgtttaccccacgagagaatttctagccaggggtagacaagaccaatacatcaaggcgtgtaggcactgcgatgcggacaacgaatcctgcgcccacatcatcggcaactgcccagtgacacaggacgcccgaatcaagaggcacaattacatctgcgaactgcttctcgaggaggcgaagaagaaggactgggtagtgttcaaggaaccgcacataagggattccaacaaggaactgtacaaacctgacctgatatttgtgaaggatgggcgtgcacttgtcgtggatgtgacagtacggtatgaagcagccaaatcatcgctggaggaagccgctgcagagaaagtgagaaagtacaaacacctggaaacggaagtaagacatctcacgaatgcaaaggacgttacttttgtgggctttcccctaggagcgcgggggaaatggcaccaagataactttaaacttttgactgagcttggcctctccaaatcgaggcaagtgaaaatggcagagactttttccacagtagcgctcttttcatctgtggacattgtacatatgtttgccagtagggccagaaaatctatggttatgtgataataggctgccttctgcggggcttgccttctggccatgcccttcttctctcccttgcacctgtacctcttggtctttgaataaagcctgagtaggaaggaccggtaaaaaaaaaaaaaaaaaaaaaaaaaaaaaaacgttgactaaaaaaaaaaaaaaaaaaaaaaaaaaaaaaaaaaaaaaaaaaaaaaaaaaaaaaaaaaaaaaaaaaaaaa

SEQ ID NO: 11051 - DNA, 5264 bp, synthetic construct
  source 1..5264: mol_type = other DNA
gaaataagagagaaaagaagagtaagaagaaatataagagaattcgccaccatggcccctaagaaaaagcggaaggtgaatatcagcggctctagctgcggcagccccaacagcgccgacaccagcagcgacttcaaggacctgtggaccaagctgaaggaatgccacgaccgggaagtgcagggactccaggtgaaggtcaccaaactcaagcaagaaagaatcctggacgcccagagactggaagaattcttcaccaagaaccagcagctgagagagcagcagaaagtgctgcacgagacaatcaaggttctggaagatagactgcgggccggcctgtgcgacagatgcgccgtgaccgaggaacacatgcgcaaaaagcagcaggagttcgagaacattagacagcaaaatctgaaattgatcacagagctgatgaacgagagaaacacactgcaggaggagaacaagaagctgagcgagcagctgcaacagaagatcgagaatgatcagcaacaccaggccgctgagctggaatgtgaagaggacgtgatccccgacagcccaatcacagctttcagcttttctggcgtgaacagactgaggcggaaggaaaacccccacgtgcggtacatcgagcagacccataccaagctggaacacagcgtgtgtgccaacgagatgagaaaggtgtccaagtcctccacccatccccagcacaaccctaacgaaaatgagatcctggtggctgatacctacgaccagtctcagagccctatggccaaggcccacggcaccagctcttatacccctgataagagctccttcaacctggccaccgtggtggccgagacactgggcctgggcgtgcaggaggaaagcgagacacagggcccaatgagccctctgggagatgagctgtaccactgcctggaaggcaaccacaagaaacagccttttgagtccggctccgagactcctggaacaagcgagagcgctacacctgagggcagccctaagagaaaggtgtccagcgccgagggcgctgccaaggaagagcctaaacggagaagcgccagactgagcgccaagccccccgccaaggtggaagccaagcctaagaaggccgccgctaaggacaagagcagcgataagaaagtccagaccaagggcaagcggggcgccaaaggcaaacaggccgaggtggccaaccaggagacaaaggaagatctgcctgctgagaacggcgaaaccaagaccgaggaatctccagcttctgacgaggccggagagaaggaggccaaaagcgacagcggctctgagacacctggaacaagcgagagcgccaccccggaatcctatgaacaacttgcaccacaaccgtgtgtgggagaaactttacattctagcctcccacgagacagtgaactgtttgtgcctgaagaggggagcagcgagaaggagagcgaggacgcgccaaaaacatctcctccgacgcctgggaaacatggtttggaacagactggggaggaaaaagtgatggtgactgttcctgacaaaaatccaccttgtccttgctgtggtacccgggtaaactctgtgttgaatctgattgaacatctgaaagtgtcacacgggaaaaggggggtttgttttcggtgtgcaaaatgtggaaaggaaaatagtaactatcacagtgttgtttgtcattttaagaaatgcaggggtccagagacggagaaagccccagctggggagtggatttgtgaggtatgcaacagagattttacaaccaaaattggcctgggacaacacaagagattggcacacccagcagtgagaaatcaggaaaggatcgttgcttcccaaccgaaagaaacatcaaatagaggtgctcacaaaaggtgctggacaaaggaggaggaagaattactaataagactggaggctcagttcgagggaaacaaaaatattaataagcttattgcagaacacataaccaccaaaacagctaagcagatcagtgacaaaaggcgattgctgtccagaaagccagcagaggagccacgtgaggagcctggaacgtgtcatcacaccaggagagcagctgcgagcctgagaacggagcctgagatgagtcatcacgcccaggcagaggacagagataatggacctgggagacgccctctgccaggcagggcagctgccggagggagaacaatggacgagataagacgccaccctgataagggcaacggacagcagagacccaccaagcaaaaatcagaagaacagctgcaggcttactataaaaagacactagaggaacgactttcagctggggcacttaacaccttcccccgagcattcaagcaggtaatggaaggccgggatataaagctagtaatcaatcagacagcgcaggactgcttcggatgcctggaatccataagccaaataagaacggcaacccgagataaaaaggacacggtgacccgggagaaacacccaaagaaaccttttcagaagtggatgaagaagagagcaatcaaaaaaggtaattatcttcggttccagcgtttattttatcttgatagagggaaactggctaaaatcattttagatgatattgaatgcttgtcttgtgacataccactcagtgaaatttattcggtttttaaaacaagatgggaaacaactggtagctttaaaagccttggggactttaaaacttacgggaaggctgacaacactgccttcagagaattaattacggctaaagaaattgagaaaaatgtgcaggaaatgagcaaaggctcggctcccggtccagacgggattactcttggggacgtcgtaaagatggatcccgagttttcccggaccatggagattttcaatttatggttaacaactggtaaaatcccggacatggtgagggggtgcagaaccgttttgattccaaaatcatcaaagccggatcgtttgaaagacattaataactggagacctatcacgatcggttccatcttgctgagactgttctccaggattgtaacagctaggctgagcaaagcgtgccccctgaacccaaggcaaagaggctttatcagagcggcgggatgctctgaaaacttaaaactcctgcaaactataatttggtcggccaaaagagaacacagaccactgggtgttgtattcgtggacatcgccaaggcttttgacaccgtaagccaccagcacatcattcatgctttgcagcaaagagaggtggatccccacatcgtcggtctggtgagcaatatgtacgagggcatcagtacgtatatcaccacaaagaggaacacacacacagacaaaatccagatccgggttggagtaaagcagggtgacccgatgtcgccccttttatttaacctggcaatggaccctctattatgcaagctggaagagagtggcaaaggataccaccgaggacagagcagcatcacagcgatggcatttgcagacgatctggttttgctgagcgactcctgggaaaatatgaatacaaatattagcatactggagaccttctgcaatctgaccggactcaaaacacaggggcaaaagtgccacggcttttacatcaagccgacaaaggactcttacaccatcaatgactgcgctgcctggactatcaacggcacacccctgaacatgatcgaccccggcgaatctgagaaatacctcggcctgcagtttgacccgtggattggaatagcaaggtccggtctctccacaaaactagatttttggcttcagcggatcgatcaagcaccacttaaacctctgcagaaaactgatattctcaaaacatacaccatccctcggctgatctacatagctgaccactcagaagtgaaaagcgcactactcgaaacccttgaccagaagatccggacagcggtcaaggaatggcttcacctacctccgtgcacctgcgatgccatcctgtactcgagcacgagagacggcggtttgggcatcaccaaattggcaggactgatccccagcgtgcaggcccgtagactgcatcggatcgcacagtcatctgacgatacgatgaaatgcttcatggaaaaagagaaaatggaacagctgcataagaaattgtggattcaagctggaggggacagagagaacataccctcgatttgggaagcaccaccgtcgagtgaaccaccaaacaacgtgagcacaaattcggaatgggaagcaccgacccagaaagataaatttccaaagccttgcaattggaggaaaaacgaattcaaaaaatggaccaaattggcatcccaaggccgcggaattgtaaattttgaaagagacaaaattagtaaccattggatccaatactacagacgcatacctcacaggaaactcctcactgcactacaactcagggccaacgtttaccccacgagagaatttctagccaggggtagacaagaccaatacatcaaggcgtgtaggcactgcgatgcggacaacgaatcctgcgcccacatcatcggcaactgcccagtgacacaggacgcccgaatcaagaggcacaattacatctgcgaactgcttctcgaggaggcgaagaagaaggactgggtagtgttcaaggaaccgcacataagggattccaacaaggaactgtacaaacctgacctgatatttgtgaaggatgggcgtgcacttgtcgtggatgtgacagtacggtatgaagcagccaaatcatcgctggaggaagccgctgcagagaaagtgagaaagtacaaacacctggaaacggaagtaagacatctcacgaatgcaaaggacgttacttttgtgggctttcccctaggagcgcgggggaaatggcaccaagataactttaaacttttgactgagcttggcctctccaaatcgaggcaagtgaaaatggcagagactttttccacagtagcgctcttttcatctgtggacattgtacatatgtttgccagtagggccagaaaatctatggttatgtgataataggctgccttctgcggggcttgccttctggccatgcccttcttctctcccttgcacctgtacctcttggtctttgaataaagcctgagtaggaaggaccggtaaaaaaaaaaaaaaaaaaaaaaaaaaaaaaacgttgactaaaaaaaaaaaaaaaaaaaaaaaaaaaaaaaaaaaaaaaaaaaaaaaaaaaaaaaaaaaaaaaaaaaaaa

SEQ ID NO: 11052 - DNA, 5264 bp, synthetic construct
  source 1..5264: mol_type = other DNA
gaaataagagagaaaagaagagtaagaagaaatataagagaattcgccaccatggcccctaagaaaaagcggaaggtgaatatcagcggctctagctgcggcagccccaacagcgccgacaccagcagcgacttcaaggacctgtggaccaagctgaaggaatgccacgaccgggaagtgcagggactccaggtgaaggtcaccaaactcaagcaagaaagaatcctggacgcccagagactggaagaattcttcaccaagaaccagcagctgagagagcagcagaaagtgctgcacgagacaatcaaggttctggaagatagactgcgggccggcctgtgcgacagatgcgccgtgaccgaggaacacatgcgcaaaaagcagcaggagttcgagaacattagacagcaaaatctgaaattgatcacagagctgatgaacgagagaaacacactgcaggaggagaacaagaagctgagcgagcagctgcaacagaagatcgagaatgatcagcaacaccaggccgctgagctggaatgtgaagaggacgtgatccccgacagcccaatcacagctttcagcttttctggcgtgaacagactgaggcggaaggaaaacccccacgtgcggtacatcgagcagacccataccaagctggaacacagcgtgtgtgccaacgagatgagaaaggtgtccaagtcctccacccatccccagcacaaccctaacgaaaatgagatcctggtggctgatacctacgaccagtctcagagccctatggccaaggcccacggcaccagctcttatacccctgataagagctccttcaacctggccaccgtggtggccgagacactgggcctgggcgtgcaggaggaaagcgagacacagggcccaatgagccctctgggagatgagctgtaccactgcctggaaggcaaccacaagaaacagccttttgagtccggctccgagactcctggaacaagcgagagcgctacacctgagggcagccctaagagaaaggtgtccagcgccgagggcgctgccaaggaagagcctaaacggagaagcgccagactgagcgccaagccccccgccaaggtggaagccaagcctaagaaggccgccgctaaggacaagagcagcgataagaaagtccagaccaagggcaagcggggcgccaaaggcaaacaggccgaggtggccaaccaggagacaaaggaagatctgcctgctgagaacggcgaaaccaagaccgaggaatctccagcttctgacgaggccggagagaaggaggccaaaagcgacagcggctctgagacacctggaacaagcgagagcgccaccccggaatcctatgaacaacttgcaccacaaccgtgtgtgggagaaactttacattctagcctcccacgagacagtgaactgtttgtgcctgaagaggggagcagcgagaaggagagcgaggacgcgccaaaaacatctcctccgacgcctgggaaacatggtttggaacagactggggaggaaaaagtgatggtgactgttcctgacaaaaatccaccttgtccttgctgtggtacccgggtaaactctgtgttgaatctgattgaacatctgaaagtgtcacacgggaaaaggggggtttgttttcggtgtgcaaaatgtggaaaggaaaatagtaactatcacagtgttgtttgtcattttaagaaatgcaggggtccagagacggagaaagccccagctggggagtggatttgtgaggtatgcaacagagattttacaaccaaaattggcctgggacaacacaagagattggcacacccagcagtgagaaatcaggaaaggatcgttgcttcccaaccgaaagaaacatcaaatagaggtgctcacaaaaggtgctggacaaaggaggaggaagaattactaataagactggaggctcagttcgagggaaacaaaaatattaataagcttattgcagaacacataaccaccaaaacagctaagcagatcagtgacaaaaggcgattgctgtccagaaagccagcagaggagccacgtgaggagcctggaacgtgtcatcacaccaggagagcagctgcgagcctgagaacggagcctgagatgagtcatcacgcccaggcagaggacagagataatggacctgggagacgccctctgccaggcagggcagctgccggagggagaacaatggacgagataagacgccaccctgataagggcaacggacagcagagacccaccaagcaaaaatcagaagaacagctgcaggcttactataaaaagacactagaggaacgactttcagctggggcacttaacaccttcccccgagcattcaagcaggtaatggaaggccgggatataaagctagtaatcaatcagacagcgcaggactgcttcggatgcctggaatccataagccaaataagaacggcaacccgagataaaaaggacacggtgacccgggagaaacacccaaagaaaccttttcagaagtggatgaagaagagagcaatcaaaaaaggtaattatcttcggttccagcgtttattttatcttgatagagggaaactggctaaaatcattttagatgatattgaatgcttgtcttgtgacataccactcagtgaaatttattcggtttttaaaacaagatgggaaacaactggtagctttaaaagccttggggactttaaaacttacgggaaggctgacaacactgccttcagagaattaattacggctaaagaaattgagaaaaatgtgcaggaaatgagcaaaggctcggctcccggtccagacgggattactcttggggacgtcgtaaagatggatcccgagttttcccggaccatggagattttcaatttatggttaacaactggtaaaatcccggacatggtgagggggtgcagaaccgttttgattccaaaatcatcaaagccggatcgtttgaaagacattaataactggagacctatcacgatcggttccatcttgctgagactgttctccaggattgtaacagctaggctgagcaaagcgtgccccctgaacccaaggcaaagaggctttatcagagcggcgggatgctctgaaaacttaaaactcctgcaaactataatttggtcggccaaaagagaacacagaccactgggtgttgtattcgtggacatcgccaaggcttttgacaccgtaagccaccagcacatcattcatgctttgcagcaaagagaggtggatccccacatcgtcggtctggtgagcaatatgtacgagaacatcagtacgtatatcaccacaaagaggaacacacacacagacaaaatccagatccgggttggagtaaagcagggtgacccgatgtcgccccttttatttaacctggcaatggaccctctattatgcaagctggaagagagtggcaaaggataccaccgaggacagagcagcatcacagcgatggcatttgcagacgatctgaccttgctgagcgactcctgggaaaatatgaatacaaatattagcatactggagaccttctgcaatctgaccggactcaaaacacaggggcaaaagtgccacggcttttacatcaagccgacaaaggactcttacaccatcaatgactgcgctgcctggactatcaacggcacacccctgaacatgatcgaccccggcgaatctgagaaatacctcggcctgcagtttgacccgtggattggaatagcaaggtccggtctctccacaaaactagatttttggcttcagcggatcgatcaagcaccacttaaacctctgcagaaaactgatattctcaaaacatacaccatccctcggctgatctacatagctgaccactcagaagtgaaaagcgcactactcgaaacccttgaccagaagatccggacagcggtcaaggaatggcttcacctacctccgtgcacctgcgatgccatcctgtactcgagcacgagagacggcggtttgggcatcaccaaattggcaggactgatccccagcgtgcaggcccgtagactgcatcggatcgcacagtcatctgacgatacgatgaaatgcttcatggaaaaagagaaaatggaacagctgcataagaaattgtggattcaagctggaggggacagagagaacataccctcgatttgggaagcaccaccgtcgagtgaaccaccaaacaacgtgagcacaaattcggaatgggaagcaccgacccagaaagataaatttccaaagccttgcaattggaggaaaaacgaattcaaaaaatggaccaaattggcatcccaaggccgcggaattgtaaattttgaaagagacaaaattagtaaccattggatccaatactacagacgcatacctcacaggaaactcctcactgcactacaactcagggccaacgtttaccccacgagagaatttctagccaggggtagacaagaccaatacatcaaggcgtgtaggcactgcgatgcggacaacgaatcctgcgcccacatcatcggcaactgcccagtgacacaggacgcccgaatcaagaggcacaattacatctgcgaactgcttctcgaggaggcgaagaagaaggactgggtagtgttcaaggaaccgcacataagggattccaacaaggaactgtacaaacctgacctgatatttgtgaaggatgggcgtgcacttgtcgtggatgtgacagtacggtatgaagcagccaaatcatcgctggaggaagccgctgcagagaaagtgagaaagtacaaacacctggaaacggaagtaagacatctcacgaatgcaaaggacgttacttttgtgggctttcccctaggagcgcgggggaaatggcaccaagataactttaaacttttgactgagcttggcctctccaaatcgaggcaagtgaaaatggcagagactttttccacagtagcgctcttttcatctgtggacattgtacatatgtttgccagtagggccagaaaatctatggttatgtgataataggctgccttctgcggggcttgccttctggccatgcccttcttctctcccttgcacctgtacctcttggtctttgaataaagcctgagtaggaaggaccggtaaaaaaaaaaaaaaaaaaaaaaaaaaaaaaacgttgactaaaaaaaaaaaaaaaaaaaaaaaaaaaaaaaaaaaaaaaaaaaaaaaaaaaaaaaaaaaaaaaaaaaaaa

SEQ ID NO: 11053 - DNA, 5264 bp, synthetic construct
  source 1..5264: mol_type = other DNA
gaaataagagagaaaagaagagtaagaagaaatataagagaattcgccaccatggcccctaagaaaaagcggaaggtgaatatcagcggctctagctgcggcagccccaacagcgccgacaccagcagcgacttcaaggacctgtggaccaagctgaaggaatgccacgaccgggaagtgcagggactccaggtgaaggtcaccaaactcaagcaagaaagaatcctggacgcccagagactggaagaattcttcaccaagaaccagcagctgagagagcagcagaaagtgctgcacgagacaatcaaggttctggaagatagactgcgggccggcctgtgcgacagatgcgccgtgaccgaggaacacatgcgcaaaaagcagcaggagttcgagaacattagacagcaaaatctgaaattgatcacagagctgatgaacgagagaaacacactgcaggaggagaacaagaagctgagcgagcagctgcaacagaagatcgagaatgatcagcaacaccaggccgctgagctggaatgtgaagaggacgtgatccccgacagcccaatcacagctttcagcttttctggcgtgaacagactgaggcggaaggaaaacccccacgtgcggtacatcgagcagacccataccaagctggaacacagcgtgtgtgccaacgagatgagaaaggtgtccaagtcctccacccatccccagcacaaccctaacgaaaatgagatcctggtggctgatacctacgaccagtctcagagccctatggccaaggcccacggcaccagctcttatacccctgataagagctccttcaacctggccaccgtggtggccgagacactgggcctgggcgtgcaggaggaaagcgagacacagggcccaatgagccctctgggagatgagctgtaccactgcctggaaggcaaccacaagaaacagccttttgagtccggctccgagactcctggaacaagcgagagcgctacacctgagggcagccctaagagaaaggtgtccagcgccgagggcgctgccaaggaagagcctaaacggagaagcgccagactgagcgccaagccccccgccaaggtggaagccaagcctaagaaggccgccgctaaggacaagagcagcgataagaaagtccagaccaagggcaagcggggcgccaaaggcaaacaggccgaggtggccaaccaggagacaaaggaagatctgcctgctgagaacggcgaaaccaagaccgaggaatctccagcttctgacgaggccggagagaaggaggccaaaagcgacagcggctctgagacacctggaacaagcgagagcgccaccccggaatcctatgaacaacttgcaccacaaccgtgtgtgggagaaactttacattctagcctcccacgagacagtgaactgtttgtgcctgaagaggggagcagcgagaaggagagcgaggacgcgccaaaaacatctcctccgacgcctgggaaacatggtttggaacagactggggaggaaaaagtgatggtgactgttcctgacaaaaatccaccttgtccttgctgtggtacccgggtaaactctgtgttgaatctgattgaacatctgaaagtgtcacacgggaaaaggggggtttgttttcggtgtgcaaaatgtggaaaggaaaatagtaactatcacagtgttgtttgtcattttaagaaatgcaggggtccagagacggagaaagccccagctggggagtggatttgtgaggtatgcaacagagattttacaaccaaaattggcctgggacaacacaagagattggcacacccagcagtgagaaatcaggaaaggatcgttgcttcccaaccgaaagaaacatcaaatagaggtgctcacaaaaggtgctggacaaaggaggaggaagaattactaataagactggaggctcagttcgagggaaacaaaaatattaataagcttattgcagaacacataaccaccaaaacagctaagcagatcagtgacaaaaggcgattgctgtccagaaagccagcagaggagccacgtgaggagcctggaacgtgtcatcacaccaggagagcagctgcgagcctgagaacggagcctgagatgagtcatcacgcccaggcagaggacagagataatggacctgggagacgccctctgccaggcagggcagctgccggagggagaacaatggacgagataagacgccaccctgataagggcaacggacagcagagacccaccaagcaaaaatcagaagaacagctgcaggcttactataaaaagacactagaggaacgactttcagctggggcacttaacaccttcccccgagcattcaagcaggtaatggaaggccgggatataaagctagtaatcaatcagacagcgcaggactgcttcggatgcctggaatccataagccaaataagaacggcaacccgagataaaaaggacacggtgacccgggagaaacacccaaagaaaccttttcagaagtggatgaagaagagagcaatcaaaaaaggtaattatcttcggttccagcgtttattttatcttgatagagggaaactggctaaaatcattttagatgatattgaatgcttgtcttgtgacataccactcagtgaaatttattcggtttttaaaacaagatgggaaacaactggtagctttaaaagccttggggactttaaaacttacgggaaggctgacaacactgccttcagagaattaattacggctaaagaaattgagaaaaatgtgcaggaaatgagcaaaggctcggctcccggtccagacgggattactcttggggacgtcgtaaagatggatcccgagttttcccggaccatggagattttcaatttatggttaacaactggtaaaatcccggacatggtgagggggtgcagaaccgttttgattccaaaatcatcaaagccggatcgtttgaaagacattaataactggagacctatcacgatcggttccatcttgctgagactgttctccaggattgtaacagctaggctgagcaaagcgtgccccctgaacccaaggcaaagaggctttatcagagcggcgggatgctctgaaaacttaaaactcctgcaaactataatttggtcggccaaaagagaacacagaccactgggtgttgtattcgtggacatcgccaaggcttttgacaccgtaagccaccagcacatcattcatgctttgcagcaaagagaggtggatccccacatcgtcggtctggtgagcaatatgtacgagaacatcagtacgtatatcaccacaaagaggaacacacacacagacaaaatccagatccgggttggagtaaagcagggtgacccgatgtcgccccttttatttaacctggcaatggaccctctattatgcaagctggaagagagtggcaaaggataccaccgaggacagagcagcatcacagcgatggcatttgcagacgatctggttttgctgagcgactcctgggaaaatatgaatacaaatattagcatactggagaccttctgcaatctgaccggaatgaaaacacaggggcaaaagtgccacggcttttacatcaagccgacaaaggactcttacaccatcaatgactgcgctgcctggactatcaacggcacacccctgaacatgatcgaccccggcgaatctgagaaatacctcggcctgcagtttgacccgtggattggaatagcaaggtccggtctctccacaaaactagatttttggcttcagcggatcgatcaagcaccacttaaacctctgcagaaaactgatattctcaaaacatacaccatccctcggctgatctacatagctgaccactcagaagtgaaaagcgcactactcgaaacccttgaccagaagatccggacagcggtcaaggaatggcttcacctacctccgtgcacctgcgatgccatcctgtactcgagcacgagagacggcggtttgggcatcaccaaattggcaggactgatccccagcgtgcaggcccgtagactgcatcggatcgcacagtcatctgacgatacgatgaaatgcttcatggaaaaagagaaaatggaacagctgcataagaaattgtggattcaagctggaggggacagagagaacataccctcgatttgggaagcaccaccgtcgagtgaaccaccaaacaacgtgagcacaaattcggaatgggaagcaccgacccagaaagataaatttccaaagccttgcaattggaggaaaaacgaattcaaaaaatggaccaaattggcatcccaaggccgcggaattgtaaattttgaaagagacaaaattagtaaccattggatccaatactacagacgcatacctcacaggaaactcctcactgcactacaactcagggccaacgtttaccccacgagagaatttctagccaggggtagacaagaccaatacatcaaggcgtgtaggcactgcgatgcggacaacgaatcctgcgcccacatcatcggcaactgcccagtgacacaggacgcccgaatcaagaggcacaattacatctgcgaactgcttctcgaggaggcgaagaagaaggactgggtagtgttcaaggaaccgcacataagggattccaacaaggaactgtacaaacctgacctgatatttgtgaaggatgggcgtgcacttgtcgtggatgtgacagtacggtatgaagcagccaaatcatcgctggaggaagccgctgcagagaaagtgagaaagtacaaacacctggaaacggaagtaagacatctcacgaatgcaaaggacgttacttttgtgggctttcccctaggagcgcgggggaaatggcaccaagataactttaaacttttgactgagcttggcctctccaaatcgaggcaagtgaaaatggcagagactttttccacagtagcgctcttttcatctgtggacattgtacatatgtttgccagtagggccagaaaatctatggttatgtgataataggctgccttctgcggggcttgccttctggccatgcccttcttctctcccttgcacctgtacctcttggtctttgaataaagcctgagtaggaaggaccggtaaaaaaaaaaaaaaaaaaaaaaaaaaaaaaacgttgactaaaaaaaaaaaaaaaaaaaaaaaaaaaaaaaaaaaaaaaaaaaaaaaaaaaaaaaaaaaaaaaaaaaaaa

SEQ ID NO: 11054 - DNA, 5264 bp, synthetic construct
  source 1..5264: mol_type = other DNA
gaaataagagagaaaagaagagtaagaagaaatataagagaattcgccaccatggcccctaagaaaaagcggaaggtgaatatcagcggctctagctgcggcagccccaacagcgccgacaccagcagcgacttcaaggacctgtggaccaagctgaaggaatgccacgaccgggaagtgcagggactccaggtgaaggtcaccaaactcaagcaagaaagaatcctggacgcccagagactggaagaattcttcaccaagaaccagcagctgagagagcagcagaaagtgctgcacgagacaatcaaggttctggaagatagactgcgggccggcctgtgcgacagatgcgccgtgaccgaggaacacatgcgcaaaaagcagcaggagttcgagaacattagacagcaaaatctgaaattgatcacagagctgatgaacgagagaaacacactgcaggaggagaacaagaagctgagcgagcagctgcaacagaagatcgagaatgatcagcaacaccaggccgctgagctggaatgtgaagaggacgtgatccccgacagcccaatcacagctttcagcttttctggcgtgaacagactgaggcggaaggaaaacccccacgtgcggtacatcgagcagacccataccaagctggaacacagcgtgtgtgccaacgagatgagaaaggtgtccaagtcctccacccatccccagcacaaccctaacgaaaatgagatcctggtggctgatacctacgaccagtctcagagccctatggccaaggcccacggcaccagctcttatacccctgataagagctccttcaacctggccaccgtggtggccgagacactgggcctgggcgtgcaggaggaaagcgagacacagggcccaatgagccctctgggagatgagctgtaccactgcctggaaggcaaccacaagaaacagccttttgagtccggctccgagactcctggaacaagcgagagcgctacacctgagggcagccctaagagaaaggtgtccagcgccgagggcgctgccaaggaagagcctaaacggagaagcgccagactgagcgccaagccccccgccaaggtggaagccaagcctaagaaggccgccgctaaggacaagagcagcgataagaaagtccagaccaagggcaagcggggcgccaaaggcaaacaggccgaggtggccaaccaggagacaaaggaagatctgcctgctgagaacggcgaaaccaagaccgaggaatctccagcttctgacgaggccggagagaaggaggccaaaagcgacagcggctctgagacacctggaacaagcgagagcgccaccccggaatcctatgaacaacttgcaccacaaccgtgtgtgggagaaactttacattctagcctcccacgagacagtgaactgtttgtgcctgaagaggggagcagcgagaaggagagcgaggacgcgccaaaaacatctcctccgacgcctgggaaacatggtttggaacagactggggaggaaaaagtgatggtgactgttcctgacaaaaatccaccttgtccttgctgtggtacccgggtaaactctgtgttgaatctgattgaacatctgaaagtgtcacacgggaaaaggggggtttgttttcggtgtgcaaaatgtggaaaggaaaatagtaactatcacagtgttgtttgtcattttaagaaatgcaggggtccagagacggagaaagccccagctggggagtggatttgtgaggtatgcaacagagattttacaaccaaaattggcctgggacaacacaagagattggcacacccagcagtgagaaatcaggaaaggatcgttgcttcccaaccgaaagaaacatcaaatagaggtgctcacaaaaggtgctggacaaaggaggaggaagaattactaataagactggaggctcagttcgagggaaacaaaaatattaataagcttattgcagaacacataaccaccaaaacagctaagcagatcagtgacaaaaggcgattgctgtccagaaagccagcagaggagccacgtgaggagcctggaacgtgtcatcacaccaggagagcagctgcgagcctgagaacggagcctgagatgagtcatcacgcccaggcagaggacagagataatggacctgggagacgccctctgccaggcagggcagctgccggagggagaacaatggacgagataagacgccaccctgataagggcaacggacagcagagacccaccaagcaaaaatcagaagaacagctgcaggcttactataaaaagacactagaggaacgactttcagctggggcacttaacaccttcccccgagcattcaagcaggtaatggaaggccgggatataaagctagtaatcaatcagacagcgcaggactgcttcggatgcctggaatccataagccaaataagaacggcaacccgagataaaaaggacacggtgacccgggagaaacacccaaagaaaccttttcagaagtggatgaagaagagagcaatcaaaaaaggtaattatcttcggttccagcgtttattttatcttgatagagggaaactggctaaaatcattttagatgatattgaatgcttgtcttgtgacataccactcagtgaaatttattcggtttttaaaacaagatgggaaacaactggtagctttaaaagccttggggactttaaaacttacgggaaggctgacaacactgccttcagagaattaattacggctaaagaaattgagaaaaatgtgcaggaaatgagcaaaggcaaggctcccggtccagacgggattactcttggggacgtcgtaaagatggatcccgagttttcccggaccatggagattttcaatttatggttaacaactggtaaaatcccggacatggtgagggggtgcagaaccgttttgattccaaaatcatcaaagccggatcgtttgaaagacattaataactggagacctatcacgatcggttccatcttgctgagactgttctccaggattgtaacagctaggctgagcaaagcgtgccccctgaacccaaggcaaagaggctttatcagagcggcgggatgctctgaaaacttaaaactcctgcaaactataatttggtcggccaaaagagaacacagaccactgggtgttgtattcgtggacatcgccaaggcttttgacaccgtaagccaccagcacatcattcatgctttgcagcaaagagaggtggatccccacatcgtcggtctggtgagcaatatgtacgagaacatcagtacgtatatcaccacaaagaggaacacacacacagacaaaatccagatccgggttggagtaaagcagggtgacccgatgtcgccccttttatttaacctggcaatggaccctctattatgcaagctggaagagagtggcaaaggataccaccgaggacagagcagcatcacagcgatggcatttgcagacgatctggttttgctgagcgactcctgggaaaatatgaatacaaatattagcatactggagaccttctgcaatctgaccggactcaaaacacaggggcaaaagtgccacggcttttacatcaagccgacaaaggactcttacaccatcaatgactgcgctgcctggactatcaacggcacacccctgaacatgatcgaccccggcgaatctgagaaatacctcggcctgcagtttgacccgtggattggaatagcaaggtccggtctctccacaaaactagatttttggcttcagcggatcgatcaagcaccacttaaacctctgcagaaaactgatattctcaaaacatacaccatccctcggctgatctacatagctgaccactcagaagtgaaaagcgcactactcgaaacccttgaccagaagatccggacagcggtcaaggaatggcttcacctacctccgtgcacctgcgatgccatcctgtactcgagcacgagagacggcggtttgggcatcaccaaattggcaggactgatccccagcgtgcaggcccgtagactgcatcggatcgcacagtcatctgacgatacgatgaaatgcttcatggaaaaagagaaaatggaacagctgcataagaaattgtggattcaagctggaggggacagagagaacataccctcgatttgggaagcaccaccgtcgagtgaaccaccaaacaacgtgagcacaaattcggaatgggaagcaccgacccagaaagataaatttccaaagccttgcaattggaggaaaaacgaattcaaaaaatggaccaaattggcatcccaaggccgcggaattgtaaattttgaaagagacaaaattagtaaccattggatccaatactacagacgcatacctcacaggaaactcctcactgcactacaactcagggccaacgtttaccccacgagagaatttctagccaggggtagacaagaccaatacatcaaggcgtgtaggcactgcgatgcggacaacgaatcctgcgcccacatcatcggcaactgcccagtgacacaggacgcccgaatcaagaggcacaattacatctgcgaactgcttctcgaggaggcgaagaagaaggactgggtagtgttcaaggaaccgcacataagggattccaacaaggaactgtacaaacctgacctgatatttgtgaaggatgggcgtgcacttgtcgtggatgtgacagtacggtatgaagcagccaaatcatcgctggaggaagccgctgcagagaaagtgagaaagtacaaacacctggaaacggaagtaagacatctcacgaatgcaaaggacgttacttttgtgggctttcccctaggagcgcgggggaaatggcaccaagataactttaaacttttgactgagcttggcctctccaaatcgaggcaagtgaaaatggcagagactttttccacagtagcgctcttttcatctgtggacattgtacatatgtttgccagtagggccagaaaatctatggttatgtgataataggctgccttctgcggggcttgccttctggccatgcccttcttctctcccttgcacctgtacctcttggtctttgaataaagcctgagtaggaaggaccggtaaaaaaaaaaaaaaaaaaaaaaaaaaaaaaacgttgactaaaaaaaaaaaaaaaaaaaaaaaaaaaaaaaaaaaaaaaaaaaaaaaaaaaaaaaaaaaaaaaaaaaaaa

SEQ ID NO: 11055 - DNA, 5264 bp, synthetic construct
  source 1..5264: mol_type = other DNA
gaaataagagagaaaagaagagtaagaagaaatataagagaattcgccaccatggcccctaagaaaaagcggaaggtgaatatcagcggctctagctgcggcagccccaacagcgccgacaccagcagcgacttcaaggacctgtggaccaagctgaaggaatgccacgaccgggaagtgcagggactccaggtgaaggtcaccaaactcaagcaagaaagaatcctggacgcccagagactggaagaattcttcaccaagaaccagcagctgagagagcagcagaaagtgctgcacgagacaatcaaggttctggaagatagactgcgggccggcctgtgcgacagatgcgccgtgaccgaggaacacatgcgcaaaaagcagcaggagttcgagaacattagacagcaaaatctgaaattgatcacagagctgatgaacgagagaaacacactgcaggaggagaacaagaagctgagcgagcagctgcaacagaagatcgagaatgatcagcaacaccaggccgctgagctggaatgtgaagaggacgtgatccccgacagcccaatcacagctttcagcttttctggcgtgaacagactgaggcggaaggaaaacccccacgtgcggtacatcgagcagacccataccaagctggaacacagcgtgtgtgccaacgagatgagaaaggtgtccaagtcctccacccatccccagcacaaccctaacgaaaatgagatcctggtggctgatacctacgaccagtctcagagccctatggccaaggcccacggcaccagctcttatacccctgataagagctccttcaacctggccaccgtggtggccgagacactgggcctgggcgtgcaggaggaaagcgagacacagggcccaatgagccctctgggagatgagctgtaccactgcctggaaggcaaccacaagaaacagccttttgagtccggctccgagactcctggaacaagcgagagcgctacacctgagggcagccctaagagaaaggtgtccagcgccgagggcgctgccaaggaagagcctaaacggagaagcgccagactgagcgccaagccccccgccaaggtggaagccaagcctaagaaggccgccgctaaggacaagagcagcgataagaaagtccagaccaagggcaagcggggcgccaaaggcaaacaggccgaggtggccaaccaggagacaaaggaagatctgcctgctgagaacggcgaaaccaagaccgaggaatctccagcttctgacgaggccggagagaaggaggccaaaagcgacagcggctctgagacacctggaacaagcgagagcgccaccccggaatcctatgaacaacttgcaccacaaccgtgtgtgggagaaactttacattctagcctcccacgagacagtgaactgtttgtgcctgaagaggggagcagcgagaaggagagcgaggacgcgccaaaaacatctcctccgacgcctgggaaacatggtttggaacagactggggaggaaaaagtgatggtgactgttcctgacaaaaatccaccttgtccttgctgtggtacccgggtaaactctgtgttgaatctgattgaacatctgaaagtgtcacacgggaaaaggggggtttgttttcggtgtgcaaaatgtggaaaggaaaatagtaactatcacagtgttgtttgtcattttaagaaatgcaggggtccagagacggagaaagccccagctggggagtggatttgtgaggtatgcaacagagattttacaaccaaaattggcctgggacaacacaagagattggcacacccagcagtgagaaatcaggaaaggatcgttgcttcccaaccgaaagaaacatcaaatagaggtgctcacaaaaggtgctggacaaaggaggaggaagaattactaataagactggaggctcagttcgagggaaacaaaaatattaataagcttattgcagaacacataaccaccaaaacagctaagcagatcagtgacaaaaggcgattgctgtccagaaagccagcagaggagccacgtgaggagcctggaacgtgtcatcacaccaggagagcagctgcgagcctgagaacggagcctgagatgagtcatcacgcccaggcagaggacagagataatggacctgggagacgccctctgccaggcagggcagctgccggagggagaacaatggacgagataagacgccaccctgataagggcaacggacagcagagacccaccaagcaaaaatcagaagaacagctgcaggcttactataaaaagacactagaggaacgactttcagctggggcacttaacaccttcccccgagcattcaagcaggtaatggaaggccgggatataaagctagtaatcaatcagacagcgcaggactgcttcggatgcctggaatccataagccaaataagaacggcaacccgagataaaaaggacacggtgacccgggagaaacacccaaagaaaccttttcagaagtggatgaagaagagagcaatcaaaaaaggtaattatcttcggttccagcgtttattttatcttgatagagggaaactggctaaaatcattttagatgatattgaatgcttgtcttgtgacataccactcagtgaaatttattcggtttttaaaacaagatgggaaacaactggtagctttaaaagccttggggactttaaaacttacgggaaggctgacaacactgccttcagagaattaattacggctaaagaaattgagaaaaatgtgcaggaaatgagcaaaggctcggctcccggtccagacgggattactcttggggacgtcgtaaagatggatcccgagttttcccggaccatggagattttcaatttatggttaacaactggtaaaatcccggacatggtgagggggtgcagaaccgttttgattccaaaatcaaaaaagccggatcgtttgaaagacattaataactggagacctatcacgatcggttccatcttgctgagactgttctccaggattgtaacagctaggctgagcaaagcgtgccccctgaacccaaggcaaagaggctttatcagagcggcgggatgctctgaaaacttaaaactcctgcaaactataatttggtcggccaaaagagaacacagaccactgggtgttgtattcgtggacatcgccaaggcttttgacaccgtaagccaccagcacatcattcatgctttgcagcaaagagaggtggatccccacatcgtcggtctggtgagcaatatgtacgagaacatcagtacgtatatcaccacaaagaggaacacacacacagacaaaatccagatccgggttggagtaaagcagggtgacccgatgtcgccccttttatttaacctggcaatggaccctctattatgcaagctggaagagagtggcaaaggataccaccgaggacagagcagcatcacagcgatggcatttgcagacgatctggttttgctgagcgactcctgggaaaatatgaatacaaatattagcatactggagaccttctgcaatctgaccggactcaaaacacaggggcaaaagtgccacggcttttacatcaagccgacaaaggactcttacaccatcaatgactgcgctgcctggactatcaacggcacacccctgaacatgatcgaccccggcgaatctgagaaatacctcggcctgcagtttgacccgtggattggaatagcaaggtccggtctctccacaaaactagatttttggcttcagcggatcgatcaagcaccacttaaacctctgcagaaaactgatattctcaaaacatacaccatccctcggctgatctacatagctgaccactcagaagtgaaaagcgcactactcgaaacccttgaccagaagatccggacagcggtcaaggaatggcttcacctacctccgtgcacctgcgatgccatcctgtactcgagcacgagagacggcggtttgggcatcaccaaattggcaggactgatccccagcgtgcaggcccgtagactgcatcggatcgcacagtcatctgacgatacgatgaaatgcttcatggaaaaagagaaaatggaacagctgcataagaaattgtggattcaagctggaggggacagagagaacataccctcgatttgggaagcaccaccgtcgagtgaaccaccaaacaacgtgagcacaaattcggaatgggaagcaccgacccagaaagataaatttccaaagccttgcaattggaggaaaaacgaattcaaaaaatggaccaaattggcatcccaaggccgcggaattgtaaattttgaaagagacaaaattagtaaccattggatccaatactacagacgcatacctcacaggaaactcctcactgcactacaactcagggccaacgtttaccccacgagagaatttctagccaggggtagacaagaccaatacatcaaggcgtgtaggcactgcgatgcggacaacgaatcctgcgcccacatcatcggcaactgcccagtgacacaggacgcccgaatcaagaggcacaattacatctgcgaactgcttctcgaggaggcgaagaagaaggactgggtagtgttcaaggaaccgcacataagggattccaacaaggaactgtacaaacctgacctgatatttgtgaaggatgggcgtgcacttgtcgtggatgtgacagtacggtatgaagcagccaaatcatcgctggaggaagccgctgcagagaaagtgagaaagtacaaacacctggaaacggaagtaagacatctcacgaatgcaaaggacgttacttttgtgggctttcccctaggagcgcgggggaaatggcaccaagataactttaaacttttgactgagcttggcctctccaaatcgaggcaagtgaaaatggcagagactttttccacagtagcgctcttttcatctgtggacattgtacatatgtttgccagtagggccagaaaatctatggttatgtgataataggctgccttctgcggggcttgccttctggccatgcccttcttctctcccttgcacctgtacctcttggtctttgaataaagcctgagtaggaaggaccggtaaaaaaaaaaaaaaaaaaaaaaaaaaaaaaacgttgactaaaaaaaaaaaaaaaaaaaaaaaaaaaaaaaaaaaaaaaaaaaaaaaaaaaaaaaaaaaaaaaaaaaaaa

SEQ ID NO: 11056 - DNA, 5264 bp, synthetic construct
  source 1..5264: mol_type = other DNA
gaaataagagagaaaagaagagtaagaagaaatataagagaattcgccaccatggcccctaagaaaaagcggaaggtgaatatcagcggctctagctgcggcagccccaacagcgccgacaccagcagcgacttcaaggacctgtggaccaagctgaaggaatgccacgaccgggaagtgcagggactccaggtgaaggtcaccaaactcaagcaagaaagaatcctggacgcccagagactggaagaattcttcaccaagaaccagcagctgagagagcagcagaaagtgctgcacgagacaatcaaggttctggaagatagactgcgggccggcctgtgcgacagatgcgccgtgaccgaggaacacatgcgcaaaaagcagcaggagttcgagaacattagacagcaaaatctgaaattgatcacagagctgatgaacgagagaaacacactgcaggaggagaacaagaagctgagcgagcagctgcaacagaagatcgagaatgatcagcaacaccaggccgctgagctggaatgtgaagaggacgtgatccccgacagcccaatcacagctttcagcttttctggcgtgaacagactgaggcggaaggaaaacccccacgtgcggtacatcgagcagacccataccaagctggaacacagcgtgtgtgccaacgagatgagaaaggtgtccaagtcctccacccatccccagcacaaccctaacgaaaatgagatcctggtggctgatacctacgaccagtctcagagccctatggccaaggcccacggcaccagctcttatacccctgataagagctccttcaacctggccaccgtggtggccgagacactgggcctgggcgtgcaggaggaaagcgagacacagggcccaatgagccctctgggagatgagctgtaccactgcctggaaggcaaccacaagaaacagccttttgagtccggctccgagactcctggaacaagcgagagcgctacacctgagggcagccctaagagaaaggtgtccagcgccgagggcgctgccaaggaagagcctaaacggagaagcgccagactgagcgccaagccccccgccaaggtggaagccaagcctaagaaggccgccgctaaggacaagagcagcgataagaaagtccagaccaagggcaagcggggcgccaaaggcaaacaggccgaggtggccaaccaggagacaaaggaagatctgcctgctgagaacggcgaaaccaagaccgaggaatctccagcttctgacgaggccggagagaaggaggccaaaagcgacagcggctctgagacacctggaacaagcgagagcgccaccccggaatcctatgaacaacttgcaccacaaccgtgtgtgggagaaactttacattctagcctcccacgagacagtgaactgtttgtgcctgaagaggggagcagcgagaaggagagcgaggacgcgccaaaaacatctcctccgacgcctgggaaacatggtttggaacagactggggaggaaaaagtgatggtgactgttcctgacaaaaatccaccttgtccttgctgtggtacccgggtaaactctgtgttgaatctgattgaacatctgaaagtgtcacacgggaaaaggggggtttgttttcggtgtgcaaaatgtggaaaggaaaatagtaactatcacagtgttgtttgtcattttaagaaatgcaggggtccagagacggagaaagccccagctggggagtggatttgtgaggtatgcaacagagattttacaaccaaaattggcctgggacaacacaagagattggcacacccagcagtgagaaatcaggaaaggatcgttgcttcccaaccgaaagaaacatcaaatagaggtgctcacaaaaggtgctggacaaaggaggaggaagaattactaataagactggaggctcagttcgagggaaacaaaaatattaataagcttattgcagaacacataaccaccaaaacagctaagcagatcagtgacaaaaggcgattgctgtccagaaagccagcagaggagccacgtgaggagcctggaacgtgtcatcacaccaggagagcagctgcgagcctgagaacggagcctgagatgagtcatcacgcccaggcagaggacagagataatggacctgggagacgccctctgccaggcagggcagctgccggagggagaacaatggacgagataagacgccaccctgataagggcaacggacagcagagacccaccaagcaaaaatcagaagaacagctgcaggcttactataaaaagacactagaggaacgactttcagctggggcacttaacaccttcccccgagcattcaagcaggtaatggaaggccgggatataaagctagtaatcaatcagacagcgcaggactgcttcggatgcctggaatccataagccaaataagaacggcaacccgagataaaaaggacacggtgacccgggagaaacacccaaagaaaccttttcagaagtggatgaagaagagagcaatcaaaaaaggtaattatcttcggttccagcgtttattttatcttgatagagggaaactggctaaaatcattttagatgatattgaatgcttgtcttgtgacataccactcagtgaaatttattcggtttttaaaacaagatgggaaacaactggtagctttaaaagccttggggactttaaaacttacgggaaggctgacaacactgccttcagagaattaattacggctaaagaaattgagaaaaatgtgcaggaaatgagcaaaggctcggctcccggtccagacgggattactcttggggacgtcgtaaagatggatcccgagttttcccggaccatggagattttcaatttatggttaacaactggtaaaatcccggacatggtgagggggtgcagaaccgttttgattccaaaatcatcaaagccggatcgtttgaaagacattaataactggagacctatcacgatcggtcccatcttgctgagactgttctccaggattgtaacagctaggctgagcaaagcgtgccccctgaacccaaggcaaagaggctttatcagagcggcgggatgctctgaaaacttaaaactcctgcaaactataatttggtcggccaaaagagaacacagaccactgggtgttgtattcgtggacatcgccaaggcttttgacaccgtaagccaccagcacatcattcatgctttgcagcaaagagaggtggatccccacatcgtcggtctggtgagcaatatgtacgagaacatcagtacgtatatcaccacaaagaggaacacacacacagacaaaatccagatccgggttggagtaaagcagggtgacccgatgtcgccccttttatttaacctggcaatggaccctctattatgcaagctggaagagagtggcaaaggataccaccgaggacagagcagcatcacagcgatggcatttgcagacgatctggttttgctgagcgactcctgggaaaatatgaatacaaatattagcatactggagaccttctgcaatctgaccggactcaaaacacaggggcaaaagtgccacggcttttacatcaagccgacaaaggactcttacaccatcaatgactgcgctgcctggactatcaacggcacacccctgaacatgatcgaccccggcgaatctgagaaatacctcggcctgcagtttgacccgtggattggaatagcaaggtccggtctctccacaaaactagatttttggcttcagcggatcgatcaagcaccacttaaacctctgcagaaaactgatattctcaaaacatacaccatccctcggctgatctacatagctgaccactcagaagtgaaaagcgcactactcgaaacccttgaccagaagatccggacagcggtcaaggaatggcttcacctacctccgtgcacctgcgatgccatcctgtactcgagcacgagagacggcggtttgggcatcaccaaattggcaggactgatccccagcgtgcaggcccgtagactgcatcggatcgcacagtcatctgacgatacgatgaaatgcttcatggaaaaagagaaaatggaacagctgcataagaaattgtggattcaagctggaggggacagagagaacataccctcgatttgggaagcaccaccgtcgagtgaaccaccaaacaacgtgagcacaaattcggaatgggaagcaccgacccagaaagataaatttccaaagccttgcaattggaggaaaaacgaattcaaaaaatggaccaaattggcatcccaaggccgcggaattgtaaattttgaaagagacaaaattagtaaccattggatccaatactacagacgcatacctcacaggaaactcctcactgcactacaactcagggccaacgtttaccccacgagagaatttctagccaggggtagacaagaccaatacatcaaggcgtgtaggcactgcgatgcggacaacgaatcctgcgcccacatcatcggcaactgcccagtgacacaggacgcccgaatcaagaggcacaattacatctgcgaactgcttctcgaggaggcgaagaagaaggactgggtagtgttcaaggaaccgcacataagggattccaacaaggaactgtacaaacctgacctgatatttgtgaaggatgggcgtgcacttgtcgtggatgtgacagtacggtatgaagcagccaaatcatcgctggaggaagccgctgcagagaaagtgagaaagtacaaacacctggaaacggaagtaagacatctcacgaatgcaaaggacgttacttttgtgggctttcccctaggagcgcgggggaaatggcaccaagataactttaaacttttgactgagcttggcctctccaaatcgaggcaagtgaaaatggcagagactttttccacagtagcgctcttttcatctgtggacattgtacatatgtttgccagtagggccagaaaatctatggttatgtgataataggctgccttctgcggggcttgccttctggccatgcccttcttctctcccttgcacctgtacctcttggtctttgaataaagcctgagtaggaaggaccggtaaaaaaaaaaaaaaaaaaaaaaaaaaaaaaacgttgactaaaaaaaaaaaaaaaaaaaaaaaaaaaaaaaaaaaaaaaaaaaaaaaaaaaaaaaaaaaaaaaaaaaaaa

SEQ ID NO: 11057 - DNA, 5264 bp, synthetic construct
  source 1..5264: mol_type = other DNA
gaaataagagagaaaagaagagtaagaagaaatataagagaattcgccaccatggcccctaagaaaaagcggaaggtgaatatcagcggctctagctgcggcagccccaacagcgccgacaccagcagcgacttcaaggacctgtggaccaagctgaaggaatgccacgaccgggaagtgcagggactccaggtgaaggtcaccaaactcaagcaagaaagaatcctggacgcccagagactggaagaattcttcaccaagaaccagcagctgagagagcagcagaaagtgctgcacgagacaatcaaggttctggaagatagactgcgggccggcctgtgcgacagatgcgccgtgaccgaggaacacatgcgcaaaaagcagcaggagttcgagaacattagacagcaaaatctgaaattgatcacagagctgatgaacgagagaaacacactgcaggaggagaacaagaagctgagcgagcagctgcaacagaagatcgagaatgatcagcaacaccaggccgctgagctggaatgtgaagaggacgtgatccccgacagcccaatcacagctttcagcttttctggcgtgaacagactgaggcggaaggaaaacccccacgtgcggtacatcgagcagacccataccaagctggaacacagcgtgtgtgccaacgagatgagaaaggtgtccaagtcctccacccatccccagcacaaccctaacgaaaatgagatcctggtggctgatacctacgaccagtctcagagccctatggccaaggcccacggcaccagctcttatacccctgataagagctccttcaacctggccaccgtggtggccgagacactgggcctgggcgtgcaggaggaaagcgagacacagggcccaatgagccctctgggagatgagctgtaccactgcctggaaggcaaccacaagaaacagccttttgagtccggctccgagactcctggaacaagcgagagcgctacacctgagggcagccctaagagaaaggtgtccagcgccgagggcgctgccaaggaagagcctaaacggagaagcgccagactgagcgccaagccccccgccaaggtggaagccaagcctaagaaggccgccgctaaggacaagagcagcgataagaaagtccagaccaagggcaagcggggcgccaaaggcaaacaggccgaggtggccaaccaggagacaaaggaagatctgcctgctgagaacggcgaaaccaagaccgaggaatctccagcttctgacgaggccggagagaaggaggccaaaagcgacagcggctctgagacacctggaacaagcgagagcgccaccccggaatcctatgaacaacttgcaccacaaccgtgtgtgggagaaactttacattctagcctcccacgagacagtgaactgtttgtgcctgaagaggggagcagcgagaaggagagcgaggacgcgccaaaaacatctcctccgacgcctgggaaacatggtttggaacagactggggaggaaaaagtgatggtgactgttcctgacaaaaatccaccttgtccttgctgtggtacccgggtaaactctgtgttgaatctgattgaacatctgaaagtgtcacacgggaaaaggggggtttgttttcggtgtgcaaaatgtggaaaggaaaatagtaactatcacagtgttgtttgtcattttaagaaatgcaggggtccagagacggagaaagccccagctggggagtggatttgtgaggtatgcaacagagattttacaaccaaaattggcctgggacaacacaagagattggcacacccagcagtgagaaatcaggaaaggatcgttgcttcccaaccgaaagaaacatcaaatagaggtgctcacaaaaggtgctggacaaaggaggaggaagaattactaataagactggaggctcagttcgagggaaacaaaaatattaataagcttattgcagaacacataaccaccaaaacagctaagcagatcagtgacaaaaggcgattgctgtccagaaagccagcagaggagccacgtgaggagcctggaacgtgtcatcacaccaggagagcagctgcgagcctgagaacggagcctgagatgagtcatcacgcccaggcagaggacagagataatggacctgggagacgccctctgccaggcagggcagctgccggagggagaacaatggacgagataagacgccaccctgataagggcaacggacagcagagacccaccaagcaaaaatcagaagaacagctgcaggcttactataaaaagacactagaggaacgactttcagctggggcacttaacaccttcccccgagcattcaagcaggtaatggaaggccgggatataaagctagtaatcaatcagacagcgcaggactgcttcggatgcctggaatccataagccaaataagaacggcaacccgagataaaaaggacacggtgacccgggagaaacacccaaagaaaccttttcagaagtggatgaagaagagagcaatcaaaaaaggtaattatcttcggttccagcgtttattttatcttgatagagggaaactggctaaaatcattttagatgatattgaatgcttgtcttgtgacataccactcagtgaaatttattcggtttttaaaacaagatgggaaacaactggtagctttaaaagccttggggactttaaaacttacgggaaggctgacaacactgccttcagagaattaattacggctaaagaaattgagaaaaatgtgcaggaaatgagcaaaggctcggctcccggtccagacgggattactcttggggacgtcgtaaagatggatcccgagttttcccggaccatggagattttcaatttatggttaacaactggtaaaatcccggacatggtgagggggtgcagaaccgttttgattccaaaatcatcaaagccggatcgtttgaaagacattaataactggagacctatcacgatcggttccatcttgctgagactgttctccaggattgtaacagctaggctgagcaaagcgtgccccctgaacccaaggcaaagaggctttatcagagcgaggggatgctctgaaaacttaaaactcctgcaaactataatttggtcggccaaaagagaacacagaccactgggtgttgtattcgtggacatcgccaaggcttttgacaccgtaagccaccagcacatcattcatgctttgcagcaaagagaggtggatccccacatcgtcggtctggtgagcaatatgtacgagaacatcagtacgtatatcaccacaaagaggaacacacacacagacaaaatccagatccgggttggagtaaagcagggtgacccgatgtcgccccttttatttaacctggcaatggaccctctattatgcaagctggaagagagtggcaaaggataccaccgaggacagagcagcatcacagcgatggcatttgcagacgatctggttttgctgagcgactcctgggaaaatatgaatacaaatattagcatactggagaccttctgcaatctgaccggactcaaaacacaggggcaaaagtgccacggcttttacatcaagccgacaaaggactcttacaccatcaatgactgcgctgcctggactatcaacggcacacccctgaacatgatcgaccccggcgaatctgagaaatacctcggcctgcagtttgacccgtggattggaatagcaaggtccggtctctccacaaaactagatttttggcttcagcggatcgatcaagcaccacttaaacctctgcagaaaactgatattctcaaaacatacaccatccctcggctgatctacatagctgaccactcagaagtgaaaagcgcactactcgaaacccttgaccagaagatccggacagcggtcaaggaatggcttcacctacctccgtgcacctgcgatgccatcctgtactcgagcacgagagacggcggtttgggcatcaccaaattggcaggactgatccccagcgtgcaggcccgtagactgcatcggatcgcacagtcatctgacgatacgatgaaatgcttcatggaaaaagagaaaatggaacagctgcataagaaattgtggattcaagctggaggggacagagagaacataccctcgatttgggaagcaccaccgtcgagtgaaccaccaaacaacgtgagcacaaattcggaatgggaagcaccgacccagaaagataaatttccaaagccttgcaattggaggaaaaacgaattcaaaaaatggaccaaattggcatcccaaggccgcggaattgtaaattttgaaagagacaaaattagtaaccattggatccaatactacagacgcatacctcacaggaaactcctcactgcactacaactcagggccaacgtttaccccacgagagaatttctagccaggggtagacaagaccaatacatcaaggcgtgtaggcactgcgatgcggacaacgaatcctgcgcccacatcatcggcaactgcccagtgacacaggacgcccgaatcaagaggcacaattacatctgcgaactgcttctcgaggaggcgaagaagaaggactgggtagtgttcaaggaaccgcacataagggattccaacaaggaactgtacaaacctgacctgatatttgtgaaggatgggcgtgcacttgtcgtggatgtgacagtacggtatgaagcagccaaatcatcgctggaggaagccgctgcagagaaagtgagaaagtacaaacacctggaaacggaagtaagacatctcacgaatgcaaaggacgttacttttgtgggctttcccctaggagcgcgggggaaatggcaccaagataactttaaacttttgactgagcttggcctctccaaatcgaggcaagtgaaaatggcagagactttttccacagtagcgctcttttcatctgtggacattgtacatatgtttgccagtagggccagaaaatctatggttatgtgataataggctgccttctgcggggcttgccttctggccatgcccttcttctctcccttgcacctgtacctcttggtctttgaataaagcctgagtaggaaggaccggtaaaaaaaaaaaaaaaaaaaaaaaaaaaaaaacgttgactaaaaaaaaaaaaaaaaaaaaaaaaaaaaaaaaaaaaaaaaaaaaaaaaaaaaaaaaaaaaaaaaaaaaaa

SEQ ID NO: 11058 - DNA, 5264 bp, synthetic construct
  source 1..5264: mol_type = other DNA
gaaataagagagaaaagaagagtaagaagaaatataagagaattcgccaccatggcccctaagaaaaagcggaaggtgaatatcagcggctctagctgcggcagccccaacagcgccgacaccagcagcgacttcaaggacctgtggaccaagctgaaggaatgccacgaccgggaagtgcagggactccaggtgaaggtcaccaaactcaagcaagaaagaatcctggacgcccagagactggaagaattcttcaccaagaaccagcagctgagagagcagcagaaagtgctgcacgagacaatcaaggttctggaagatagactgcgggccggcctgtgcgacagatgcgccgtgaccgaggaacacatgcgcaaaaagcagcaggagttcgagaacattagacagcaaaatctgaaattgatcacagagctgatgaacgagagaaacacactgcaggaggagaacaagaagctgagcgagcagctgcaacagaagatcgagaatgatcagcaacaccaggccgctgagctggaatgtgaagaggacgtgatccccgacagcccaatcacagctttcagcttttctggcgtgaacagactgaggcggaaggaaaacccccacgtgcggtacatcgagcagacccataccaagctggaacacagcgtgtgtgccaacgagatgagaaaggtgtccaagtcctccacccatccccagcacaaccctaacgaaaatgagatcctggtggctgatacctacgaccagtctcagagccctatggccaaggcccacggcaccagctcttatacccctgataagagctccttcaacctggccaccgtggtggccgagacactgggcctgggcgtgcaggaggaaagcgagacacagggcccaatgagccctctgggagatgagctgtaccactgcctggaaggcaaccacaagaaacagccttttgagtccggctccgagactcctggaacaagcgagagcgctacacctgagggcagccctaagagaaaggtgtccagcgccgagggcgctgccaaggaagagcctaaacggagaagcgccagactgagcgccaagccccccgccaaggtggaagccaagcctaagaaggccgccgctaaggacaagagcagcgataagaaagtccagaccaagggcaagcggggcgccaaaggcaaacaggccgaggtggccaaccaggagacaaaggaagatctgcctgctgagaacggcgaaaccaagaccgaggaatctccagcttctgacgaggccggagagaaggaggccaaaagcgacagcggctctgagacacctggaacaagcgagagcgccaccccggaatcctatgaacaacttgcaccacaaccgtgtgtgggagaaactttacattctagcctcccacgagacagtgaactgtttgtgcctgaagaggggagcagcgagaaggagagcgaggacgcgccaaaaacatctcctccgacgcctgggaaacatggtttggaacagactggggaggaaaaagtgatggtgactgttcctgacaaaaatccaccttgtccttgctgtggtacccgggtaaactctgtgttgaatctgattgaacatctgaaagtgtcacacgggaaaaggggggtttgttttcggtgtgcaaaatgtggaaaggaaaatagtaactatcacagtgttgtttgtcattttaagaaatgcaggggtccagagacggagaaagccccagctggggagtggatttgtgaggtatgcaacagagattttacaaccaaaattggcctgggacaacacaagagattggcacacccagcagtgagaaatcaggaaaggatcgttgcttcccaaccgaaagaaacatcaaatagaggtgctcacaaaaggtgctggacaaaggaggaggaagaattactaataagactggaggctcagttcgagggaaacaaaaatattaataagcttattgcagaacacataaccaccaaaacagctaagcagatcagtgacaaaaggcgattgctgtccagaaagccagcagaggagccacgtgaggagcctggaacgtgtcatcacaccaggagagcagctgcgagcctgagaacggagcctgagatgagtcatcacgcccaggcagaggacagagataatggacctgggagacgccctctgccaggcagggcagctgccggagggagaacaatggacgagataagacgccaccctgataagggcaacggacagcagagacccaccaagcaaaaatcagaagaacagctgcaggcttactataaaaagacactagaggaacgactttcagctggggcacttaacaccttcccccgagcattcaagcaggtaatggaaggccgggatataaagctagtaatcaatcagacagcgcaggactgcttcggatgcctggaatccataagccaaataagaacggcaacccgagataaaaaggacacggtgacccgggagaaacacccaaagaaaccttttcagaagtggatgaagaagagagcaatcaaaaaaggtaattatcttcggttccagcgtttattttatcttgatagagggaaactggctaaaatcattttagatgatattgaatgcttgtcttgtgacataccactcagtgaaatttattcggtttttaaaacaagatgggaaacaactggtagctttaaaagccttggggactttaaaacttacgggaaggctgacaacactgccttcagagaattaattacggctaaagaaattgagaaaaatgtgcaggaaatgagcaaaggctcggctcccggtccagacgggattactcttggggacgtcgtaaagatggatcccgagttttcccggaccatggagattttcaatttatggttaacaactggtaaaatcccggacatggtgagggggtgcagaaccgttttgattccaaaatcatcaaagccggatcgtttgaaagacattaataactggagacctatcacgatcggttccatcttgctgagactgttctccaggattgtaacagctaggctgagcaaagcgtgccccctgaacccaaggcaaagaggctttatcagagcggcgggatgctctgaaaacttaaaactcctgcaaactataatttggtcggccaaaagagaacacagaccactgggtgttgtattcgtggacatcaagaaggcttttgacaccgtaagccaccagcacatcattcatgctttgcagcaaagagaggtggatccccacatcgtcggtctggtgagcaatatgtacgagaacatcagtacgtatatcaccacaaagaggaacacacacacagacaaaatccagatccgggttggagtaaagcagggtgacccgatgtcgccccttttatttaacctggcaatggaccctctattatgcaagctggaagagagtggcaaaggataccaccgaggacagagcagcatcacagcgatggcatttgcagacgatctggttttgctgagcgactcctgggaaaatatgaatacaaatattagcatactggagaccttctgcaatctgaccggactcaaaacacaggggcaaaagtgccacggcttttacatcaagccgacaaaggactcttacaccatcaatgactgcgctgcctggactatcaacggcacacccctgaacatgatcgaccccggcgaatctgagaaatacctcggcctgcagtttgacccgtggattggaatagcaaggtccggtctctccacaaaactagatttttggcttcagcggatcgatcaagcaccacttaaacctctgcagaaaactgatattctcaaaacatacaccatccctcggctgatctacatagctgaccactcagaagtgaaaagcgcactactcgaaacccttgaccagaagatccggacagcggtcaaggaatggcttcacctacctccgtgcacctgcgatgccatcctgtactcgagcacgagagacggcggtttgggcatcaccaaattggcaggactgatccccagcgtgcaggcccgtagactgcatcggatcgcacagtcatctgacgatacgatgaaatgcttcatggaaaaagagaaaatggaacagctgcataagaaattgtggattcaagctggaggggacagagagaacataccctcgatttgggaagcaccaccgtcgagtgaaccaccaaacaacgtgagcacaaattcggaatgggaagcaccgacccagaaagataaatttccaaagccttgcaattggaggaaaaacgaattcaaaaaatggaccaaattggcatcccaaggccgcggaattgtaaattttgaaagagacaaaattagtaaccattggatccaatactacagacgcatacctcacaggaaactcctcactgcactacaactcagggccaacgtttaccccacgagagaatttctagccaggggtagacaagaccaatacatcaaggcgtgtaggcactgcgatgcggacaacgaatcctgcgcccacatcatcggcaactgcccagtgacacaggacgcccgaatcaagaggcacaattacatctgcgaactgcttctcgaggaggcgaagaagaaggactgggtagtgttcaaggaaccgcacataagggattccaacaaggaactgtacaaacctgacctgatatttgtgaaggatgggcgtgcacttgtcgtggatgtgacagtacggtatgaagcagccaaatcatcgctggaggaagccgctgcagagaaagtgagaaagtacaaacacctggaaacggaagtaagacatctcacgaatgcaaaggacgttacttttgtgggctttcccctaggagcgcgggggaaatggcaccaagataactttaaacttttgactgagcttggcctctccaaatcgaggcaagtgaaaatggcagagactttttccacagtagcgctcttttcatctgtggacattgtacatatgtttgccagtagggccagaaaatctatggttatgtgataataggctgccttctgcggggcttgccttctggccatgcccttcttctctcccttgcacctgtacctcttggtctttgaataaagcctgagtaggaaggaccggtaaaaaaaaaaaaaaaaaaaaaaaaaaaaaaacgttgactaaaaaaaaaaaaaaaaaaaaaaaaaaaaaaaaaaaaaaaaaaaaaaaaaaaaaaaaaaaaaaaaaaaaaa

SEQ ID NO: 11059 - DNA, 5264 bp, synthetic construct
  source 1..5264: mol_type = other DNA
gaaataagagagaaaagaagagtaagaagaaatataagagaattcgccaccatggcccctaagaaaaagcggaaggtgaatatcagcggctctagctgcggcagccccaacagcgccgacaccagcagcgacttcaaggacctgtggaccaagctgaaggaatgccacgaccgggaagtgcagggactccaggtgaaggtcaccaaactcaagcaagaaagaatcctggacgcccagagactggaagaattcttcaccaagaaccagcagctgagagagcagcagaaagtgctgcacgagacaatcaaggttctggaagatagactgcgggccggcctgtgcgacagatgcgccgtgaccgaggaacacatgcgcaaaaagcagcaggagttcgagaacattagacagcaaaatctgaaattgatcacagagctgatgaacgagagaaacacactgcaggaggagaacaagaagctgagcgagcagctgcaacagaagatcgagaatgatcagcaacaccaggccgctgagctggaatgtgaagaggacgtgatccccgacagcccaatcacagctttcagcttttctggcgtgaacagactgaggcggaaggaaaacccccacgtgcggtacatcgagcagacccataccaagctggaacacagcgtgtgtgccaacgagatgagaaaggtgtccaagtcctccacccatccccagcacaaccctaacgaaaatgagatcctggtggctgatacctacgaccagtctcagagccctatggccaaggcccacggcaccagctcttatacccctgataagagctccttcaacctggccaccgtggtggccgagacactgggcctgggcgtgcaggaggaaagcgagacacagggcccaatgagccctctgggagatgagctgtaccactgcctggaaggcaaccacaagaaacagccttttgagtccggctccgagactcctggaacaagcgagagcgctacacctgagggcagccctaagagaaaggtgtccagcgccgagggcgctgccaaggaagagcctaaacggagaagcgccagactgagcgccaagccccccgccaaggtggaagccaagcctaagaaggccgccgctaaggacaagagcagcgataagaaagtccagaccaagggcaagcggggcgccaaaggcaaacaggccgaggtggccaaccaggagacaaaggaagatctgcctgctgagaacggcgaaaccaagaccgaggaatctccagcttctgacgaggccggagagaaggaggccaaaagcgacagcggctctgagacacctggaacaagcgagagcgccaccccggaatcctatgaacaacttgcaccacaaccgtgtgtgggagaaactttacattctagcctcccacgagacagtgaactgtttgtgcctgaagaggggagcagcgagaaggagagcgaggacgcgccaaaaacatctcctccgacgcctgggaaacatggtttggaacagactggggaggaaaaagtgatggtgactgttcctgacaaaaatccaccttgtccttgctgtggtacccgggtaaactctgtgttgaatctgattgaacatctgaaagtgtcacacgggaaaaggggggtttgttttcggtgtgcaaaatgtggaaaggaaaatagtaactatcacagtgttgtttgtcattttaagaaatgcaggggtccagagacggagaaagccccagctggggagtggatttgtgaggtatgcaacagagattttacaaccaaaattggcctgggacaacacaagagattggcacacccagcagtgagaaatcaggaaaggatcgttgcttcccaaccgaaagaaacatcaaatagaggtgctcacaaaaggtgctggacaaaggaggaggaagaattactaataagactggaggctcagttcgagggaaacaaaaatattaataagcttattgcagaacacataaccaccaaaacagctaagcagatcagtgacaaaaggcgattgctgtccagaaagccagcagaggagccacgtgaggagcctggaacgtgtcatcacaccaggagagcagctgcgagcctgagaacggagcctgagatgagtcatcacgcccaggcagaggacagagataatggacctgggagacgccctctgccaggcagggcagctgccggagggagaacaatggacgagataagacgccaccctgataagggcaacggacagcagagacccaccaagcaaaaatcagaagaacagctgcaggcttactataaaaagacactagaggaacgactttcagctggggcacttaacaccttcccccgagcattcaagcaggtaatggaaggccgggatataaagctagtaatcaatcagacagcgcaggactgcttcggatgcctggaatccataagccaaataagaacggcaacccgagataaaaaggacacggtgacccgggagaaacacccaaagaaaccttttcagaagtggatgaagaagagagcaatcaaaaaaggtaattatcttcggttccagcgtttattttatcttgatagagggaaactggctaaaatcattttagatgatattgaatgcttgtcttgtgacataccactcagtgaaatttattcggtttttaaaacaagatgggaaacaactggtagctttaaaagccttggggactttaaaacttacgggaaggctgacaacactgccttcagagaattaattacggctaaagaaattgagaaaaatgtgcaggaaatgagcaaaggctcggctcccggtccagacgggattactcttggggacgtcgtaaagatggatcccgagttttcccggaccatggagattttcaatttatggttaacaactggtaaaatcccggacatggtgagggggtgcagaaccgttttgattccaaaatcatcaaagccggatcgtttgaaagacattaataactggagacctatcacgatcggttccatcttgctgagactgttctccaggattgtaacagctaggctgagcaaagcgtgccccctgaacccaaggcaaagaggctttatcagagcggcgggatgctctgaaaacttaaaactcctgcaaactataatttggtcggccaaaagagaacacagaccactgggtgttgtattcgtggacatcgccaaggcttttggcaccgtaagccaccagcacatcattcatgctttgcagcaaagagaggtggatccccacatcgtcggtctggtgagcaatatgtacgagaacatcagtacgtatatcaccacaaagaggaacacacacacagacaaaatccagatccgggttggagtaaagcagggtgacccgatgtcgccccttttatttaacctggcaatggaccctctattatgcaagctggaagagagtggcaaaggataccaccgaggacagagcagcatcacagcgatggcatttgcagacgatctggttttgctgagcgactcctgggaaaatatgaatacaaatattagcatactggagaccttctgcaatctgaccggactcaaaacacaggggcaaaagtgccacggcttttacatcaagccgacaaaggactcttacaccatcaatgactgcgctgcctggactatcaacggcacacccctgaacatgatcgaccccggcgaatctgagaaatacctcggcctgcagtttgacccgtggattggaatagcaaggtccggtctctccacaaaactagatttttggcttcagcggatcgatcaagcaccacttaaacctctgcagaaaactgatattctcaaaacatacaccatccctcggctgatctacatagctgaccactcagaagtgaaaagcgcactactcgaaacccttgaccagaagatccggacagcggtcaaggaatggcttcacctacctccgtgcacctgcgatgccatcctgtactcgagcacgagagacggcggtttgggcatcaccaaattggcaggactgatccccagcgtgcaggcccgtagactgcatcggatcgcacagtcatctgacgatacgatgaaatgcttcatggaaaaagagaaaatggaacagctgcataagaaattgtggattcaagctggaggggacagagagaacataccctcgatttgggaagcaccaccgtcgagtgaaccaccaaacaacgtgagcacaaattcggaatgggaagcaccgacccagaaagataaatttccaaagccttgcaattggaggaaaaacgaattcaaaaaatggaccaaattggcatcccaaggccgcggaattgtaaattttgaaagagacaaaattagtaaccattggatccaatactacagacgcatacctcacaggaaactcctcactgcactacaactcagggccaacgtttaccccacgagagaatttctagccaggggtagacaagaccaatacatcaaggcgtgtaggcactgcgatgcggacaacgaatcctgcgcccacatcatcggcaactgcccagtgacacaggacgcccgaatcaagaggcacaattacatctgcgaactgcttctcgaggaggcgaagaagaaggactgggtagtgttcaaggaaccgcacataagggattccaacaaggaactgtacaaacctgacctgatatttgtgaaggatgggcgtgcacttgtcgtggatgtgacagtacggtatgaagcagccaaatcatcgctggaggaagccgctgcagagaaagtgagaaagtacaaacacctggaaacggaagtaagacatctcacgaatgcaaaggacgttacttttgtgggctttcccctaggagcgcgggggaaatggcaccaagataactttaaacttttgactgagcttggcctctccaaatcgaggcaagtgaaaatggcagagactttttccacagtagcgctcttttcatctgtggacattgtacatatgtttgccagtagggccagaaaatctatggttatgtgataataggctgccttctgcggggcttgccttctggccatgcccttcttctctcccttgcacctgtacctcttggtctttgaataaagcctgagtaggaaggaccggtaaaaaaaaaaaaaaaaaaaaaaaaaaaaaaacgttgactaaaaaaaaaaaaaaaaaaaaaaaaaaaaaaaaaaaaaaaaaaaaaaaaaaaaaaaaaaaaaaaaaaaaaa

SEQ ID NO: 11060 - DNA, 5264 bp, synthetic construct
  source 1..5264: mol_type = other DNA
gaaataagagagaaaagaagagtaagaagaaatataagagaattcgccaccatggcccctaagaaaaagcggaaggtgaatatcagcggctctagctgcggcagccccaacagcgccgacaccagcagcgacttcaaggacctgtggaccaagctgaaggaatgccacgaccgggaagtgcagggactccaggtgaaggtcaccaaactcaagcaagaaagaatcctggacgcccagagactggaagaattcttcaccaagaaccagcagctgagagagcagcagaaagtgctgcacgagacaatcaaggttctggaagatagactgcgggccggcctgtgcgacagatgcgccgtgaccgaggaacacatgcgcaaaaagcagcaggagttcgagaacattagacagcaaaatctgaaattgatcacagagctgatgaacgagagaaacacactgcaggaggagaacaagaagctgagcgagcagctgcaacagaagatcgagaatgatcagcaacaccaggccgctgagctggaatgtgaagaggacgtgatccccgacagcccaatcacagctttcagcttttctggcgtgaacagactgaggcggaaggaaaacccccacgtgcggtacatcgagcagacccataccaagctggaacacagcgtgtgtgccaacgagatgagaaaggtgtccaagtcctccacccatccccagcacaaccctaacgaaaatgagatcctggtggctgatacctacgaccagtctcagagccctatggccaaggcccacggcaccagctcttatacccctgataagagctccttcaacctggccaccgtggtggccgagacactgggcctgggcgtgcaggaggaaagcgagacacagggcccaatgagccctctgggagatgagctgtaccactgcctggaaggcaaccacaagaaacagccttttgagtccggctccgagactcctggaacaagcgagagcgctacacctgagggcagccctaagagaaaggtgtccagcgccgagggcgctgccaaggaagagcctaaacggagaagcgccagactgagcgccaagccccccgccaaggtggaagccaagcctaagaaggccgccgctaaggacaagagcagcgataagaaagtccagaccaagggcaagcggggcgccaaaggcaaacaggccgaggtggccaaccaggagacaaaggaagatctgcctgctgagaacggcgaaaccaagaccgaggaatctccagcttctgacgaggccggagagaaggaggccaaaagcgacagcggctctgagacacctggaacaagcgagagcgccaccccggaatcctatgaacaacttgcaccacaaccgtgtgtgggagaaactttacattctagcctcccacgagacagtgaactgtttgtgcctgaagaggggagcagcgagaaggagagcgaggacgcgccaaaaacatctcctccgacgcctgggaaacatggtttggaacagactggggaggaaaaagtgatggtgactgttcctgacaaaaatccaccttgtccttgctgtggtacccgggtaaactctgtgttgaatctgattgaacatctgaaagtgtcacacgggaaaaggggggtttgttttcggtgtgcaaaatgtggaaaggaaaatagtaactatcacagtgttgtttgtcattttaagaaatgcaggggtccagagacggagaaagccccagctggggagtggatttgtgaggtatgcaacagagattttacaaccaaaattggcctgggacaacacaagagattggcacacccagcagtgagaaatcaggaaaggatcgttgcttcccaaccgaaagaaacatcaaatagaggtgctcacaaaaggtgctggacaaaggaggaggaagaattactaataagactggaggctcagttcgagggaaacaaaaatattaataagcttattgcagaacacataaccaccaaaacagctaagcagatcagtgacaaaaggcgattgctgtccagaaagccagcagaggagccacgtgaggagcctggaacgtgtcatcacaccaggagagcagctgcgagcctgagaacggagcctgagatgagtcatcacgcccaggcagaggacagagataatggacctgggagacgccctctgccaggcagggcagctgccggagggagaacaatggacgagataagacgccaccctgataagggcaacggacagcagagacccaccaagcaaaaatcagaagaacagctgcaggcttactataaaaagacactagaggaacgactttcagctggggcacttaacaccttcccccgagcattcaagcaggtaatggaaggccgggatataaagctagtaatcaatcagacagcgcaggactgcttcggatgcctggaatccataagccaaataagaacggcaacccgagataaaaaggacacggtgacccgggagaaacacccaaagaaaccttttcagaagtggatgaagaagagagcaatcaaaaaaggtaattatcttcggttccagcgtttattttatcttgatagagggaaactggctaaaatcattttagatgatattgaatgcttgtcttgtgacataccactcagtgaaatttattcggtttttaaaacaagatgggaaacaactggtagctttaaaagccttggggactttaaaacttacgggaaggctgacaacactgccttcagagaattaattacggctaaagaaattgagaaaaatgtgcaggaaatgagcaaaggctcggctcccggtccagacgggattactcttggggacgtcgtaaagatggatcccgagttttcccggaccatggagattttcaatttatggttaacaactggtaaaatcccggacatggtgagggggtgcagaaccgttttgattccaaaatcatcaaagccggatcgtttgaaagacattaataactggagacctatcacgatcggttccatcttgctgagactgttctccaggattgtaacagctaggctgagcaaagcgtgccccctgaacccaaggcaaagaggctttatcagagcggcgggatgctctgaaaacttaaaactcctgcaaactataatttggtcggccaaaagagaacacagaccactgggtgttgtattcgtggacatcgccaaggcttttgacaccgtaagccaccagcacatcattcatgctttgcagcaaagagaggtggatccccacatcgtcggtctggtgagcaatatgtacgagaacatcagtacgtatatcaccacaaagaggaacacacacacagacaaaatccagatccgggttggagtaaagcagggtgacccgatgtcgccccttttatttaacctggcaatgaaccctctattatgcaagctggaagagagtggcaaaggataccaccgaggacagagcagcatcacagcgatggcatttgcagacgatctggttttgctgagcgactcctgggaaaatatgaatacaaatattagcatactggagaccttctgcaatctgaccggactcaaaacacaggggcaaaagtgccacggcttttacatcaagccgacaaaggactcttacaccatcaatgactgcgctgcctggactatcaacggcacacccctgaacatgatcgaccccggcgaatctgagaaatacctcggcctgcagtttgacccgtggattggaatagcaaggtccggtctctccacaaaactagatttttggcttcagcggatcgatcaagcaccacttaaacctctgcagaaaactgatattctcaaaacatacaccatccctcggctgatctacatagctgaccactcagaagtgaaaagcgcactactcgaaacccttgaccagaagatccggacagcggtcaaggaatggcttcacctacctccgtgcacctgcgatgccatcctgtactcgagcacgagagacggcggtttgggcatcaccaaattggcaggactgatccccagcgtgcaggcccgtagactgcatcggatcgcacagtcatctgacgatacgatgaaatgcttcatggaaaaagagaaaatggaacagctgcataagaaattgtggattcaagctggaggggacagagagaacataccctcgatttgggaagcaccaccgtcgagtgaaccaccaaacaacgtgagcacaaattcggaatgggaagcaccgacccagaaagataaatttccaaagccttgcaattggaggaaaaacgaattcaaaaaatggaccaaattggcatcccaaggccgcggaattgtaaattttgaaagagacaaaattagtaaccattggatccaatactacagacgcatacctcacaggaaactcctcactgcactacaactcagggccaacgtttaccccacgagagaatttctagccaggggtagacaagaccaatacatcaaggcgtgtaggcactgcgatgcggacaacgaatcctgcgcccacatcatcggcaactgcccagtgacacaggacgcccgaatcaagaggcacaattacatctgcgaactgcttctcgaggaggcgaagaagaaggactgggtagtgttcaaggaaccgcacataagggattccaacaaggaactgtacaaacctgacctgatatttgtgaaggatgggcgtgcacttgtcgtggatgtgacagtacggtatgaagcagccaaatcatcgctggaggaagccgctgcagagaaagtgagaaagtacaaacacctggaaacggaagtaagacatctcacgaatgcaaaggacgttacttttgtgggctttcccctaggagcgcgggggaaatggcaccaagataactttaaacttttgactgagcttggcctctccaaatcgaggcaagtgaaaatggcagagactttttccacagtagcgctcttttcatctgtggacattgtacatatgtttgccagtagggccagaaaatctatggttatgtgataataggctgccttctgcggggcttgccttctggccatgcccttcttctctcccttgcacctgtacctcttggtctttgaataaagcctgagtaggaaggaccggtaaaaaaaaaaaaaaaaaaaaaaaaaaaaaaacgttgactaaaaaaaaaaaaaaaaaaaaaaaaaaaaaaaaaaaaaaaaaaaaaaaaaaaaaaaaaaaaaaaaaaaaaa

SEQ ID NO: 11061 - DNA, 5264 bp, synthetic construct
  source 1..5264: mol_type = other DNA
gaaataagagagaaaagaagagtaagaagaaatataagagaattcgccaccatggcccctaagaaaaagcggaaggtgaatatcagcggctctagctgcggcagccccaacagcgccgacaccagcagcgacttcaaggacctgtggaccaagctgaaggaatgccacgaccgggaagtgcagggactccaggtgaaggtcaccaaactcaagcaagaaagaatcctggacgcccagagactggaagaattcttcaccaagaaccagcagctgagagagcagcagaaagtgctgcacgagacaatcaaggttctggaagatagactgcgggccggcctgtgcgacagatgcgccgtgaccgaggaacacatgcgcaaaaagcagcaggagttcgagaacattagacagcaaaatctgaaattgatcacagagctgatgaacgagagaaacacactgcaggaggagaacaagaagctgagcgagcagctgcaacagaagatcgagaatgatcagcaacaccaggccgctgagctggaatgtgaagaggacgtgatccccgacagcccaatcacagctttcagcttttctggcgtgaacagactgaggcggaaggaaaacccccacgtgcggtacatcgagcagacccataccaagctggaacacagcgtgtgtgccaacgagatgagaaaggtgtccaagtcctccacccatccccagcacaaccctaacgaaaatgagatcctggtggctgatacctacgaccagtctcagagccctatggccaaggcccacggcaccagctcttatacccctgataagagctccttcaacctggccaccgtggtggccgagacactgggcctgggcgtgcaggaggaaagcgagacacagggcccaatgagccctctgggagatgagctgtaccactgcctggaaggcaaccacaagaaacagccttttgagtccggctccgagactcctggaacaagcgagagcgctacacctgagggcagccctaagagaaaggtgtccagcgccgagggcgctgccaaggaagagcctaaacggagaagcgccagactgagcgccaagccccccgccaaggtggaagccaagcctaagaaggccgccgctaaggacaagagcagcgataagaaagtccagaccaagggcaagcggggcgccaaaggcaaacaggccgaggtggccaaccaggagacaaaggaagatctgcctgctgagaacggcgaaaccaagaccgaggaatctccagcttctgacgaggccggagagaaggaggccaaaagcgacagcggctctgagacacctggaacaagcgagagcgccaccccggaatcctatgaacaacttgcaccacaaccgtgtgtgggagaaactttacattctagcctcccacgagacagtgaactgtttgtgcctgaagaggggagcagcgagaaggagagcgaggacgcgccaaaaacatctcctccgacgcctgggaaacatggtttggaacagactggggaggaaaaagtgatggtgactgttcctgacaaaaatccaccttgtccttgctgtggtacccgggtaaactctgtgttgaatctgattgaacatctgaaagtgtcacacgggaaaaggggggtttgttttcggtgtgcaaaatgtggaaaggaaaatagtaactatcacagtgttgtttgtcattttaagaaatgcaggggtccagagacggagaaagccccagctggggagtggatttgtgaggtatgcaacagagattttacaaccaaaattggcctgggacaacacaagagattggcacacccagcagtgagaaatcaggaaaggatcgttgcttcccaaccgaaagaaacatcaaatagaggtgctcacaaaaggtgctggacaaaggaggaggaagaattactaataagactggaggctcagttcgagggaaacaaaaatattaataagcttattgcagaacacataaccaccaaaacagctaagcagatcagtgacaaaaggcgattgctgtccagaaagccagcagaggagccacgtgaggagcctggaacgtgtcatcacaccaggagagcagctgcgagcctgagaacggagcctgagatgagtcatcacgcccaggcagaggacagagataatggacctgggagacgccctctgccaggcagggcagctgccggagggagaacaatggacgagataagacgccaccctgataagggcaacggacagcagagacccaccaagcaaaaatcagaagaacagctgcaggcttactataaaaagacactagaggaacgactttcagctggggcacttaacaccttcccccgagcattcaagcaggtaatggaaggccgggatataaagctagtaatcaatcagacagcgcaggactgcttcggatgcctggaatccataagccaaataagaacggcaacccgagataaaaaggacacggtgacccgggagaaacacccaaagaaaccttttcagaagtggatgaagaagagagcaatcaaaaaaggtaattatcttcggttccagcgtttattttatcttgatagagggaaactggctaaaatcattttagatgatattgaatgcttgtcttgtgacataccactcagtgaaatttattcggtttttaaaacaagatgggaaacaactggtagctttaaaagccttggggactttaaaacttacgggaaggctgacaacactgccttcagagaattaattacggctaaagaaattgagaaaaatgtgcaggaaatgagcaaaggctcggctcccggtccagacgggattactcttggggacgtcgtaaagatggatcccgagttttcccggaccatggagattttcaatttatggttaacaactggtaaaatcccggacatggtgagggggtgcagaaccgttttgattccaaaatcatcaaagccggatcgtttgaaagacattaataactggagacctatcacgatcggttccatcttgctgagactgttctccaggattgtaacagctaggctgagcaaagcgtgccccctgaacccaaggcaaagaggctttatcagagcggcgggatgctctgaaaacttaaaactcctgcaaactataatttggtcggccaaaagagaacacagaccactgggtgttgtattcgtggacatcgccaaggcttttgacaccgtaagccaccagcacatcattcatgctttgcagcaaagagaggtgcctccccacatcgtcggtctggtgagcaatatgtacgagaacatcagtacgtatatcaccacaaagaggaacacacacacagacaaaatccagatccgggttggagtaaagcagggtgacccgatgtcgccccttttatttaacctggcaatggaccctctattatgcaagctggaagagagtggcaaaggataccaccgaggacagagcagcatcacagcgatggcatttgcagacgatctggttttgctgagcgactcctgggaaaatatgaatacaaatattagcatactggagaccttctgcaatctgaccggactcaaaacacaggggcaaaagtgccacggcttttacatcaagccgacaaaggactcttacaccatcaatgactgcgctgcctggactatcaacggcacacccctgaacatgatcgaccccggcgaatctgagaaatacctcggcctgcagtttgacccgtggattggaatagcaaggtccggtctctccacaaaactagatttttggcttcagcggatcgatcaagcaccacttaaacctctgcagaaaactgatattctcaaaacatacaccatccctcggctgatctacatagctgaccactcagaagtgaaaagcgcactactcgaaacccttgaccagaagatccggacagcggtcaaggaatggcttcacctacctccgtgcacctgcgatgccatcctgtactcgagcacgagagacggcggtttgggcatcaccaaattggcaggactgatccccagcgtgcaggcccgtagactgcatcggatcgcacagtcatctgacgatacgatgaaatgcttcatggaaaaagagaaaatggaacagctgcataagaaattgtggattcaagctggaggggacagagagaacataccctcgatttgggaagcaccaccgtcgagtgaaccaccaaacaacgtgagcacaaattcggaatgggaagcaccgacccagaaagataaatttccaaagccttgcaattggaggaaaaacgaattcaaaaaatggaccaaattggcatcccaaggccgcggaattgtaaattttgaaagagacaaaattagtaaccattggatccaatactacagacgcatacctcacaggaaactcctcactgcactacaactcagggccaacgtttaccccacgagagaatttctagccaggggtagacaagaccaatacatcaaggcgtgtaggcactgcgatgcggacaacgaatcctgcgcccacatcatcggcaactgcccagtgacacaggacgcccgaatcaagaggcacaattacatctgcgaactgcttctcgaggaggcgaagaagaaggactgggtagtgttcaaggaaccgcacataagggattccaacaaggaactgtacaaacctgacctgatatttgtgaaggatgggcgtgcacttgtcgtggatgtgacagtacggtatgaagcagccaaatcatcgctggaggaagccgctgcagagaaagtgagaaagtacaaacacctggaaacggaagtaagacatctcacgaatgcaaaggacgttacttttgtgggctttcccctaggagcgcgggggaaatggcaccaagataactttaaacttttgactgagcttggcctctccaaatcgaggcaagtgaaaatggcagagactttttccacagtagcgctcttttcatctgtggacattgtacatatgtttgccagtagggccagaaaatctatggttatgtgataataggctgccttctgcggggcttgccttctggccatgcccttcttctctcccttgcacctgtacctcttggtctttgaataaagcctgagtaggaaggaccggtaaaaaaaaaaaaaaaaaaaaaaaaaaaaaaacgttgactaaaaaaaaaaaaaaaaaaaaaaaaaaaaaaaaaaaaaaaaaaaaaaaaaaaaaaaaaaaaaaaaaaaaaa

SEQ ID NO: 11062 - DNA, 5264 bp, synthetic construct
  source 1..5264: mol_type = other DNA
gaaataagagagaaaagaagagtaagaagaaatataagagaattcgccaccatggcccctaagaaaaagcggaaggtgaatatcagcggctctagctgcggcagccccaacagcgccgacaccagcagcgacttcaaggacctgtggaccaagctgaaggaatgccacgaccgggaagtgcagggactccaggtgaaggtcaccaaactcaagcaagaaagaatcctggacgcccagagactggaagaattcttcaccaagaaccagcagctgagagagcagcagaaagtgctgcacgagacaatcaaggttctggaagatagactgcgggccggcctgtgcgacagatgcgccgtgaccgaggaacacatgcgcaaaaagcagcaggagttcgagaacattagacagcaaaatctgaaattgatcacagagctgatgaacgagagaaacacactgcaggaggagaacaagaagctgagcgagcagctgcaacagaagatcgagaatgatcagcaacaccaggccgctgagctggaatgtgaagaggacgtgatccccgacagcccaatcacagctttcagcttttctggcgtgaacagactgaggcggaaggaaaacccccacgtgcggtacatcgagcagacccataccaagctggaacacagcgtgtgtgccaacgagatgagaaaggtgtccaagtcctccacccatccccagcacaaccctaacgaaaatgagatcctggtggctgatacctacgaccagtctcagagccctatggccaaggcccacggcaccagctcttatacccctgataagagctccttcaacctggccaccgtggtggccgagacactgggcctgggcgtgcaggaggaaagcgagacacagggcccaatgagccctctgggagatgagctgtaccactgcctggaaggcaaccacaagaaacagccttttgagtccggctccgagactcctggaacaagcgagagcgctacacctgagggcagccctaagagaaaggtgtccagcgccgagggcgctgccaaggaagagcctaaacggagaagcgccagactgagcgccaagccccccgccaaggtggaagccaagcctaagaaggccgccgctaaggacaagagcagcgataagaaagtccagaccaagggcaagcggggcgccaaaggcaaacaggccgaggtggccaaccaggagacaaaggaagatctgcctgctgagaacggcgaaaccaagaccgaggaatctccagcttctgacgaggccggagagaaggaggccaaaagcgacagcggctctgagacacctggaacaagcgagagcgccaccccggaatcctatgaacaacttgcaccacaaccgtgtgtgggagaaactttacattctagcctcccacgagacagtgaactgtttgtgcctgaagaggggagcagcgagaaggagagcgaggacgcgccaaaaacatctcctccgacgcctgggaaacatggtttggaacagactggggaggaaaaagtgatggtgactgttcctgacaaaaatccaccttgtccttgctgtggtacccgggtaaactctgtgttgaatctgattgaacatctgaaagtgtcacacgggaaaaggggggtttgttttcggtgtgcaaaatgtggaaaggaaaatagtaactatcacagtgttgtttgtcattttaagaaatgcaggggtccagagacggagaaagccccagctggggagtggatttgtgaggtatgcaacagagattttacaaccaaaattggcctgggacaacacaagagattggcacacccagcagtgagaaatcaggaaaggatcgttgcttcccaaccgaaagaaacatcaaatagaggtgctcacaaaaggtgctggacaaaggaggaggaagaattactaataagactggaggctcagttcgagggaaacaaaaatattaataagcttattgcagaacacataaccaccaaaacagctaagcagatcagtgacaaaaggcgattgctgtccagaaagccagcagaggagccacgtgaggagcctggaacgtgtcatcacaccaggagagcagctgcgagcctgagaacggagcctgagatgagtcatcacgcccaggcagaggacagagataatggacctgggagacgccctctgccaggcagggcagctgccggagggagaacaatggacgagataagacgccaccctgataagggcaacggacagcagagacccaccaagcaaaaatcagaagaacagctgcaggcttactataaaaagacactagaggaacgactttcagctggggcacttaacaccttcccccgagcattcaagcaggtaatggaaggccgggatataaagctagtaatcaatcagacagcgcaggactgcttcggatgcctggaatccataagccaaataagaacggcaacccgagataaaaaggacacggtgacccgggagaaacacccaaagaaaccttttcagaagtggatgaagaagagagcaatcaaaaaaggtaattatcttcggttccagcgtttattttatcttgatagagggaaactggctaaaatcattttagatgatattgaatgcttgtcttgtgacataccactcagtgaaatttattcggtttttaaaacaagatgggaaacaactggtagctttaaaagccttggggactttaaaacttacgggaaggctgacaacactgccttcagagaattaattacggctaaagaaattgagaaaaatgtgcaggaaatgagcaaaggctcggctcccggtccagacgggattactcttggggacgtcgtaaagatggatcccgagttttcccggaccatggagattttcaatttatggttaacaactggtaaaatcccggacatggtgagggggtgcagaaccgttttgattccaaaatcatcaaagccggatcgtttgaaagacattaataactggagacctatcacgatcggttccatcttgctgagactgttctccaggattgtaacagctaggctgagcaaagcgtgccccctgaacccaaggcaaagaggctttatcagagcggcgggatgctctgaaaacttaaaactcctgcaaactataatttggtcggccaaaagagaacacagaccactgggtgttgtattcgtggacatcgccaaggcttttgacaccgtaagccaccagcacatcattcatgctttgcagcaaagagaggtggatccccacatcgtcggtctggtgagcaatatgtacgagaacatcagtacgtatatcaccacaaagaggaacacacacacagacaaaatccagatccgggttggagtaaagcagggtgacccgatgtcgccccttttatttaacctggcaatggaccctctattatgcaagctggaagagagtggcaaaggataccaccgaggacagagcagcatcacagcgatggcatttgcagacgatctggttttgctgagcgactcctgggaaaatatgaatacaaatattagcatactggagaccttctgcaatctgaccggactcaaaacacaggggcaaaagtgccacggcttttacatcaagccgacaaaggactcttacaccatcaatgactgcgctgcctggactatcaacggcacacccctgaacatgatcgaccccggcgaatcttacaaatacctcggcctgcagtttgacccgtggattggaatagcaaggtccggtctctccacaaaactagatttttggcttcagcggatcgatcaagcaccacttaaacctctgcagaaaactgatattctcaaaacatacaccatccctcggctgatctacatagctgaccactcagaagtgaaaagcgcactactcgaaacccttgaccagaagatccggacagcggtcaaggaatggcttcacctacctccgtgcacctgcgatgccatcctgtactcgagcacgagagacggcggtttgggcatcaccaaattggcaggactgatccccagcgtgcaggcccgtagactgcatcggatcgcacagtcatctgacgatacgatgaaatgcttcatggaaaaagagaaaatggaacagctgcataagaaattgtggattcaagctggaggggacagagagaacataccctcgatttgggaagcaccaccgtcgagtgaaccaccaaacaacgtgagcacaaattcggaatgggaagcaccgacccagaaagataaatttccaaagccttgcaattggaggaaaaacgaattcaaaaaatggaccaaattggcatcccaaggccgcggaattgtaaattttgaaagagacaaaattagtaaccattggatccaatactacagacgcatacctcacaggaaactcctcactgcactacaactcagggccaacgtttaccccacgagagaatttctagccaggggtagacaagaccaatacatcaaggcgtgtaggcactgcgatgcggacaacgaatcctgcgcccacatcatcggcaactgcccagtgacacaggacgcccgaatcaagaggcacaattacatctgcgaactgcttctcgaggaggcgaagaagaaggactgggtagtgttcaaggaaccgcacataagggattccaacaaggaactgtacaaacctgacctgatatttgtgaaggatgggcgtgcacttgtcgtggatgtgacagtacggtatgaagcagccaaatcatcgctggaggaagccgctgcagagaaagtgagaaagtacaaacacctggaaacggaagtaagacatctcacgaatgcaaaggacgttacttttgtgggctttcccctaggagcgcgggggaaatggcaccaagataactttaaacttttgactgagcttggcctctccaaatcgaggcaagtgaaaatggcagagactttttccacagtagcgctcttttcatctgtggacattgtacatatgtttgccagtagggccagaaaatctatggttatgtgataataggctgccttctgcggggcttgccttctggccatgcccttcttctctcccttgcacctgtacctcttggtctttgaataaagcctgagtaggaaggaccggtaaaaaaaaaaaaaaaaaaaaaaaaaaaaaaacgttgactaaaaaaaaaaaaaaaaaaaaaaaaaaaaaaaaaaaaaaaaaaaaaaaaaaaaaaaaaaaaaaaaaaaaaa

SEQ ID NO: 11063 - DNA, 5264 bp, synthetic construct
  source 1..5264: mol_type = other DNA
gaaataagagagaaaagaagagtaagaagaaatataagagaattcgccaccatggcccctaagaaaaagcggaaggtgaatatcagcggctctagctgcggcagccccaacagcgccgacatcagcagcgacttcaaggacctgtggaccaagctgaaggaatgccacgaccgggaagtgcagggactccaggtgaaggtcaccaaactcaagcaagaaagaatcctggacgcccagagactggaagaattcttcaccaagaaccagcagctgagagagcagcagaaagtgctgcacgagacaatcaaggttctggaagatagactgcgggccggcctgtgcgacagatgcgccgtgaccgaggaacacatgcgcaaaaagcagcaggagttcgagaacattagacagcaaaatctgaaattgatcacagagctgatgaacgagagaaacacactgcaggaggagaacaagaagctgagcgagcagctgcaacagaagatcgagaatgatcagcaacaccaggccgctgagctggaatgtgaagaggacgtgatccccgacagcccaatcacagctttcagcttttctggcgtgaacagactgaggcggaaggaaaacccccacgtgcggtacatcgagcagacccataccaagctggaacacagcgtgtgtgccaacgagatgagaaaggtgtccaagtcctccacccatccccagcacaaccctaacgaaaatgagatcctggtggctgatacctacgaccagtctcagagccctatggccaaggcccacggcaccagctcttatacccctgataagagctccttcaacctggccaccgtggtggccgagacactgggcctgggcgtgcaggaggaaagcgagacacagggcccaatgagccctctgggagatgagctgtaccactgcctggaaggcaaccacaagaaacagccttttgagtccggctccgagactcctggaacaagcgagagcgctacacctgagggcagccctaagagaaaggtgtccagcgccgagggcgctgccaaggaagagcctaaacggagaagcgccagactgagcgccaagccccccgccaaggtggaagccaagcctaagaaggccgccgctaaggacaagagcagcgataagaaagtccagaccaagggcaagcggggcgccaaaggcaaacaggccgaggtggccaaccaggagacaaaggaagatctgcctgctgagaacggcgaaaccaagaccgaggaatctccagcttctgacgaggccggagagaaggaggccaaaagcgacagcggctctgagacacctggaacaagcgagagcgccaccccggaatcctatgaacaacttgcaccacaaccgtgtgtgggagaaactttacattctagcctcccacgagacagtgaactgtttgtgcctgaagaggggagcagcgagaaggagagcgaggacgcgccaaaaacatctcctccgacgcctgggaaacatggtttggaacagactggggaggaaaaagtgatggtgactgttcctgacaaaaatccaccttgtccttgctgtggtacccgggtaaactctgtgttgaatctgattgaacatctgaaagtgtcacacgggaaaaggggggtttgttttcggtgtgcaaaatgtggaaaggaaaatagtaactatcacagtgttgtttgtcattttaagaaatgcaggggtccagagacggagaaagccccagctggggagtggatttgtgaggtatgcaacagagattttacaaccaaaattggcctgggacaacacaagagattggcacacccagcagtgagaaatcaggaaaggatcgttgcttcccaaccgaaagaaacatcaaatagaggtgctcacaaaaggtgctggacaaaggaggaggaagaattactaataagactggaggctcagttcgagggaaacaaaaatattaataagcttattgcagaacacataaccaccaaaacagctaagcagatcagtgacaaaaggcgattgctgtccagaaagccagcagaggagccacgtgaggagcctggaacgtgtcatcacaccaggagagcagctgcgagcctgagaacggagcctgagatgagtcatcacgcccaggcagaggacagagataatggacctgggagacgccctctgccaggcagggcagctgccggagggagaacaatggacgagataagacgccaccctgataagggcaacggacagcagagacccaccaagcaaaaatcagaagaacagctgcaggcttactataaaaagacactagaggaacgactttcagctggggcacttaacaccttcccccgagcattcaagcaggtaatggaaggccgggatataaagctagtaatcaatcagacagcgcaggactgcttcggatgcctggaatccataagccaaataagaacggcaacccgagataaaaaggacacggtgacccgggagaaacacccaaagaaaccttttcagaagtggatgaagaagagagcaatcaaaaaaggtaattatcttcggttccagcgtttattttatcttgatagagggaaactggctaaaatcattttagatgatattgaatgcttgtcttgtgacataccactcagtgaaatttattcggtttttaaaacaagatgggaaacaactggtagctttaaaagccttggggactttaaaacttacgggaaggctgacaacactgccttcagagaattaattacggctaaagaaattgagaaaaatgtgcaggaaatgagcaaaggctcggctcccggtccagacgggattactcttggggacgtcgtaaagatggatcccgagttttcccggaccatggagattttcaatttatggttaacaactggtaaaatcccggacatggtgagggggtgcagaaccgttttgattccaaaatcatcaaagccggatcgtttgaaagacattaataactggagacctatcacgatcggttccatcttgctgagactgttctccaggattgtaacagctaggctgagcaaagcgtgccccctgaacccaaggcaaagaggctttatcagagcggcgggatgctctgaaaacttaaaactcctgcaaactataatttggtcggccaaaagagaacacagaccactgggtgttgtattcgtggacatcgccaaggcttttgacaccgtaagccaccagcacatcattcatgctttgcagcaaagagaggtggatccccacatcgtcggtctggtgagcaatatgtacgagaacatcagtacgtatatcaccacaaagaggaacacacacacagacaaaatccagatccgggttggagtaaagcagggtgacccgatgtcgccccttttatttaacctggcaatggaccctctattatgcaagctggaagagagtggcaaaggataccaccgaggacagagcagcatcacagcgatggcatttgcagacgatctggttttgctgagcgactcctgggaaaatatgaatacaaatattagcatactggagaccttctgcaatctgaccggactcaaaacacaggggcaaaagtgccacggcttttacatcaagccgacaaaggactcttacaccatcaatgactgcgctgcctggactatcaacggcacacccctgaacatgatcgaccccggcgaatctgagaaatacctcggcctgcagtttgacccgtggattggaatagcaaggtccggtctctccacaaaactagatttttggcttcagcggatcgatcaagcaccacttaaacctctgcagaaaactgatattctcaaaacatacaccatccctcggctgatctacatagctgaccactcagaagtgaaaagcgcactactcgaaacccttgaccagaagatccggacagcggtcaaggaatggcttcacctacctccgtgcacctgcgatgccatcctgtactcgagcacgagagacggcggtttgggcatcaccaaattggcaggactgatccccagcgtgcaggcccgtagactgcatcggatcgcacagtcatctgacgatacgatgaaatgcttcatggaaaaagagaaaatggaacagctgcataagaaattgtggattcaagctggaggggacagagagaacataccctcgatttgggaagcaccaccgtcgagtgaaccaccaaacaacgtgagcacaaattcggaatgggaagcaccgacccagaaagataaatttccaaagccttgcaattggaggaaaaacgaattcaaaaaatggaccaaattggcatcccaaggccgcggaattgtaaattttgaaagagacaaaattagtaaccattggatccaatactacagacgcatacctcacaggaaactcctcactgcactacaactcagggccaacgtttaccccacgagagaatttctagccaggggtagacaagaccaatacatcaaggcgtgtaggcactgcgatgcggacaacgaatcctgcgcccacatcatcggcaactgcccagtgacacaggacgcccgaatcaagaggcacaattacatctgcgaactgcttctcgaggaggcgaagaagaaggactgggtagtgttcaaggaaccgcacataagggattccaacaaggaactgtacaaacctgacctgatatttgtgaaggatgggcgtgcacttgtcgtggatgtgacagtacggtatgaagcagccaaatcatcgctggaggaagccgctgcagagaaagtgagaaagtacaaacacctggaaacggaagtaagacatctcacgaatgcaaaggacgttacttttgtgggctttcccctaggagcgcgggggaaatggcaccaagataactttaaacttttgactgagcttggcctctccaaatcgaggcaagtgaaaatggcagagactttttccacagtagcgctcttttcatctgtggacattgtacatatgtttgccagtagggccagaaaatctatggttatgtgataataggctgccttctgcggggcttgccttctggccatgcccttcttctctcccttgcacctgtacctcttggtctttgaataaagcctgagtaggaaggaccggtaaaaaaaaaaaaaaaaaaaaaaaaaaaaaaacgttgactaaaaaaaaaaaaaaaaaaaaaaaaaaaaaaaaaaaaaaaaaaaaaaaaaaaaaaaaaaaaaaaaaaaaaa

SEQ ID NO: 11064 - DNA, 5264 bp, synthetic construct
  source 1..5264: mol_type = other DNA
gaaataagagagaaaagaagagtaagaagaaatataagagaattcgccaccatggcccctaagaaaaagcggaaggtgaatatcagcggctctagctgcggcagccccaacagcgccgacaccagcagcgacttcaaggacctgtggaccaagctgaaggaatgccacgaccgggaagtgcagggactccaggtgaaggtcaccaaactcaagcaagaaagaatcctggacgcccagagactggaagaattcttcaccaagaaccagcagctgagagagcagcagaaagtgctgcacgagacaatcaaggttctggaagatagactgcgggccggcctgtgcgacagatgcgccgtgaccgaggaacacatgcgcaaaaagcagcaggagttcgagaacattagacagcaaaatctgaaattgatcacagagctgatgaacgagaaaaacacactgcaggaggagaacaagaagctgagcgagcagctgcaacagaagatcgagaatgatcagcaacaccaggccgctgagctggaatgtgaagaggacgtgatccccgacagcccaatcacagctttcagcttttctggcgtgaacagactgaggcggaaggaaaacccccacgtgcggtacatcgagcagacccataccaagctggaacacagcgtgtgtgccaacgagatgagaaaggtgtccaagtcctccacccatccccagcacaaccctaacgaaaatgagatcctggtggctgatacctacgaccagtctcagagccctatggccaaggcccacggcaccagctcttatacccctgataagagctccttcaacctggccaccgtggtggccgagacactgggcctgggcgtgcaggaggaaagcgagacacagggcccaatgagccctctgggagatgagctgtaccactgcctggaaggcaaccacaagaaacagccttttgagtccggctccgagactcctggaacaagcgagagcgctacacctgagggcagccctaagagaaaggtgtccagcgccgagggcgctgccaaggaagagcctaaacggagaagcgccagactgagcgccaagccccccgccaaggtggaagccaagcctaagaaggccgccgctaaggacaagagcagcgataagaaagtccagaccaagggcaagcggggcgccaaaggcaaacaggccgaggtggccaaccaggagacaaaggaagatctgcctgctgagaacggcgaaaccaagaccgaggaatctccagcttctgacgaggccggagagaaggaggccaaaagcgacagcggctctgagacacctggaacaagcgagagcgccaccccggaatcctatgaacaacttgcaccacaaccgtgtgtgggagaaactttacattctagcctcccacgagacagtgaactgtttgtgcctgaagaggggagcagcgagaaggagagcgaggacgcgccaaaaacatctcctccgacgcctgggaaacatggtttggaacagactggggaggaaaaagtgatggtgactgttcctgacaaaaatccaccttgtccttgctgtggtacccgggtaaactctgtgttgaatctgattgaacatctgaaagtgtcacacgggaaaaggggggtttgttttcggtgtgcaaaatgtggaaaggaaaatagtaactatcacagtgttgtttgtcattttaagaaatgcaggggtccagagacggagaaagccccagctggggagtggatttgtgaggtatgcaacagagattttacaaccaaaattggcctgggacaacacaagagattggcacacccagcagtgagaaatcaggaaaggatcgttgcttcccaaccgaaagaaacatcaaatagaggtgctcacaaaaggtgctggacaaaggaggaggaagaattactaataagactggaggctcagttcgagggaaacaaaaatattaataagcttattgcagaacacataaccaccaaaacagctaagcagatcagtgacaaaaggcgattgctgtccagaaagccagcagaggagccacgtgaggagcctggaacgtgtcatcacaccaggagagcagctgcgagcctgagaacggagcctgagatgagtcatcacgcccaggcagaggacagagataatggacctgggagacgccctctgccaggcagggcagctgccggagggagaacaatggacgagataagacgccaccctgataagggcaacggacagcagagacccaccaagcaaaaatcagaagaacagctgcaggcttactataaaaagacactagaggaacgactttcagctggggcacttaacaccttcccccgagcattcaagcaggtaatggaaggccgggatataaagctagtaatcaatcagacagcgcaggactgcttcggatgcctggaatccataagccaaataagaacggcaacccgagataaaaaggacacggtgacccgggagaaacacccaaagaaaccttttcagaagtggatgaagaagagagcaatcaaaaaaggtaattatcttcggttccagcgtttattttatcttgatagagggaaactggctaaaatcattttagatgatattgaatgcttgtcttgtgacataccactcagtgaaatttattcggtttttaaaacaagatgggaaacaactggtagctttaaaagccttggggactttaaaacttacgggaaggctgacaacactgccttcagagaattaattacggctaaagaaattgagaaaaatgtgcaggaaatgagcaaaggctcggctcccggtccagacgggattactcttggggacgtcgtaaagatggatcccgagttttcccggaccatggagattttcaatttatggttaacaactggtaaaatcccggacatggtgagggggtgcagaaccgttttgattccaaaatcatcaaagccggatcgtttgaaagacattaataactggagacctatcacgatcggttccatcttgctgagactgttctccaggattgtaacagctaggctgagcaaagcgtgccccctgaacccaaggcaaagaggctttatcagagcggcgggatgctctgaaaacttaaaactcctgcaaactataatttggtcggccaaaagagaacacagaccactgggtgttgtattcgtggacatcgccaaggcttttgacaccgtaagccaccagcacatcattcatgctttgcagcaaagagaggtggatccccacatcgtcggtctggtgagcaatatgtacgagaacatcagtacgtatatcaccacaaagaggaacacacacacagacaaaatccagatccgggttggagtaaagcagggtgacccgatgtcgccccttttatttaacctggcaatggaccctctattatgcaagctggaagagagtggcaaaggataccaccgaggacagagcagcatcacagcgatggcatttgcagacgatctggttttgctgagcgactcctgggaaaatatgaatacaaatattagcatactggagaccttctgcaatctgaccggactcaaaacacaggggcaaaagtgccacggcttttacatcaagccgacaaaggactcttacaccatcaatgactgcgctgcctggactatcaacggcacacccctgaacatgatcgaccccggcgaatctgagaaatacctcggcctgcagtttgacccgtggattggaatagcaaggtccggtctctccacaaaactagatttttggcttcagcggatcgatcaagcaccacttaaacctctgcagaaaactgatattctcaaaacatacaccatccctcggctgatctacatagctgaccactcagaagtgaaaagcgcactactcgaaacccttgaccagaagatccggacagcggtcaaggaatggcttcacctacctccgtgcacctgcgatgccatcctgtactcgagcacgagagacggcggtttgggcatcaccaaattggcaggactgatccccagcgtgcaggcccgtagactgcatcggatcgcacagtcatctgacgatacgatgaaatgcttcatggaaaaagagaaaatggaacagctgcataagaaattgtggattcaagctggaggggacagagagaacataccctcgatttgggaagcaccaccgtcgagtgaaccaccaaacaacgtgagcacaaattcggaatgggaagcaccgacccagaaagataaatttccaaagccttgcaattggaggaaaaacgaattcaaaaaatggaccaaattggcatcccaaggccgcggaattgtaaattttgaaagagacaaaattagtaaccattggatccaatactacagacgcatacctcacaggaaactcctcactgcactacaactcagggccaacgtttaccccacgagagaatttctagccaggggtagacaagaccaatacatcaaggcgtgtaggcactgcgatgcggacaacgaatcctgcgcccacatcatcggcaactgcccagtgacacaggacgcccgaatcaagaggcacaattacatctgcgaactgcttctcgaggaggcgaagaagaaggactgggtagtgttcaaggaaccgcacataagggattccaacaaggaactgtacaaacctgacctgatatttgtgaaggatgggcgtgcacttgtcgtggatgtgacagtacggtatgaagcagccaaatcatcgctggaggaagccgctgcagagaaagtgagaaagtacaaacacctggaaacggaagtaagacatctcacgaatgcaaaggacgttacttttgtgggctttcccctaggagcgcgggggaaatggcaccaagataactttaaacttttgactgagcttggcctctccaaatcgaggcaagtgaaaatggcagagactttttccacagtagcgctcttttcatctgtggacattgtacatatgtttgccagtagggccagaaaatctatggttatgtgataataggctgccttctgcggggcttgccttctggccatgcccttcttctctcccttgcacctgtacctcttggtctttgaataaagcctgagtaggaaggaccggtaaaaaaaaaaaaaaaaaaaaaaaaaaaaaaacgttgactaaaaaaaaaaaaaaaaaaaaaaaaaaaaaaaaaaaaaaaaaaaaaaaaaaaaaaaaaaaaaaaaaaaaaa

SEQ ID NO: 11065 - DNA, 5264 bp, synthetic construct
  source 1..5264: mol_type = other DNA
gaaataagagagaaaagaagagtaagaagaaatataagagaattcgccaccatggcccctaagaaaaagcggaaggtgaatatcagcggctctagctgcggcagccccaacagcgccgacaccagcagcgacttcaaggacctgtggaccaagctgaaggaatgccacgaccgggaagtgcagggactccaggtgaaggtcaccaaactcaagcaagaaagaatcctggacgcccagagactggaagaattcttcaccaagaaccagcagctgagagagcagcagaaagtgctgcacgagacaatcaaggttctggaagatagactgcgggccggcctgtgcgacagatgcgccgtgaccgaggaacacatgcgcaaaaagcagcaggagttcgagaacattagacagcaaaatctgaaattgatcacagagctgatgaacgagagaaacacactgcaggaggagaacaagaagctgagcgagcagctgcaacagaagatcgagaatgatcagcaacaccaggccgctgagctggaatgtgaagaggacgtgatccccgacagcccaatcacagctttcagcttttctggcgtgaacagactgaggcggaaggaaaacctccacgtgcggtacatcgagcagacccataccaagctggaacacagcgtgtgtgccaacgagatgagaaaggtgtccaagtcctccacccatccccagcacaaccctaacgaaaatgagatcctggtggctgatacctacgaccagtctcagagccctatggccaaggcccacggcaccagctcttatacccctgataagagctccttcaacctggccaccgtggtggccgagacactgggcctgggcgtgcaggaggaaagcgagacacagggcccaatgagccctctgggagatgagctgtaccactgcctggaaggcaaccacaagaaacagccttttgagtccggctccgagactcctggaacaagcgagagcgctacacctgagggcagccctaagagaaaggtgtccagcgccgagggcgctgccaaggaagagcctaaacggagaagcgccagactgagcgccaagccccccgccaaggtggaagccaagcctaagaaggccgccgctaaggacaagagcagcgataagaaagtccagaccaagggcaagcggggcgccaaaggcaaacaggccgaggtggccaaccaggagacaaaggaagatctgcctgctgagaacggcgaaaccaagaccgaggaatctccagcttctgacgaggccggagagaaggaggccaaaagcgacagcggctctgagacacctggaacaagcgagagcgccaccccggaatcctatgaacaacttgcaccacaaccgtgtgtgggagaaactttacattctagcctcccacgagacagtgaactgtttgtgcctgaagaggggagcagcgagaaggagagcgaggacgcgccaaaaacatctcctccgacgcctgggaaacatggtttggaacagactggggaggaaaaagtgatggtgactgttcctgacaaaaatccaccttgtccttgctgtggtacccgggtaaactctgtgttgaatctgattgaacatctgaaagtgtcacacgggaaaaggggggtttgttttcggtgtgcaaaatgtggaaaggaaaatagtaactatcacagtgttgtttgtcattttaagaaatgcaggggtccagagacggagaaagccccagctggggagtggatttgtgaggtatgcaacagagattttacaaccaaaattggcctgggacaacacaagagattggcacacccagcagtgagaaatcaggaaaggatcgttgcttcccaaccgaaagaaacatcaaatagaggtgctcacaaaaggtgctggacaaaggaggaggaagaattactaataagactggaggctcagttcgagggaaacaaaaatattaataagcttattgcagaacacataaccaccaaaacagctaagcagatcagtgacaaaaggcgattgctgtccagaaagccagcagaggagccacgtgaggagcctggaacgtgtcatcacaccaggagagcagctgcgagcctgagaacggagcctgagatgagtcatcacgcccaggcagaggacagagataatggacctgggagacgccctctgccaggcagggcagctgccggagggagaacaatggacgagataagacgccaccctgataagggcaacggacagcagagacccaccaagcaaaaatcagaagaacagctgcaggcttactataaaaagacactagaggaacgactttcagctggggcacttaacaccttcccccgagcattcaagcaggtaatggaaggccgggatataaagctagtaatcaatcagacagcgcaggactgcttcggatgcctggaatccataagccaaataagaacggcaacccgagataaaaaggacacggtgacccgggagaaacacccaaagaaaccttttcagaagtggatgaagaagagagcaatcaaaaaaggtaattatcttcggttccagcgtttattttatcttgatagagggaaactggctaaaatcattttagatgatattgaatgcttgtcttgtgacataccactcagtgaaatttattcggtttttaaaacaagatgggaaacaactggtagctttaaaagccttggggactttaaaacttacgggaaggctgacaacactgccttcagagaattaattacggctaaagaaattgagaaaaatgtgcaggaaatgagcaaaggctcggctcccggtccagacgggattactcttggggacgtcgtaaagatggatcccgagttttcccggaccatggagattttcaatttatggttaacaactggtaaaatcccggacatggtgagggggtgcagaaccgttttgattccaaaatcatcaaagccggatcgtttgaaagacattaataactggagacctatcacgatcggttccatcttgctgagactgttctccaggattgtaacagctaggctgagcaaagcgtgccccctgaacccaaggcaaagaggctttatcagagcggcgggatgctctgaaaacttaaaactcctgcaaactataatttggtcggccaaaagagaacacagaccactgggtgttgtattcgtggacatcgccaaggcttttgacaccgtaagccaccagcacatcattcatgctttgcagcaaagagaggtggatccccacatcgtcggtctggtgagcaatatgtacgagaacatcagtacgtatatcaccacaaagaggaacacacacacagacaaaatccagatccgggttggagtaaagcagggtgacccgatgtcgccccttttatttaacctggcaatggaccctctattatgcaagctggaagagagtggcaaaggataccaccgaggacagagcagcatcacagcgatggcatttgcagacgatctggttttgctgagcgactcctgggaaaatatgaatacaaatattagcatactggagaccttctgcaatctgaccggactcaaaacacaggggcaaaagtgccacggcttttacatcaagccgacaaaggactcttacaccatcaatgactgcgctgcctggactatcaacggcacacccctgaacatgatcgaccccggcgaatctgagaaatacctcggcctgcagtttgacccgtggattggaatagcaaggtccggtctctccacaaaactagatttttggcttcagcggatcgatcaagcaccacttaaacctctgcagaaaactgatattctcaaaacatacaccatccctcggctgatctacatagctgaccactcagaagtgaaaagcgcactactcgaaacccttgaccagaagatccggacagcggtcaaggaatggcttcacctacctccgtgcacctgcgatgccatcctgtactcgagcacgagagacggcggtttgggcatcaccaaattggcaggactgatccccagcgtgcaggcccgtagactgcatcggatcgcacagtcatctgacgatacgatgaaatgcttcatggaaaaagagaaaatggaacagctgcataagaaattgtggattcaagctggaggggacagagagaacataccctcgatttgggaagcaccaccgtcgagtgaaccaccaaacaacgtgagcacaaattcggaatgggaagcaccgacccagaaagataaatttccaaagccttgcaattggaggaaaaacgaattcaaaaaatggaccaaattggcatcccaaggccgcggaattgtaaattttgaaagagacaaaattagtaaccattggatccaatactacagacgcatacctcacaggaaactcctcactgcactacaactcagggccaacgtttaccccacgagagaatttctagccaggggtagacaagaccaatacatcaaggcgtgtaggcactgcgatgcggacaacgaatcctgcgcccacatcatcggcaactgcccagtgacacaggacgcccgaatcaagaggcacaattacatctgcgaactgcttctcgaggaggcgaagaagaaggactgggtagtgttcaaggaaccgcacataagggattccaacaaggaactgtacaaacctgacctgatatttgtgaaggatgggcgtgcacttgtcgtggatgtgacagtacggtatgaagcagccaaatcatcgctggaggaagccgctgcagagaaagtgagaaagtacaaacacctggaaacggaagtaagacatctcacgaatgcaaaggacgttacttttgtgggctttcccctaggagcgcgggggaaatggcaccaagataactttaaacttttgactgagcttggcctctccaaatcgaggcaagtgaaaatggcagagactttttccacagtagcgctcttttcatctgtggacattgtacatatgtttgccagtagggccagaaaatctatggttatgtgataataggctgccttctgcggggcttgccttctggccatgcccttcttctctcccttgcacctgtacctcttggtctttgaataaagcctgagtaggaaggaccggtaaaaaaaaaaaaaaaaaaaaaaaaaaaaaaacgttgactaaaaaaaaaaaaaaaaaaaaaaaaaaaaaaaaaaaaaaaaaaaaaaaaaaaaaaaaaaaaaaaaaaaaaa

SEQ ID NO: 11066 - DNA, 5264 bp, synthetic construct
  source 1..5264: mol_type = other DNA
gaaataagagagaaaagaagagtaagaagaaatataagagaattcgccaccatggcccctaagaaaaagcggaaggtgaatatcagcggctctagctgcggcagccccaacagcgccgacaccagcagcgacttcaaggacctgtggaccaagctgaaggaatgccacgaccgggaagtgcagggactccaggtgaaggtcaccaaactcaagcaagaaagaatcctggacgcccagagactggaagaattcttcaccaagaaccagcagctgagagagcagcagaaagtgctgcacgagacaatcaaggttctggaagatagactgcgggccggcctgtgcgacagatgcgccgtgaccgaggaacacatgcgcaaaaagcagcaggagttcgagaacattagacagcaaaatctgaaattgatcacagagctgatgaacgagagaaacacactgcaggaggagaacaagaagctgagcgagcagctgcaacagaagatcgagaatgatcagcaacaccaggccgctgagctggaatgtgaagaggacgtgatccccgacagcccaatcacagctttcagcttttctggcgtgaacagactgaggcggaaggaaaacccccacgtgcggtacatcgagcagacccataccaagctggaacacagcgtgtgtgccaacgagctgagaaaggtgtccaagtcctccacccatccccagcacaaccctaacgaaaatgagatcctggtggctgatacctacgaccagtctcagagccctatggccaaggcccacggcaccagctcttatacccctgataagagctccttcaacctggccaccgtggtggccgagacactgggcctgggcgtgcaggaggaaagcgagacacagggcccaatgagccctctgggagatgagctgtaccactgcctggaaggcaaccacaagaaacagccttttgagtccggctccgagactcctggaacaagcgagagcgctacacctgagggcagccctaagagaaaggtgtccagcgccgagggcgctgccaaggaagagcctaaacggagaagcgccagactgagcgccaagccccccgccaaggtggaagccaagcctaagaaggccgccgctaaggacaagagcagcgataagaaagtccagaccaagggcaagcggggcgccaaaggcaaacaggccgaggtggccaaccaggagacaaaggaagatctgcctgctgagaacggcgaaaccaagaccgaggaatctccagcttctgacgaggccggagagaaggaggccaaaagcgacagcggctctgagacacctggaacaagcgagagcgccaccccggaatcctatgaacaacttgcaccacaaccgtgtgtgggagaaactttacattctagcctcccacgagacagtgaactgtttgtgcctgaagaggggagcagcgagaaggagagcgaggacgcgccaaaaacatctcctccgacgcctgggaaacatggtttggaacagactggggaggaaaaagtgatggtgactgttcctgacaaaaatccaccttgtccttgctgtggtacccgggtaaactctgtgttgaatctgattgaacatctgaaagtgtcacacgggaaaaggggggtttgttttcggtgtgcaaaatgtggaaaggaaaatagtaactatcacagtgttgtttgtcattttaagaaatgcaggggtccagagacggagaaagccccagctggggagtggatttgtgaggtatgcaacagagattttacaaccaaaattggcctgggacaacacaagagattggcacacccagcagtgagaaatcaggaaaggatcgttgcttcccaaccgaaagaaacatcaaatagaggtgctcacaaaaggtgctggacaaaggaggaggaagaattactaataagactggaggctcagttcgagggaaacaaaaatattaataagcttattgcagaacacataaccaccaaaacagctaagcagatcagtgacaaaaggcgattgctgtccagaaagccagcagaggagccacgtgaggagcctggaacgtgtcatcacaccaggagagcagctgcgagcctgagaacggagcctgagatgagtcatcacgcccaggcagaggacagagataatggacctgggagacgccctctgccaggcagggcagctgccggagggagaacaatggacgagataagacgccaccctgataagggcaacggacagcagagacccaccaagcaaaaatcagaagaacagctgcaggcttactataaaaagacactagaggaacgactttcagctggggcacttaacaccttcccccgagcattcaagcaggtaatggaaggccgggatataaagctagtaatcaatcagacagcgcaggactgcttcggatgcctggaatccataagccaaataagaacggcaacccgagataaaaaggacacggtgacccgggagaaacacccaaagaaaccttttcagaagtggatgaagaagagagcaatcaaaaaaggtaattatcttcggttccagcgtttattttatcttgatagagggaaactggctaaaatcattttagatgatattgaatgcttgtcttgtgacataccactcagtgaaatttattcggtttttaaaacaagatgggaaacaactggtagctttaaaagccttggggactttaaaacttacgggaaggctgacaacactgccttcagagaattaattacggctaaagaaattgagaaaaatgtgcaggaaatgagcaaaggctcggctcccggtccagacgggattactcttggggacgtcgtaaagatggatcccgagttttcccggaccatggagattttcaatttatggttaacaactggtaaaatcccggacatggtgagggggtgcagaaccgttttgattccaaaatcatcaaagccggatcgtttgaaagacattaataactggagacctatcacgatcggttccatcttgctgagactgttctccaggattgtaacagctaggctgagcaaagcgtgccccctgaacccaaggcaaagaggctttatcagagcggcgggatgctctgaaaacttaaaactcctgcaaactataatttggtcggccaaaagagaacacagaccactgggtgttgtattcgtggacatcgccaaggcttttgacaccgtaagccaccagcacatcattcatgctttgcagcaaagagaggtggatccccacatcgtcggtctggtgagcaatatgtacgagaacatcagtacgtatatcaccacaaagaggaacacacacacagacaaaatccagatccgggttggagtaaagcagggtgacccgatgtcgccccttttatttaacctggcaatggaccctctattatgcaagctggaagagagtggcaaaggataccaccgaggacagagcagcatcacagcgatggcatttgcagacgatctggttttgctgagcgactcctgggaaaatatgaatacaaatattagcatactggagaccttctgcaatctgaccggactcaaaacacaggggcaaaagtgccacggcttttacatcaagccgacaaaggactcttacaccatcaatgactgcgctgcctggactatcaacggcacacccctgaacatgatcgaccccggcgaatctgagaaatacctcggcctgcagtttgacccgtggattggaatagcaaggtccggtctctccacaaaactagatttttggcttcagcggatcgatcaagcaccacttaaacctctgcagaaaactgatattctcaaaacatacaccatccctcggctgatctacatagctgaccactcagaagtgaaaagcgcactactcgaaacccttgaccagaagatccggacagcggtcaaggaatggcttcacctacctccgtgcacctgcgatgccatcctgtactcgagcacgagagacggcggtttgggcatcaccaaattggcaggactgatccccagcgtgcaggcccgtagactgcatcggatcgcacagtcatctgacgatacgatgaaatgcttcatggaaaaagagaaaatggaacagctgcataagaaattgtggattcaagctggaggggacagagagaacataccctcgatttgggaagcaccaccgtcgagtgaaccaccaaacaacgtgagcacaaattcggaatgggaagcaccgacccagaaagataaatttccaaagccttgcaattggaggaaaaacgaattcaaaaaatggaccaaattggcatcccaaggccgcggaattgtaaattttgaaagagacaaaattagtaaccattggatccaatactacagacgcatacctcacaggaaactcctcactgcactacaactcagggccaacgtttaccccacgagagaatttctagccaggggtagacaagaccaatacatcaaggcgtgtaggcactgcgatgcggacaacgaatcctgcgcccacatcatcggcaactgcccagtgacacaggacgcccgaatcaagaggcacaattacatctgcgaactgcttctcgaggaggcgaagaagaaggactgggtagtgttcaaggaaccgcacataagggattccaacaaggaactgtacaaacctgacctgatatttgtgaaggatgggcgtgcacttgtcgtggatgtgacagtacggtatgaagcagccaaatcatcgctggaggaagccgctgcagagaaagtgagaaagtacaaacacctggaaacggaagtaagacatctcacgaatgcaaaggacgttacttttgtgggctttcccctaggagcgcgggggaaatggcaccaagataactttaaacttttgactgagcttggcctctccaaatcgaggcaagtgaaaatggcagagactttttccacagtagcgctcttttcatctgtggacattgtacatatgtttgccagtagggccagaaaatctatggttatgtgataataggctgccttctgcggggcttgccttctggccatgcccttcttctctcccttgcacctgtacctcttggtctttgaataaagcctgagtaggaaggaccggtaaaaaaaaaaaaaaaaaaaaaaaaaaaaaaacgttgactaaaaaaaaaaaaaaaaaaaaaaaaaaaaaaaaaaaaaaaaaaaaaaaaaaaaaaaaaaaaaaaaaaaaaa

SEQ ID NO: 11067 - DNA, 5264 bp, synthetic construct
  source 1..5264: mol_type = other DNA
gaaataagagagaaaagaagagtaagaagaaatataagagaattcgccaccatggcccctaagaaaaagcggaaggtgaatatcagcggctctagctgcggcagccccaacagcgccgacaccagcagcgacttcaaggacctgtggaccaagctgaaggaatgccacgaccgggaagtgcagggactccaggtgaaggtcaccaaactcaagcaagaaagaatcctggacgcccagagactggaagaattcttcaccaagaaccagcagctgagagagcagcagaaagtgctgcacgagacaatcaaggttctggaagatagactgcgggccggcctgtgcgacagatgcgccgtgaccgaggaacacatgcgcaaaaagcagcaggagttcgagaacattagacagcaaaatctgaaattgatcacagagctgatgaacgagagaaacacactgcaggaggagaacaagaagctgagcgagcagctgcaacagaagatcgagaatgatcagcaacaccaggccgctgagctggaatgtgaagaggacgtgatccccgacagcccaatcacagctttcagcttttctggcgtgaacagactgaggcggaaggaaaacccccacgtgcggtacatcgagcagacccataccaagctggaacacagcgtgtgtgccaacgagtttagaaaggtgtccaagtcctccacccatccccagcacaaccctaacgaaaatgagatcctggtggctgatacctacgaccagtctcagagccctatggccaaggcccacggcaccagctcttatacccctgataagagctccttcaacctggccaccgtggtggccgagacactgggcctgggcgtgcaggaggaaagcgagacacagggcccaatgagccctctgggagatgagctgtaccactgcctggaaggcaaccacaagaaacagccttttgagtccggctccgagactcctggaacaagcgagagcgctacacctgagggcagccctaagagaaaggtgtccagcgccgagggcgctgccaaggaagagcctaaacggagaagcgccagactgagcgccaagccccccgccaaggtggaagccaagcctaagaaggccgccgctaaggacaagagcagcgataagaaagtccagaccaagggcaagcggggcgccaaaggcaaacaggccgaggtggccaaccaggagacaaaggaagatctgcctgctgagaacggcgaaaccaagaccgaggaatctccagcttctgacgaggccggagagaaggaggccaaaagcgacagcggctctgagacacctggaacaagcgagagcgccaccccggaatcctatgaacaacttgcaccacaaccgtgtgtgggagaaactttacattctagcctcccacgagacagtgaactgtttgtgcctgaagaggggagcagcgagaaggagagcgaggacgcgccaaaaacatctcctccgacgcctgggaaacatggtttggaacagactggggaggaaaaagtgatggtgactgttcctgacaaaaatccaccttgtccttgctgtggtacccgggtaaactctgtgttgaatctgattgaacatctgaaagtgtcacacgggaaaaggggggtttgttttcggtgtgcaaaatgtggaaaggaaaatagtaactatcacagtgttgtttgtcattttaagaaatgcaggggtccagagacggagaaagccccagctggggagtggatttgtgaggtatgcaacagagattttacaaccaaaattggcctgggacaacacaagagattggcacacccagcagtgagaaatcaggaaaggatcgttgcttcccaaccgaaagaaacatcaaatagaggtgctcacaaaaggtgctggacaaaggaggaggaagaattactaataagactggaggctcagttcgagggaaacaaaaatattaataagcttattgcagaacacataaccaccaaaacagctaagcagatcagtgacaaaaggcgattgctgtccagaaagccagcagaggagccacgtgaggagcctggaacgtgtcatcacaccaggagagcagctgcgagcctgagaacggagcctgagatgagtcatcacgcccaggcagaggacagagataatggacctgggagacgccctctgccaggcagggcagctgccggagggagaacaatggacgagataagacgccaccctgataagggcaacggacagcagagacccaccaagcaaaaatcagaagaacagctgcaggcttactataaaaagacactagaggaacgactttcagctggggcacttaacaccttcccccgagcattcaagcaggtaatggaaggccgggatataaagctagtaatcaatcagacagcgcaggactgcttcggatgcctggaatccataagccaaataagaacggcaacccgagataaaaaggacacggtgacccgggagaaacacccaaagaaaccttttcagaagtggatgaagaagagagcaatcaaaaaaggtaattatcttcggttccagcgtttattttatcttgatagagggaaactggctaaaatcattttagatgatattgaatgcttgtcttgtgacataccactcagtgaaatttattcggtttttaaaacaagatgggaaacaactggtagctttaaaagccttggggactttaaaacttacgggaaggctgacaacactgccttcagagaattaattacggctaaagaaattgagaaaaatgtgcaggaaatgagcaaaggctcggctcccggtccagacgggattactcttggggacgtcgtaaagatggatcccgagttttcccggaccatggagattttcaatttatggttaacaactggtaaaatcccggacatggtgagggggtgcagaaccgttttgattccaaaatcatcaaagccggatcgtttgaaagacattaataactggagacctatcacgatcggttccatcttgctgagactgttctccaggattgtaacagctaggctgagcaaagcgtgccccctgaacccaaggcaaagaggctttatcagagcggcgggatgctctgaaaacttaaaactcctgcaaactataatttggtcggccaaaagagaacacagaccactgggtgttgtattcgtggacatcgccaaggcttttgacaccgtaagccaccagcacatcattcatgctttgcagcaaagagaggtggatccccacatcgtcggtctggtgagcaatatgtacgagaacatcagtacgtatatcaccacaaagaggaacacacacacagacaaaatccagatccgggttggagtaaagcagggtgacccgatgtcgccccttttatttaacctggcaatggaccctctattatgcaagctggaagagagtggcaaaggataccaccgaggacagagcagcatcacagcgatggcatttgcagacgatctggttttgctgagcgactcctgggaaaatatgaatacaaatattagcatactggagaccttctgcaatctgaccggactcaaaacacaggggcaaaagtgccacggcttttacatcaagccgacaaaggactcttacaccatcaatgactgcgctgcctggactatcaacggcacacccctgaacatgatcgaccccggcgaatctgagaaatacctcggcctgcagtttgacccgtggattggaatagcaaggtccggtctctccacaaaactagatttttggcttcagcggatcgatcaagcaccacttaaacctctgcagaaaactgatattctcaaaacatacaccatccctcggctgatctacatagctgaccactcagaagtgaaaagcgcactactcgaaacccttgaccagaagatccggacagcggtcaaggaatggcttcacctacctccgtgcacctgcgatgccatcctgtactcgagcacgagagacggcggtttgggcatcaccaaattggcaggactgatccccagcgtgcaggcccgtagactgcatcggatcgcacagtcatctgacgatacgatgaaatgcttcatggaaaaagagaaaatggaacagctgcataagaaattgtggattcaagctggaggggacagagagaacataccctcgatttgggaagcaccaccgtcgagtgaaccaccaaacaacgtgagcacaaattcggaatgggaagcaccgacccagaaagataaatttccaaagccttgcaattggaggaaaaacgaattcaaaaaatggaccaaattggcatcccaaggccgcggaattgtaaattttgaaagagacaaaattagtaaccattggatccaatactacagacgcatacctcacaggaaactcctcactgcactacaactcagggccaacgtttaccccacgagagaatttctagccaggggtagacaagaccaatacatcaaggcgtgtaggcactgcgatgcggacaacgaatcctgcgcccacatcatcggcaactgcccagtgacacaggacgcccgaatcaagaggcacaattacatctgcgaactgcttctcgaggaggcgaagaagaaggactgggtagtgttcaaggaaccgcacataagggattccaacaaggaactgtacaaacctgacctgatatttgtgaaggatgggcgtgcacttgtcgtggatgtgacagtacggtatgaagcagccaaatcatcgctggaggaagccgctgcagagaaagtgagaaagtacaaacacctggaaacggaagtaagacatctcacgaatgcaaaggacgttacttttgtgggctttcccctaggagcgcgggggaaatggcaccaagataactttaaacttttgactgagcttggcctctccaaatcgaggcaagtgaaaatggcagagactttttccacagtagcgctcttttcatctgtggacattgtacatatgtttgccagtagggccagaaaatctatggttatgtgataataggctgccttctgcggggcttgccttctggccatgcccttcttctctcccttgcacctgtacctcttggtctttgaataaagcctgagtaggaaggaccggtaaaaaaaaaaaaaaaaaaaaaaaaaaaaaaacgttgactaaaaaaaaaaaaaaaaaaaaaaaaaaaaaaaaaaaaaaaaaaaaaaaaaaaaaaaaaaaaaaaaaaaaaa

SEQ ID NO: 11068 - DNA, 5264 bp, synthetic construct
  source 1..5264: mol_type = other DNA
gaaataagagagaaaagaagagtaagaagaaatataagagaattcgccaccatggcccctaagaaaaagcggaaggtgaatatcagcggctctagctgcggcagccccaacagcgccgacaccagcagcgacttcaaggacctgtggaccaagctgaaggaatgccacgaccgggaagtgcagggactccaggtgaaggtcaccaaactcaagcaagaaagaatcctggacgcccagagactggaagaattcttcaccaagaaccagcagctgagagagcagcagaaagtgctgcacgagacaatcaaggttctggaagatagactgcgggccggcctgtgcgacagatgcgccgtgaccgaggaacacatgcgcaaaaagcagcaggagttcgagaacattagacagcaaaatctgaaattgatcacagagctgatgaacgagagaaacacactgcaggaggagaacaagaagctgagcgagcagctgcaacagaagatcgagaatgatcagcaacaccaggccgctgagctggaatgtgaagaggacgtgatccccgacagcccaatcacagctttcagcttttctggcgtgaacagactgaggcggaaggaaaacccccacgtgcggtacatcgagcagacccataccaagctggaacacagcgtgtgtgccaacgagaccagaaaggtgtccaagtcctccacccatccccagcacaaccctaacgaaaatgagatcctggtggctgatacctacgaccagtctcagagccctatggccaaggcccacggcaccagctcttatacccctgataagagctccttcaacctggccaccgtggtggccgagacactgggcctgggcgtgcaggaggaaagcgagacacagggcccaatgagccctctgggagatgagctgtaccactgcctggaaggcaaccacaagaaacagccttttgagtccggctccgagactcctggaacaagcgagagcgctacacctgagggcagccctaagagaaaggtgtccagcgccgagggcgctgccaaggaagagcctaaacggagaagcgccagactgagcgccaagccccccgccaaggtggaagccaagcctaagaaggccgccgctaaggacaagagcagcgataagaaagtccagaccaagggcaagcggggcgccaaaggcaaacaggccgaggtggccaaccaggagacaaaggaagatctgcctgctgagaacggcgaaaccaagaccgaggaatctccagcttctgacgaggccggagagaaggaggccaaaagcgacagcggctctgagacacctggaacaagcgagagcgccaccccggaatcctatgaacaacttgcaccacaaccgtgtgtgggagaaactttacattctagcctcccacgagacagtgaactgtttgtgcctgaagaggggagcagcgagaaggagagcgaggacgcgccaaaaacatctcctccgacgcctgggaaacatggtttggaacagactggggaggaaaaagtgatggtgactgttcctgacaaaaatccaccttgtccttgctgtggtacccgggtaaactctgtgttgaatctgattgaacatctgaaagtgtcacacgggaaaaggggggtttgttttcggtgtgcaaaatgtggaaaggaaaatagtaactatcacagtgttgtttgtcattttaagaaatgcaggggtccagagacggagaaagccccagctggggagtggatttgtgaggtatgcaacagagattttacaaccaaaattggcctgggacaacacaagagattggcacacccagcagtgagaaatcaggaaaggatcgttgcttcccaaccgaaagaaacatcaaatagaggtgctcacaaaaggtgctggacaaaggaggaggaagaattactaataagactggaggctcagttcgagggaaacaaaaatattaataagcttattgcagaacacataaccaccaaaacagctaagcagatcagtgacaaaaggcgattgctgtccagaaagccagcagaggagccacgtgaggagcctggaacgtgtcatcacaccaggagagcagctgcgagcctgagaacggagcctgagatgagtcatcacgcccaggcagaggacagagataatggacctgggagacgccctctgccaggcagggcagctgccggagggagaacaatggacgagataagacgccaccctgataagggcaacggacagcagagacccaccaagcaaaaatcagaagaacagctgcaggcttactataaaaagacactagaggaacgactttcagctggggcacttaacaccttcccccgagcattcaagcaggtaatggaaggccgggatataaagctagtaatcaatcagacagcgcaggactgcttcggatgcctggaatccataagccaaataagaacggcaacccgagataaaaaggacacggtgacccgggagaaacacccaaagaaaccttttcagaagtggatgaagaagagagcaatcaaaaaaggtaattatcttcggttccagcgtttattttatcttgatagagggaaactggctaaaatcattttagatgatattgaatgcttgtcttgtgacataccactcagtgaaatttattcggtttttaaaacaagatgggaaacaactggtagctttaaaagccttggggactttaaaacttacgggaaggctgacaacactgccttcagagaattaattacggctaaagaaattgagaaaaatgtgcaggaaatgagcaaaggctcggctcccggtccagacgggattactcttggggacgtcgtaaagatggatcccgagttttcccggaccatggagattttcaatttatggttaacaactggtaaaatcccggacatggtgagggggtgcagaaccgttttgattccaaaatcatcaaagccggatcgtttgaaagacattaataactggagacctatcacgatcggttccatcttgctgagactgttctccaggattgtaacagctaggctgagcaaagcgtgccccctgaacccaaggcaaagaggctttatcagagcggcgggatgctctgaaaacttaaaactcctgcaaactataatttggtcggccaaaagagaacacagaccactgggtgttgtattcgtggacatcgccaaggcttttgacaccgtaagccaccagcacatcattcatgctttgcagcaaagagaggtggatccccacatcgtcggtctggtgagcaatatgtacgagaacatcagtacgtatatcaccacaaagaggaacacacacacagacaaaatccagatccgggttggagtaaagcagggtgacccgatgtcgccccttttatttaacctggcaatggaccctctattatgcaagctggaagagagtggcaaaggataccaccgaggacagagcagcatcacagcgatggcatttgcagacgatctggttttgctgagcgactcctgggaaaatatgaatacaaatattagcatactggagaccttctgcaatctgaccggactcaaaacacaggggcaaaagtgccacggcttttacatcaagccgacaaaggactcttacaccatcaatgactgcgctgcctggactatcaacggcacacccctgaacatgatcgaccccggcgaatctgagaaatacctcggcctgcagtttgacccgtggattggaatagcaaggtccggtctctccacaaaactagatttttggcttcagcggatcgatcaagcaccacttaaacctctgcagaaaactgatattctcaaaacatacaccatccctcggctgatctacatagctgaccactcagaagtgaaaagcgcactactcgaaacccttgaccagaagatccggacagcggtcaaggaatggcttcacctacctccgtgcacctgcgatgccatcctgtactcgagcacgagagacggcggtttgggcatcaccaaattggcaggactgatccccagcgtgcaggcccgtagactgcatcggatcgcacagtcatctgacgatacgatgaaatgcttcatggaaaaagagaaaatggaacagctgcataagaaattgtggattcaagctggaggggacagagagaacataccctcgatttgggaagcaccaccgtcgagtgaaccaccaaacaacgtgagcacaaattcggaatgggaagcaccgacccagaaagataaatttccaaagccttgcaattggaggaaaaacgaattcaaaaaatggaccaaattggcatcccaaggccgcggaattgtaaattttgaaagagacaaaattagtaaccattggatccaatactacagacgcatacctcacaggaaactcctcactgcactacaactcagggccaacgtttaccccacgagagaatttctagccaggggtagacaagaccaatacatcaaggcgtgtaggcactgcgatgcggacaacgaatcctgcgcccacatcatcggcaactgcccagtgacacaggacgcccgaatcaagaggcacaattacatctgcgaactgcttctcgaggaggcgaagaagaaggactgggtagtgttcaaggaaccgcacataagggattccaacaaggaactgtacaaacctgacctgatatttgtgaaggatgggcgtgcacttgtcgtggatgtgacagtacggtatgaagcagccaaatcatcgctggaggaagccgctgcagagaaagtgagaaagtacaaacacctggaaacggaagtaagacatctcacgaatgcaaaggacgttacttttgtgggctttcccctaggagcgcgggggaaatggcaccaagataactttaaacttttgactgagcttggcctctccaaatcgaggcaagtgaaaatggcagagactttttccacagtagcgctcttttcatctgtggacattgtacatatgtttgccagtagggccagaaaatctatggttatgtgataataggctgccttctgcggggcttgccttctggccatgcccttcttctctcccttgcacctgtacctcttggtctttgaataaagcctgagtaggaaggaccggtaaaaaaaaaaaaaaaaaaaaaaaaaaaaaaacgttgactaaaaaaaaaaaaaaaaaaaaaaaaaaaaaaaaaaaaaaaaaaaaaaaaaaaaaaaaaaaaaaaaaaaaaa

SEQ ID NO: 11069 - DNA, 5264 bp, synthetic construct
  source 1..5264: mol_type = other DNA
gaaataagagagaaaagaagagtaagaagaaatataagagaattcgccaccatggcccctaagaaaaagcggaaggtgaatatcagcggctctagctgcggcagccccaacagcgccgacaccagcagcgacttcaaggacctgtggaccaagctgaaggaatgccacgaccgggaagtgcagggactccaggtgaaggtcaccaaactcaagcaagaaagaatcctggacgcccagagactggaagaattcttcaccaagaaccagcagctgagagagcagcagaaagtgctgcacgagacaatcaaggttctggaagatagactgcgggccggcctgtgcgacagatgcgccgtgaccgaggaacacatgcgcaaaaagcagcaggagttcgagaacattagacagcaaaatctgaaattgatcacagagctgatgaacgagagaaacacactgcaggaggagaacaagaagctgagcgagcagctgcaacagaagatcgagaatgatcagcaacaccaggccgctgagctggaatgtgaagaggacgtgatccccgacagcccaatcacagctttcagcttttctggcgtgaacagactgaggcggaaggaaaacccccacgtgcggtacatcgagcagacccataccaagctggaacacagcgtgtgtgccaacgagatgagaaaggtgtccaagtcctccacccatccccagcacaaccctaacgaaaatgagatcctggtggctgatacctacgaccagtctcagagccctatggccaagacccacggcaccagctcttatacccctgataagagctccttcaacctggccaccgtggtggccgagacactgggcctgggcgtgcaggaggaaagcgagacacagggcccaatgagccctctgggagatgagctgtaccactgcctggaaggcaaccacaagaaacagccttttgagtccggctccgagactcctggaacaagcgagagcgctacacctgagggcagccctaagagaaaggtgtccagcgccgagggcgctgccaaggaagagcctaaacggagaagcgccagactgagcgccaagccccccgccaaggtggaagccaagcctaagaaggccgccgctaaggacaagagcagcgataagaaagtccagaccaagggcaagcggggcgccaaaggcaaacaggccgaggtggccaaccaggagacaaaggaagatctgcctgctgagaacggcgaaaccaagaccgaggaatctccagcttctgacgaggccggagagaaggaggccaaaagcgacagcggctctgagacacctggaacaagcgagagcgccaccccggaatcctatgaacaacttgcaccacaaccgtgtgtgggagaaactttacattctagcctcccacgagacagtgaactgtttgtgcctgaagaggggagcagcgagaaggagagcgaggacgcgccaaaaacatctcctccgacgcctgggaaacatggtttggaacagactggggaggaaaaagtgatggtgactgttcctgacaaaaatccaccttgtccttgctgtggtacccgggtaaactctgtgttgaatctgattgaacatctgaaagtgtcacacgggaaaaggggggtttgttttcggtgtgcaaaatgtggaaaggaaaatagtaactatcacagtgttgtttgtcattttaagaaatgcaggggtccagagacggagaaagccccagctggggagtggatttgtgaggtatgcaacagagattttacaaccaaaattggcctgggacaacacaagagattggcacacccagcagtgagaaatcaggaaaggatcgttgcttcccaaccgaaagaaacatcaaatagaggtgctcacaaaaggtgctggacaaaggaggaggaagaattactaataagactggaggctcagttcgagggaaacaaaaatattaataagcttattgcagaacacataaccaccaaaacagctaagcagatcagtgacaaaaggcgattgctgtccagaaagccagcagaggagccacgtgaggagcctggaacgtgtcatcacaccaggagagcagctgcgagcctgagaacggagcctgagatgagtcatcacgcccaggcagaggacagagataatggacctgggagacgccctctgccaggcagggcagctgccggagggagaacaatggacgagataagacgccaccctgataagggcaacggacagcagagacccaccaagcaaaaatcagaagaacagctgcaggcttactataaaaagacactagaggaacgactttcagctggggcacttaacaccttcccccgagcattcaagcaggtaatggaaggccgggatataaagctagtaatcaatcagacagcgcaggactgcttcggatgcctggaatccataagccaaataagaacggcaacccgagataaaaaggacacggtgacccgggagaaacacccaaagaaaccttttcagaagtggatgaagaagagagcaatcaaaaaaggtaattatcttcggttccagcgtttattttatcttgatagagggaaactggctaaaatcattttagatgatattgaatgcttgtcttgtgacataccactcagtgaaatttattcggtttttaaaacaagatgggaaacaactggtagctttaaaagccttggggactttaaaacttacgggaaggctgacaacactgccttcagagaattaattacggctaaagaaattgagaaaaatgtgcaggaaatgagcaaaggctcggctcccggtccagacgggattactcttggggacgtcgtaaagatggatcccgagttttcccggaccatggagattttcaatttatggttaacaactggtaaaatcccggacatggtgagggggtgcagaaccgttttgattccaaaatcatcaaagccggatcgtttgaaagacattaataactggagacctatcacgatcggttccatcttgctgagactgttctccaggattgtaacagctaggctgagcaaagcgtgccccctgaacccaaggcaaagaggctttatcagagcggcgggatgctctgaaaacttaaaactcctgcaaactataatttggtcggccaaaagagaacacagaccactgggtgttgtattcgtggacatcgccaaggcttttgacaccgtaagccaccagcacatcattcatgctttgcagcaaagagaggtggatccccacatcgtcggtctggtgagcaatatgtacgagaacatcagtacgtatatcaccacaaagaggaacacacacacagacaaaatccagatccgggttggagtaaagcagggtgacccgatgtcgccccttttatttaacctggcaatggaccctctattatgcaagctggaagagagtggcaaaggataccaccgaggacagagcagcatcacagcgatggcatttgcagacgatctggttttgctgagcgactcctgggaaaatatgaatacaaatattagcatactggagaccttctgcaatctgaccggactcaaaacacaggggcaaaagtgccacggcttttacatcaagccgacaaaggactcttacaccatcaatgactgcgctgcctggactatcaacggcacacccctgaacatgatcgaccccggcgaatctgagaaatacctcggcctgcagtttgacccgtggattggaatagcaaggtccggtctctccacaaaactagatttttggcttcagcggatcgatcaagcaccacttaaacctctgcagaaaactgatattctcaaaacatacaccatccctcggctgatctacatagctgaccactcagaagtgaaaagcgcactactcgaaacccttgaccagaagatccggacagcggtcaaggaatggcttcacctacctccgtgcacctgcgatgccatcctgtactcgagcacgagagacggcggtttgggcatcaccaaattggcaggactgatccccagcgtgcaggcccgtagactgcatcggatcgcacagtcatctgacgatacgatgaaatgcttcatggaaaaagagaaaatggaacagctgcataagaaattgtggattcaagctggaggggacagagagaacataccctcgatttgggaagcaccaccgtcgagtgaaccaccaaacaacgtgagcacaaattcggaatgggaagcaccgacccagaaagataaatttccaaagccttgcaattggaggaaaaacgaattcaaaaaatggaccaaattggcatcccaaggccgcggaattgtaaattttgaaagagacaaaattagtaaccattggatccaatactacagacgcatacctcacaggaaactcctcactgcactacaactcagggccaacgtttaccccacgagagaatttctagccaggggtagacaagaccaatacatcaaggcgtgtaggcactgcgatgcggacaacgaatcctgcgcccacatcatcggcaactgcccagtgacacaggacgcccgaatcaagaggcacaattacatctgcgaactgcttctcgaggaggcgaagaagaaggactgggtagtgttcaaggaaccgcacataagggattccaacaaggaactgtacaaacctgacctgatatttgtgaaggatgggcgtgcacttgtcgtggatgtgacagtacggtatgaagcagccaaatcatcgctggaggaagccgctgcagagaaagtgagaaagtacaaacacctggaaacggaagtaagacatctcacgaatgcaaaggacgttacttttgtgggctttcccctaggagcgcgggggaaatggcaccaagataactttaaacttttgactgagcttggcctctccaaatcgaggcaagtgaaaatggcagagactttttccacagtagcgctcttttcatctgtggacattgtacatatgtttgccagtagggccagaaaatctatggttatgtgataataggctgccttctgcggggcttgccttctggccatgcccttcttctctcccttgcacctgtacctcttggtctttgaataaagcctgagtaggaaggaccggtaaaaaaaaaaaaaaaaaaaaaaaaaaaaaaacgttgactaaaaaaaaaaaaaaaaaaaaaaaaaaaaaaaaaaaaaaaaaaaaaaaaaaaaaaaaaaaaaaaaaaaaaa

SEQ ID NO: 11070 - DNA, 5264 bp, synthetic construct
  source 1..5264: mol_type = other DNA
gaaataagagagaaaagaagagtaagaagaaatataagagaattcgccaccatggcccctaagaaaaagcggaaggtgaatatcagcggctctagctgcggcagccccaacagcgccgacaccagcagcgacttcaaggacctgtggaccaagctgaaggaatgccacgaccgggaagtgcagggactccaggtgaaggtcaccaaactcaagcaagaaagaatcctggacgcccagagactggaagaattcttcaccaagaaccagcagctgagagagcagcagaaagtgctgcacgagacaatcaaggttctggaagatagactgcgggccggcctgtgcgacagatgcgccgtgaccgaggaacacatgcgcaaaaagcagcaggagttcgagaacattagacagcaaaatctgaaattgatcacagagctgatgaacgagagaaacacactgcaggaggagaacaagaagctgagcgagcagctgcaacagaagatcgagaatgatcagcaacaccaggccgctgagctggaatgtgaagaggacgtgatccccgacagcccaatcacagctttcagcttttctggcgtgaacagactgaggcggaaggaaaacccccacgtgcggtacatcgagcagacccataccaagctggaacacagcgtgtgtgccaacgagatgagaaaggtgtccaagtcctccacccatccccagcacaaccctaacgaaaatgagatcctggtggctgatacctacgaccagtctcagagccctatggccaagatccacggcaccagctcttatacccctgataagagctccttcaacctggccaccgtggtggccgagacactgggcctgggcgtgcaggaggaaagcgagacacagggcccaatgagccctctgggagatgagctgtaccactgcctggaaggcaaccacaagaaacagccttttgagtccggctccgagactcctggaacaagcgagagcgctacacctgagggcagccctaagagaaaggtgtccagcgccgagggcgctgccaaggaagagcctaaacggagaagcgccagactgagcgccaagccccccgccaaggtggaagccaagcctaagaaggccgccgctaaggacaagagcagcgataagaaagtccagaccaagggcaagcggggcgccaaaggcaaacaggccgaggtggccaaccaggagacaaaggaagatctgcctgctgagaacggcgaaaccaagaccgaggaatctccagcttctgacgaggccggagagaaggaggccaaaagcgacagcggctctgagacacctggaacaagcgagagcgccaccccggaatcctatgaacaacttgcaccacaaccgtgtgtgggagaaactttacattctagcctcccacgagacagtgaactgtttgtgcctgaagaggggagcagcgagaaggagagcgaggacgcgccaaaaacatctcctccgacgcctgggaaacatggtttggaacagactggggaggaaaaagtgatggtgactgttcctgacaaaaatccaccttgtccttgctgtggtacccgggtaaactctgtgttgaatctgattgaacatctgaaagtgtcacacgggaaaaggggggtttgttttcggtgtgcaaaatgtggaaaggaaaatagtaactatcacagtgttgtttgtcattttaagaaatgcaggggtccagagacggagaaagccccagctggggagtggatttgtgaggtatgcaacagagattttacaaccaaaattggcctgggacaacacaagagattggcacacccagcagtgagaaatcaggaaaggatcgttgcttcccaaccgaaagaaacatcaaatagaggtgctcacaaaaggtgctggacaaaggaggaggaagaattactaataagactggaggctcagttcgagggaaacaaaaatattaataagcttattgcagaacacataaccaccaaaacagctaagcagatcagtgacaaaaggcgattgctgtccagaaagccagcagaggagccacgtgaggagcctggaacgtgtcatcacaccaggagagcagctgcgagcctgagaacggagcctgagatgagtcatcacgcccaggcagaggacagagataatggacctgggagacgccctctgccaggcagggcagctgccggagggagaacaatggacgagataagacgccaccctgataagggcaacggacagcagagacccaccaagcaaaaatcagaagaacagctgcaggcttactataaaaagacactagaggaacgactttcagctggggcacttaacaccttcccccgagcattcaagcaggtaatggaaggccgggatataaagctagtaatcaatcagacagcgcaggactgcttcggatgcctggaatccataagccaaataagaacggcaacccgagataaaaaggacacggtgacccgggagaaacacccaaagaaaccttttcagaagtggatgaagaagagagcaatcaaaaaaggtaattatcttcggttccagcgtttattttatcttgatagagggaaactggctaaaatcattttagatgatattgaatgcttgtcttgtgacataccactcagtgaaatttattcggtttttaaaacaagatgggaaacaactggtagctttaaaagccttggggactttaaaacttacgggaaggctgacaacactgccttcagagaattaattacggctaaagaaattgagaaaaatgtgcaggaaatgagcaaaggctcggctcccggtccagacgggattactcttggggacgtcgtaaagatggatcccgagttttcccggaccatggagattttcaatttatggttaacaactggtaaaatcccggacatggtgagggggtgcagaaccgttttgattccaaaatcatcaaagccggatcgtttgaaagacattaataactggagacctatcacgatcggttccatcttgctgagactgttctccaggattgtaacagctaggctgagcaaagcgtgccccctgaacccaaggcaaagaggctttatcagagcggcgggatgctctgaaaacttaaaactcctgcaaactataatttggtcggccaaaagagaacacagaccactgggtgttgtattcgtggacatcgccaaggcttttgacaccgtaagccaccagcacatcattcatgctttgcagcaaagagaggtggatccccacatcgtcggtctggtgagcaatatgtacgagaacatcagtacgtatatcaccacaaagaggaacacacacacagacaaaatccagatccgggttggagtaaagcagggtgacccgatgtcgccccttttatttaacctggcaatggaccctctattatgcaagctggaagagagtggcaaaggataccaccgaggacagagcagcatcacagcgatggcatttgcagacgatctggttttgctgagcgactcctgggaaaatatgaatacaaatattagcatactggagaccttctgcaatctgaccggactcaaaacacaggggcaaaagtgccacggcttttacatcaagccgacaaaggactcttacaccatcaatgactgcgctgcctggactatcaacggcacacccctgaacatgatcgaccccggcgaatctgagaaatacctcggcctgcagtttgacccgtggattggaatagcaaggtccggtctctccacaaaactagatttttggcttcagcggatcgatcaagcaccacttaaacctctgcagaaaactgatattctcaaaacatacaccatccctcggctgatctacatagctgaccactcagaagtgaaaagcgcactactcgaaacccttgaccagaagatccggacagcggtcaaggaatggcttcacctacctccgtgcacctgcgatgccatcctgtactcgagcacgagagacggcggtttgggcatcaccaaattggcaggactgatccccagcgtgcaggcccgtagactgcatcggatcgcacagtcatctgacgatacgatgaaatgcttcatggaaaaagagaaaatggaacagctgcataagaaattgtggattcaagctggaggggacagagagaacataccctcgatttgggaagcaccaccgtcgagtgaaccaccaaacaacgtgagcacaaattcggaatgggaagcaccgacccagaaagataaatttccaaagccttgcaattggaggaaaaacgaattcaaaaaatggaccaaattggcatcccaaggccgcggaattgtaaattttgaaagagacaaaattagtaaccattggatccaatactacagacgcatacctcacaggaaactcctcactgcactacaactcagggccaacgtttaccccacgagagaatttctagccaggggtagacaagaccaatacatcaaggcgtgtaggcactgcgatgcggacaacgaatcctgcgcccacatcatcggcaactgcccagtgacacaggacgcccgaatcaagaggcacaattacatctgcgaactgcttctcgaggaggcgaagaagaaggactgggtagtgttcaaggaaccgcacataagggattccaacaaggaactgtacaaacctgacctgatatttgtgaaggatgggcgtgcacttgtcgtggatgtgacagtacggtatgaagcagccaaatcatcgctggaggaagccgctgcagagaaagtgagaaagtacaaacacctggaaacggaagtaagacatctcacgaatgcaaaggacgttacttttgtgggctttcccctaggagcgcgggggaaatggcaccaagataactttaaacttttgactgagcttggcctctccaaatcgaggcaagtgaaaatggcagagactttttccacagtagcgctcttttcatctgtggacattgtacatatgtttgccagtagggccagaaaatctatggttatgtgataataggctgccttctgcggggcttgccttctggccatgcccttcttctctcccttgcacctgtacctcttggtctttgaataaagcctgagtaggaaggaccggtaaaaaaaaaaaaaaaaaaaaaaaaaaaaaaacgttgactaaaaaaaaaaaaaaaaaaaaaaaaaaaaaaaaaaaaaaaaaaaaaaaaaaaaaaaaaaaaaaaaaaaaaa

SEQ ID NO: 11071 - DNA, 5264 bp, synthetic construct
  source 1..5264: mol_type = other DNA
gaaataagagagaaaagaagagtaagaagaaatataagagaattcgccaccatggcccctaagaaaaagcggaaggtgaatatcagcggctctagctgcggcagccccaacagcgccgacaccagcagcgacttcaaggacctgtggaccaagctgaaggaatgccacgaccgggaagtgcagggactccaggtgaaggtcaccaaactcaagcaagaaagaatcctggacgcccagagactggaagaattcttcaccaagaaccagcagctgagagagcagcagaaagtgctgcacgagacaatcaaggttctggaagatagactgcgggccggcctgtgcgacagatgcgccgtgaccgaggaacacatgcgcaaaaagcagcaggagttcgagaacattagacagcaaaatctgaaattgatcacagagctgatgaacgagagaaacacactgcaggaggagaacaagaagctgagcgagcagctgcaacagaagatcgagaatgatcagcaacaccaggccgctgagctggaatgtgaagaggacgtgatccccgacagcccaatcacagctttcagcttttctggcgtgaacagactgaggcggaaggaaaacccccacgtgcggtacatcgagcagacccataccaagctggaacacagcgtgtgtgccaacgagatgagaaaggtgtccaagtcctccacccatccccagcacaaccctaacgaaaatgagatcctggtggctgatacctacgaccagtctcagagccctatggccaagaaccacggcaccagctcttatacccctgataagagctccttcaacctggccaccgtggtggccgagacactgggcctgggcgtgcaggaggaaagcgagacacagggcccaatgagccctctgggagatgagctgtaccactgcctggaaggcaaccacaagaaacagccttttgagtccggctccgagactcctggaacaagcgagagcgctacacctgagggcagccctaagagaaaggtgtccagcgccgagggcgctgccaaggaagagcctaaacggagaagcgccagactgagcgccaagccccccgccaaggtggaagccaagcctaagaaggccgccgctaaggacaagagcagcgataagaaagtccagaccaagggcaagcggggcgccaaaggcaaacaggccgaggtggccaaccaggagacaaaggaagatctgcctgctgagaacggcgaaaccaagaccgaggaatctccagcttctgacgaggccggagagaaggaggccaaaagcgacagcggctctgagacacctggaacaagcgagagcgccaccccggaatcctatgaacaacttgcaccacaaccgtgtgtgggagaaactttacattctagcctcccacgagacagtgaactgtttgtgcctgaagaggggagcagcgagaaggagagcgaggacgcgccaaaaacatctcctccgacgcctgggaaacatggtttggaacagactggggaggaaaaagtgatggtgactgttcctgacaaaaatccaccttgtccttgctgtggtacccgggtaaactctgtgttgaatctgattgaacatctgaaagtgtcacacgggaaaaggggggtttgttttcggtgtgcaaaatgtggaaaggaaaatagtaactatcacagtgttgtttgtcattttaagaaatgcaggggtccagagacggagaaagccccagctggggagtggatttgtgaggtatgcaacagagattttacaaccaaaattggcctgggacaacacaagagattggcacacccagcagtgagaaatcaggaaaggatcgttgcttcccaaccgaaagaaacatcaaatagaggtgctcacaaaaggtgctggacaaaggaggaggaagaattactaataagactggaggctcagttcgagggaaacaaaaatattaataagcttattgcagaacacataaccaccaaaacagctaagcagatcagtgacaaaaggcgattgctgtccagaaagccagcagaggagccacgtgaggagcctggaacgtgtcatcacaccaggagagcagctgcgagcctgagaacggagcctgagatgagtcatcacgcccaggcagaggacagagataatggacctgggagacgccctctgccaggcagggcagctgccggagggagaacaatggacgagataagacgccaccctgataagggcaacggacagcagagacccaccaagcaaaaatcagaagaacagctgcaggcttactataaaaagacactagaggaacgactttcagctggggcacttaacaccttcccccgagcattcaagcaggtaatggaaggccgggatataaagctagtaatcaatcagacagcgcaggactgcttcggatgcctggaatccataagccaaataagaacggcaacccgagataaaaaggacacggtgacccgggagaaacacccaaagaaaccttttcagaagtggatgaagaagagagcaatcaaaaaaggtaattatcttcggttccagcgtttattttatcttgatagagggaaactggctaaaatcattttagatgatattgaatgcttgtcttgtgacataccactcagtgaaatttattcggtttttaaaacaagatgggaaacaactggtagctttaaaagccttggggactttaaaacttacgggaaggctgacaacactgccttcagagaattaattacggctaaagaaattgagaaaaatgtgcaggaaatgagcaaaggctcggctcccggtccagacgggattactcttggggacgtcgtaaagatggatcccgagttttcccggaccatggagattttcaatttatggttaacaactggtaaaatcccggacatggtgagggggtgcagaaccgttttgattccaaaatcatcaaagccggatcgtttgaaagacattaataactggagacctatcacgatcggttccatcttgctgagactgttctccaggattgtaacagctaggctgagcaaagcgtgccccctgaacccaaggcaaagaggctttatcagagcggcgggatgctctgaaaacttaaaactcctgcaaactataatttggtcggccaaaagagaacacagaccactgggtgttgtattcgtggacatcgccaaggcttttgacaccgtaagccaccagcacatcattcatgctttgcagcaaagagaggtggatccccacatcgtcggtctggtgagcaatatgtacgagaacatcagtacgtatatcaccacaaagaggaacacacacacagacaaaatccagatccgggttggagtaaagcagggtgacccgatgtcgccccttttatttaacctggcaatggaccctctattatgcaagctggaagagagtggcaaaggataccaccgaggacagagcagcatcacagcgatggcatttgcagacgatctggttttgctgagcgactcctgggaaaatatgaatacaaatattagcatactggagaccttctgcaatctgaccggactcaaaacacaggggcaaaagtgccacggcttttacatcaagccgacaaaggactcttacaccatcaatgactgcgctgcctggactatcaacggcacacccctgaacatgatcgaccccggcgaatctgagaaatacctcggcctgcagtttgacccgtggattggaatagcaaggtccggtctctccacaaaactagatttttggcttcagcggatcgatcaagcaccacttaaacctctgcagaaaactgatattctcaaaacatacaccatccctcggctgatctacatagctgaccactcagaagtgaaaagcgcactactcgaaacccttgaccagaagatccggacagcggtcaaggaatggcttcacctacctccgtgcacctgcgatgccatcctgtactcgagcacgagagacggcggtttgggcatcaccaaattggcaggactgatccccagcgtgcaggcccgtagactgcatcggatcgcacagtcatctgacgatacgatgaaatgcttcatggaaaaagagaaaatggaacagctgcataagaaattgtggattcaagctggaggggacagagagaacataccctcgatttgggaagcaccaccgtcgagtgaaccaccaaacaacgtgagcacaaattcggaatgggaagcaccgacccagaaagataaatttccaaagccttgcaattggaggaaaaacgaattcaaaaaatggaccaaattggcatcccaaggccgcggaattgtaaattttgaaagagacaaaattagtaaccattggatccaatactacagacgcatacctcacaggaaactcctcactgcactacaactcagggccaacgtttaccccacgagagaatttctagccaggggtagacaagaccaatacatcaaggcgtgtaggcactgcgatgcggacaacgaatcctgcgcccacatcatcggcaactgcccagtgacacaggacgcccgaatcaagaggcacaattacatctgcgaactgcttctcgaggaggcgaagaagaaggactgggtagtgttcaaggaaccgcacataagggattccaacaaggaactgtacaaacctgacctgatatttgtgaaggatgggcgtgcacttgtcgtggatgtgacagtacggtatgaagcagccaaatcatcgctggaggaagccgctgcagagaaagtgagaaagtacaaacacctggaaacggaagtaagacatctcacgaatgcaaaggacgttacttttgtgggctttcccctaggagcgcgggggaaatggcaccaagataactttaaacttttgactgagcttggcctctccaaatcgaggcaagtgaaaatggcagagactttttccacagtagcgctcttttcatctgtggacattgtacatatgtttgccagtagggccagaaaatctatggttatgtgataataggctgccttctgcggggcttgccttctggccatgcccttcttctctcccttgcacctgtacctcttggtctttgaataaagcctgagtaggaaggaccggtaaaaaaaaaaaaaaaaaaaaaaaaaaaaaaacgttgactaaaaaaaaaaaaaaaaaaaaaaaaaaaaaaaaaaaaaaaaaaaaaaaaaaaaaaaaaaaaaaaaaaaaaa

SEQ ID NO: 11072 - DNA, 5264 bp, synthetic construct
  source 1..5264: mol_type = other DNA
gaaataagagagaaaagaagagtaagaagaaatataagagaattcgccaccatggcccctaagaaaaagcggaaggtgaatatcagcggctctagctgcggcagccccaacagcgccgacaccagcagcgacttcaaggacctgtggaccaagctgaaggaatgccacgaccgggaagtgcagggactccaggtgaaggtcaccaaactcaagcaagaaagaatcctggacgcccagagactggaagaattcttcaccaagaaccagcagctgagagagcagcagaaagtgctgcacgagacaatcaaggttctggaagatagactgcgggccggcctgtgcgacagatgcgccgtgaccgaggaacacatgcgcaaaaagcagcaggagttcgagaacattagacagcaaaatctgaaattgatcacagagctgatgaacgagagaaacacactgcaggaggagaacaagaagctgagcgagcagctgcaacagaagatcgagaatgatcagcaacaccaggccgctgagctggaatgtgaagaggacgtgatccccgacagcccaatcacagctttcagcttttctggcgtgaacagactgaggcggaaggaaaacccccacgtgcggtacatcgagcagacccataccaagctggaacacagcgtgtgtgccaacgagatgagaaaggtgtccaagtcctccacccatccccagcacaaccctaacgaaaatgagatcctggtggctgatacctacgaccagtctcagagccctatggccaagaaacacggcaccagctcttatacccctgataagagctccttcaacctggccaccgtggtggccgagacactgggcctgggcgtgcaggaggaaagcgagacacagggcccaatgagccctctgggagatgagctgtaccactgcctggaaggcaaccacaagaaacagccttttgagtccggctccgagactcctggaacaagcgagagcgctacacctgagggcagccctaagagaaaggtgtccagcgccgagggcgctgccaaggaagagcctaaacggagaagcgccagactgagcgccaagccccccgccaaggtggaagccaagcctaagaaggccgccgctaaggacaagagcagcgataagaaagtccagaccaagggcaagcggggcgccaaaggcaaacaggccgaggtggccaaccaggagacaaaggaagatctgcctgctgagaacggcgaaaccaagaccgaggaatctccagcttctgacgaggccggagagaaggaggccaaaagcgacagcggctctgagacacctggaacaagcgagagcgccaccccggaatcctatgaacaacttgcaccacaaccgtgtgtgggagaaactttacattctagcctcccacgagacagtgaactgtttgtgcctgaagaggggagcagcgagaaggagagcgaggacgcgccaaaaacatctcctccgacgcctgggaaacatggtttggaacagactggggaggaaaaagtgatggtgactgttcctgacaaaaatccaccttgtccttgctgtggtacccgggtaaactctgtgttgaatctgattgaacatctgaaagtgtcacacgggaaaaggggggtttgttttcggtgtgcaaaatgtggaaaggaaaatagtaactatcacagtgttgtttgtcattttaagaaatgcaggggtccagagacggagaaagccccagctggggagtggatttgtgaggtatgcaacagagattttacaaccaaaattggcctgggacaacacaagagattggcacacccagcagtgagaaatcaggaaaggatcgttgcttcccaaccgaaagaaacatcaaatagaggtgctcacaaaaggtgctggacaaaggaggaggaagaattactaataagactggaggctcagttcgagggaaacaaaaatattaataagcttattgcagaacacataaccaccaaaacagctaagcagatcagtgacaaaaggcgattgctgtccagaaagccagcagaggagccacgtgaggagcctggaacgtgtcatcacaccaggagagcagctgcgagcctgagaacggagcctgagatgagtcatcacgcccaggcagaggacagagataatggacctgggagacgccctctgccaggcagggcagctgccggagggagaacaatggacgagataagacgccaccctgataagggcaacggacagcagagacccaccaagcaaaaatcagaagaacagctgcaggcttactataaaaagacactagaggaacgactttcagctggggcacttaacaccttcccccgagcattcaagcaggtaatggaaggccgggatataaagctagtaatcaatcagacagcgcaggactgcttcggatgcctggaatccataagccaaataagaacggcaacccgagataaaaaggacacggtgacccgggagaaacacccaaagaaaccttttcagaagtggatgaagaagagagcaatcaaaaaaggtaattatcttcggttccagcgtttattttatcttgatagagggaaactggctaaaatcattttagatgatattgaatgcttgtcttgtgacataccactcagtgaaatttattcggtttttaaaacaagatgggaaacaactggtagctttaaaagccttggggactttaaaacttacgggaaggctgacaacactgccttcagagaattaattacggctaaagaaattgagaaaaatgtgcaggaaatgagcaaaggctcggctcccggtccagacgggattactcttggggacgtcgtaaagatggatcccgagttttcccggaccatggagattttcaatttatggttaacaactggtaaaatcccggacatggtgagggggtgcagaaccgttttgattccaaaatcatcaaagccggatcgtttgaaagacattaataactggagacctatcacgatcggttccatcttgctgagactgttctccaggattgtaacagctaggctgagcaaagcgtgccccctgaacccaaggcaaagaggctttatcagagcggcgggatgctctgaaaacttaaaactcctgcaaactataatttggtcggccaaaagagaacacagaccactgggtgttgtattcgtggacatcgccaaggcttttgacaccgtaagccaccagcacatcattcatgctttgcagcaaagagaggtggatccccacatcgtcggtctggtgagcaatatgtacgagaacatcagtacgtatatcaccacaaagaggaacacacacacagacaaaatccagatccgggttggagtaaagcagggtgacccgatgtcgccccttttatttaacctggcaatggaccctctattatgcaagctggaagagagtggcaaaggataccaccgaggacagagcagcatcacagcgatggcatttgcagacgatctggttttgctgagcgactcctgggaaaatatgaatacaaatattagcatactggagaccttctgcaatctgaccggactcaaaacacaggggcaaaagtgccacggcttttacatcaagccgacaaaggactcttacaccatcaatgactgcgctgcctggactatcaacggcacacccctgaacatgatcgaccccggcgaatctgagaaatacctcggcctgcagtttgacccgtggattggaatagcaaggtccggtctctccacaaaactagatttttggcttcagcggatcgatcaagcaccacttaaacctctgcagaaaactgatattctcaaaacatacaccatccctcggctgatctacatagctgaccactcagaagtgaaaagcgcactactcgaaacccttgaccagaagatccggacagcggtcaaggaatggcttcacctacctccgtgcacctgcgatgccatcctgtactcgagcacgagagacggcggtttgggcatcaccaaattggcaggactgatccccagcgtgcaggcccgtagactgcatcggatcgcacagtcatctgacgatacgatgaaatgcttcatggaaaaagagaaaatggaacagctgcataagaaattgtggattcaagctggaggggacagagagaacataccctcgatttgggaagcaccaccgtcgagtgaaccaccaaacaacgtgagcacaaattcggaatgggaagcaccgacccagaaagataaatttccaaagccttgcaattggaggaaaaacgaattcaaaaaatggaccaaattggcatcccaaggccgcggaattgtaaattttgaaagagacaaaattagtaaccattggatccaatactacagacgcatacctcacaggaaactcctcactgcactacaactcagggccaacgtttaccccacgagagaatttctagccaggggtagacaagaccaatacatcaaggcgtgtaggcactgcgatgcggacaacgaatcctgcgcccacatcatcggcaactgcccagtgacacaggacgcccgaatcaagaggcacaattacatctgcgaactgcttctcgaggaggcgaagaagaaggactgggtagtgttcaaggaaccgcacataagggattccaacaaggaactgtacaaacctgacctgatatttgtgaaggatgggcgtgcacttgtcgtggatgtgacagtacggtatgaagcagccaaatcatcgctggaggaagccgctgcagagaaagtgagaaagtacaaacacctggaaacggaagtaagacatctcacgaatgcaaaggacgttacttttgtgggctttcccctaggagcgcgggggaaatggcaccaagataactttaaacttttgactgagcttggcctctccaaatcgaggcaagtgaaaatggcagagactttttccacagtagcgctcttttcatctgtggacattgtacatatgtttgccagtagggccagaaaatctatggttatgtgataataggctgccttctgcggggcttgccttctggccatgcccttcttctctcccttgcacctgtacctcttggtctttgaataaagcctgagtaggaaggaccggtaaaaaaaaaaaaaaaaaaaaaaaaaaaaaaacgttgactaaaaaaaaaaaaaaaaaaaaaaaaaaaaaaaaaaaaaaaaaaaaaaaaaaaaaaaaaaaaaaaaaaaaaa

SEQ ID NO: 11073 - DNA, 5264 bp, synthetic construct
  source 1..5264: mol_type = other DNA
gaaataagagagaaaagaagagtaagaagaaatataagagaattcgccaccatggcccctaagaaaaagcggaaggtgaatatcagcggctctagctgcggcagccccaacagcgccgacaccagcagcgacttcaaggacctgtggaccaagctgaaggaatgccacgaccgggaagtgcagggactccaggtgaaggtcaccaaactcaagcaagaaagaatcctggacgcccagagactggaagaattcttcaccaagaaccagcagctgagagagcagcagaaagtgctgcacgagacaatcaaggttctggaagatagactgcgggccggcctgtgcgacagatgcgccgtgaccgaggaacacatgcgcaaaaagcagcaggagttcgagaacattagacagcaaaatctgaaattgatcacagagctgatgaacgagagaaacacactgcaggaggagaacaagaagctgagcgagcagctgcaacagaagatcgagaatgatcagcaacaccaggccgctgagctggaatgtgaagaggacgtgatccccgacagcccaatcacagctttcagcttttctggcgtgaacagactgaggcggaaggaaaacccccacgtgcggtacatcgagcagacccataccaagctggaacacagcgtgtgtgccaacgagatgagaaaggtgtccaagtcctccacccatccccagcacaaccctaacgaaaatgagatcctggtggctgatacctacgaccagtctcagagccctatggccaaggcccacggcaccagctcttatacccctgataagagctccttcaacctggccaccgtggtggccgagacactgggcctgggcgtgcaggaggaaagcgagacacagggcccaatgagccctctgggagatgagctgtaccactgcctggaaggcgaccacaagaaacagccttttgagtccggctccgagactcctggaacaagcgagagcgctacacctgagggcagccctaagagaaaggtgtccagcgccgagggcgctgccaaggaagagcctaaacggagaagcgccagactgagcgccaagccccccgccaaggtggaagccaagcctaagaaggccgccgctaaggacaagagcagcgataagaaagtccagaccaagggcaagcggggcgccaaaggcaaacaggccgaggtggccaaccaggagacaaaggaagatctgcctgctgagaacggcgaaaccaagaccgaggaatctccagcttctgacgaggccggagagaaggaggccaaaagcgacagcggctctgagacacctggaacaagcgagagcgccaccccggaatcctatgaacaacttgcaccacaaccgtgtgtgggagaaactttacattctagcctcccacgagacagtgaactgtttgtgcctgaagaggggagcagcgagaaggagagcgaggacgcgccaaaaacatctcctccgacgcctgggaaacatggtttggaacagactggggaggaaaaagtgatggtgactgttcctgacaaaaatccaccttgtccttgctgtggtacccgggtaaactctgtgttgaatctgattgaacatctgaaagtgtcacacgggaaaaggggggtttgttttcggtgtgcaaaatgtggaaaggaaaatagtaactatcacagtgttgtttgtcattttaagaaatgcaggggtccagagacggagaaagccccagctggggagtggatttgtgaggtatgcaacagagattttacaaccaaaattggcctgggacaacacaagagattggcacacccagcagtgagaaatcaggaaaggatcgttgcttcccaaccgaaagaaacatcaaatagaggtgctcacaaaaggtgctggacaaaggaggaggaagaattactaataagactggaggctcagttcgagggaaacaaaaatattaataagcttattgcagaacacataaccaccaaaacagctaagcagatcagtgacaaaaggcgattgctgtccagaaagccagcagaggagccacgtgaggagcctggaacgtgtcatcacaccaggagagcagctgcgagcctgagaacggagcctgagatgagtcatcacgcccaggcagaggacagagataatggacctgggagacgccctctgccaggcagggcagctgccggagggagaacaatggacgagataagacgccaccctgataagggcaacggacagcagagacccaccaagcaaaaatcagaagaacagctgcaggcttactataaaaagacactagaggaacgactttcagctggggcacttaacaccttcccccgagcattcaagcaggtaatggaaggccgggatataaagctagtaatcaatcagacagcgcaggactgcttcggatgcctggaatccataagccaaataagaacggcaacccgagataaaaaggacacggtgacccgggagaaacacccaaagaaaccttttcagaagtggatgaagaagagagcaatcaaaaaaggtaattatcttcggttccagcgtttattttatcttgatagagggaaactggctaaaatcattttagatgatattgaatgcttgtcttgtgacataccactcagtgaaatttattcggtttttaaaacaagatgggaaacaactggtagctttaaaagccttggggactttaaaacttacgggaaggctgacaacactgccttcagagaattaattacggctaaagaaattgagaaaaatgtgcaggaaatgagcaaaggctcggctcccggtccagacgggattactcttggggacgtcgtaaagatggatcccgagttttcccggaccatggagattttcaatttatggttaacaactggtaaaatcccggacatggtgagggggtgcagaaccgttttgattccaaaatcatcaaagccggatcgtttgaaagacattaataactggagacctatcacgatcggttccatcttgctgagactgttctccaggattgtaacagctaggctgagcaaagcgtgccccctgaacccaaggcaaagaggctttatcagagcggcgggatgctctgaaaacttaaaactcctgcaaactataatttggtcggccaaaagagaacacagaccactgggtgttgtattcgtggacatcgccaaggcttttgacaccgtaagccaccagcacatcattcatgctttgcagcaaagagaggtggatccccacatcgtcggtctggtgagcaatatgtacgagaacatcagtacgtatatcaccacaaagaggaacacacacacagacaaaatccagatccgggttggagtaaagcagggtgacccgatgtcgccccttttatttaacctggcaatggaccctctattatgcaagctggaagagagtggcaaaggataccaccgaggacagagcagcatcacagcgatggcatttgcagacgatctggttttgctgagcgactcctgggaaaatatgaatacaaatattagcatactggagaccttctgcaatctgaccggactcaaaacacaggggcaaaagtgccacggcttttacatcaagccgacaaaggactcttacaccatcaatgactgcgctgcctggactatcaacggcacacccctgaacatgatcgaccccggcgaatctgagaaatacctcggcctgcagtttgacccgtggattggaatagcaaggtccggtctctccacaaaactagatttttggcttcagcggatcgatcaagcaccacttaaacctctgcagaaaactgatattctcaaaacatacaccatccctcggctgatctacatagctgaccactcagaagtgaaaagcgcactactcgaaacccttgaccagaagatccggacagcggtcaaggaatggcttcacctacctccgtgcacctgcgatgccatcctgtactcgagcacgagagacggcggtttgggcatcaccaaattggcaggactgatccccagcgtgcaggcccgtagactgcatcggatcgcacagtcatctgacgatacgatgaaatgcttcatggaaaaagagaaaatggaacagctgcataagaaattgtggattcaagctggaggggacagagagaacataccctcgatttgggaagcaccaccgtcgagtgaaccaccaaacaacgtgagcacaaattcggaatgggaagcaccgacccagaaagataaatttccaaagccttgcaattggaggaaaaacgaattcaaaaaatggaccaaattggcatcccaaggccgcggaattgtaaattttgaaagagacaaaattagtaaccattggatccaatactacagacgcatacctcacaggaaactcctcactgcactacaactcagggccaacgtttaccccacgagagaatttctagccaggggtagacaagaccaatacatcaaggcgtgtaggcactgcgatgcggacaacgaatcctgcgcccacatcatcggcaactgcccagtgacacaggacgcccgaatcaagaggcacaattacatctgcgaactgcttctcgaggaggcgaagaagaaggactgggtagtgttcaaggaaccgcacataagggattccaacaaggaactgtacaaacctgacctgatatttgtgaaggatgggcgtgcacttgtcgtggatgtgacagtacggtatgaagcagccaaatcatcgctggaggaagccgctgcagagaaagtgagaaagtacaaacacctggaaacggaagtaagacatctcacgaatgcaaaggacgttacttttgtgggctttcccctaggagcgcgggggaaatggcaccaagataactttaaacttttgactgagcttggcctctccaaatcgaggcaagtgaaaatggcagagactttttccacagtagcgctcttttcatctgtggacattgtacatatgtttgccagtagggccagaaaatctatggttatgtgataataggctgccttctgcggggcttgccttctggccatgcccttcttctctcccttgcacctgtacctcttggtctttgaataaagcctgagtaggaaggaccggtaaaaaaaaaaaaaaaaaaaaaaaaaaaaaaacgttgactaaaaaaaaaaaaaaaaaaaaaaaaaaaaaaaaaaaaaaaaaaaaaaaaaaaaaaaaaaaaaaaaaaaaaa

SEQ ID NO: 11074 - DNA, 5264 bp, synthetic construct
  source 1..5264: mol_type = other DNA
gaaataagagagaaaagaagagtaagaagaaatataagagaattcgccaccatggcccctaagaaaaagcggaaggtgaatatcagcggctctagctgcggcagccccaacagcgccgacaccagcagcgacttcaaggacctgtggaccaagctgaaggaatgccacgaccgggaagtgcagggactccaggtgaaggtcaccaaactcaagcaagaaagaatcctggacgcccagagactggaagaattcttcaccaagaaccagcagctgagagagcagcagaaagtgctgcacgagacaatcaaggttctggaagatagactgcgggccggcctgtgcgacagatgcgccgtgaccgaggaacacatgcgcaaaaagcagcaggagttcgagaacattagacagcaaaatctgaaattgatcacagagctgatgaacgagagaaacacactgcaggaggagaacaagaagctgagcgagcagctgcaacagaagatcgagaatgatcagcaacaccaggccgctgagctggaatgtgaagaggacgtgatccccgacagcccaatcacagctttcagcttttctggcgtgaacagactgaggcggaaggaaaacccccacgtgcggtacatcgagcagacccataccaagctggaacacagcgtgtgtgccaacgagatgagaaaggtgtccaagtcctccacccatccccagcacaaccctaacgaaaatgagatcctggtggctgatacctacgaccagtctcagagccctatggccaaggcccacggcaccagctcttatacccctgataagagctccttcaacctggccaccgtggtggccgagacactgggcctgggcgtgcaggaggaaagcgagacacagggcccaatgagccctctgggagatgagctgtaccactgcctggaaggcaaccacaagaaacagccttttgagtccggctccgagactcctggaacaagcgagagcgctacacctgagggcagccctaagagaaaggtgtccagcgccgagggcgctgccaaggaagagcctaaacggagaagcgccagactgagcgccaagccccccgccaaggtggaagccaagcctaagaaggccgccgctaaggacaagagcagcgataagaaagtccagaccaagggcaagcggggcgccaaaggcaaacaggccgaggtggccaaccaggagacaaaggaagatctgcctgctgagaacggcgaaaccaagaccgaggaatctccagcttctgacgaggccggagagaaggaggccaaaagcgacagcggctctgagacacctggaacaagcgagagcgccaccccggaatcctatgaacaacttgcaccacaaccgtgtgtgggagaaactttacattctagcctcccacgagacagtgaactgtttgtgcctgaagaggggagcagcgagaaggagagcgaggacgcgccaaaaacatctcctccgacgcctgggaaacatggtttggaacagactggggaggaaaaagtgatggtgactgttcctgacaaaaatccaccttgtccttgctgtggtacccgggtaaactctgtgttgaatctgattgaacatctgaaagtgtcacacgggaaaaggggggtttgttttcggtgtgcaaaatgtggaaaggaaaatagtaactatcacagtgttgtttgtcattttaagaaatgcaggggtccagagacggagaaagccccagctggggagtggatttgtgaggtatgcaacagagattttacaaccaaaattggcctgggacaacacaagagattggcacacccagcagtgagaaatcaggaaaggatcgttgcttcccaaccgaaagaaacatcaaatagaggtgctcacaaaaggtgctggacaaaggaggaggaagaattactaataagactggaggctcagttcgagggaaacaaaaatattaataagcttattgcagaacacataaccaccaaaacagctaagcagatcagtgacaaaaggcgattgctgtccagaaagccagcagaggagccacgtgaggagcctggaacgtgtcatcacaccaggagagcagctgcgagcctgagaacggagcctgagatgagtcatcacgcccaggcagaggacagagataatggacctgggagacgccctctgccaggcagggcagctgccggagggagaacaatggacgagataagacgccaccctgataagggcaacggacagcagagacccaccaagcaaaaatcagaagaacagctgcaggcttactataaaaagacactagaggaacgactttcagctggggcacttaacaccttcccccgagcattcaagcaggtaatggaaggccgggatataaagctagtaatcaatcagacagcgcaggactgcttcggatgcctggaatccataagccaaataagaacggcaacccgagataaaaaggacacggtgacccgggagaaacacccaaagaaaccttttcagaagtggatgaagaagagagcaatcaaaaaaggtaattatcttcggttccagcgtttattttatcttgatagagggaaactggctaaaatcattttagatgatattgaatgcttgtcttgtgacataccactcagtgaaatttattcggtttttaaaacaagatgggaaacaactggtagctttaaaagccttggggactttaaaacttacgggaaggctgacaacactgccttcagagaattaattacggctaaagaaattgagaaaaatgtgcaggaaatgagcaaaggctcggctcccggtccagacgggattactcttggggacgtcgtaaagatggatcccgagttttcccggaccatggagattttcaatttatggttaacaactggtaaaatcccggacatggtgagggggtgcagaaccgttttgattccaaaatcatcaaagccggatcgtttgaaagacattaataactggagacctatcacgatcggttccatcttgctgagactgttctccaggattgtaacagctaggctgagcaaagcgtgccccctgaacccaaggcaaagaggctttatcagagcggcgggatgctctgaaaacttaaaactcctgcaaactataatttggtcggccaaaagagaacacagaccactgggtgttgtattcgtggacatcgccaaggcttttgacaccgtaagccaccagcacatcattcatgctttgcagcaaagagaggtggatccccacatcgtcggtctggtgagcaatatgtacgagaacatcagtacgtatatcaccacaaagaggaacacacacacagacaaaatccagatccgggttggagtaaagcagggtgacccgatgtcgccccttttatttaacctggcaatggaccctctattatgcaagctggaagagagtggcaaaggataccaccgaggacagagcagcatcacagcgatggcatttgcagacgatctggttttgctgagcgactcctgggaaaatatgaatacaaatattagcatactggagaccttctgcaatctgaccggactcaaaacacaggggcaaaagtgccacggcttttacatcaagccgacaaagaagtcttacaccatcaatgactgcgctgcctggactatcaacggcacacccctgaacatgatcgaccccggcgaatctgagaaatacctcggcctgcagtttgacccgtggattggaatagcaaggtccggtctctccacaaaactagatttttggcttcagcggatcgatcaagcaccacttaaacctctgcagaaaactgatattctcaaaacatacaccatccctcggctgatctacatagctgaccactcagaagtgaaaagcgcactactcgaaacccttgaccagaagatccggacagcggtcaaggaatggcttcacctacctccgtgcacctgcgatgccatcctgtactcgagcacgagagacggcggtttgggcatcaccaaattggcaggactgatccccagcgtgcaggcccgtagactgcatcggatcgcacagtcatctgacgatacgatgaaatgcttcatggaaaaagagaaaatggaacagctgcataagaaattgtggattcaagctggaggggacagagagaacataccctcgatttgggaagcaccaccgtcgagtgaaccaccaaacaacgtgagcacaaattcggaatgggaagcaccgacccagaaagataaatttccaaagccttgcaattggaggaaaaacgaattcaaaaaatggaccaaattggcatcccaaggccgcggaattgtaaattttgaaagagacaaaattagtaaccattggatccaatactacagacgcatacctcacaggaaactcctcactgcactacaactcagggccaacgtttaccccacgagagaatttctagccaggggtagacaagaccaatacatcaaggcgtgtaggcactgcgatgcggacaacgaatcctgcgcccacatcatcggcaactgcccagtgacacaggacgcccgaatcaagaggcacaattacatctgcgaactgcttctcgaggaggcgaagaagaaggactgggtagtgttcaaggaaccgcacataagggattccaacaaggaactgtacaaacctgacctgatatttgtgaaggatgggcgtgcacttgtcgtggatgtgacagtacggtatgaagcagccaaatcatcgctggaggaagccgctgcagagaaagtgagaaagtacaaacacctggaaacgcaggtaagacatctcacgaatgcaaaggacgttacttttgtgggctttcccctaggagcgcgggggaaatggcaccaagataactttaaacttttgactgagcttggcctctccaaatcgaggcaagtgaaaatggcagagactttttccacagtagcgctcttttcatctgtggacattgtacatatgtttgccagtagggccagaaaatctatggttatgtgataataggctgccttctgcggggcttgccttctggccatgcccttcttctctcccttgcacctgtacctcttggtctttgaataaagcctgagtaggaaggaccggtaaaaaaaaaaaaaaaaaaaaaaaaaaaaaaacgttgactaaaaaaaaaaaaaaaaaaaaaaaaaaaaaaaaaaaaaaaaaaaaaaaaaaaaaaaaaaaaaaaaaaaaaa

SEQ ID NO: 11075 - DNA, 5264 bp, synthetic construct
  source 1..5264: mol_type = other DNA
gaaataagagagaaaagaagagtaagaagaaatataagagaattcgccaccatggcccctaagaaaaagcggaaggtgaatatcagcggctctagctgcggcagccccaacagcgccgacaccagcagcgacttcaaggacctgtggaccaagctgaaggaatgccacgaccgggaagtgcagggactccaggtgaaggtcaccaaactcaagcaagaaagaatcctggacgcccagagactggaagaattcttcaccaagaaccagcagctgagagagcagcagaaagtgctgcacgagacaatcaaggttctggaagatagactgcgggccggcctgtgcgacagatgcgccgtgaccgaggaacacatgcgcaaaaagcagcaggagttcgagaacattagacagcaaaatctgaaattgatcacagagctgatgaacgagagaaacacactgcaggaggagaacaagaagctgagcgagcagctgcaacagaagatcgagaatgatcagcaacaccaggccgctgagctggaatgtgaagaggacgtgatccccgacagcccaatcacagctttcagcttttctggcgtgaacagactgaggcggaaggaaaacccccacgtgcggtacatcgagcagacccataccaagctggaacacagcgtgtgtgccaacgagatgagaaaggtgtccaagtcctccacccatccccagcacaaccctaacgaaaatgagatcctggtggctgatacctacgaccagtctcagagccctatggccaaggcccacggcaccagctcttatacccctgataagagctccttcaacctggccaccgtggtggccgagacactgggcctgggcgtgcaggaggaaagcgagacacagggcccaatgagccctctgggagatgagctgtaccactgcctggaaggcaaccacaagaaacagccttttgagtccggctccgagactcctggaacaagcgagagcgctacacctgagggcagccctaagagaaaggtgtccagcgccgagggcgctgccaaggaagagcctaaacggagaagcgccagactgagcgccaagccccccgccaaggtggaagccaagcctaagaaggccgccgctaaggacaagagcagcgataagaaagtccagaccaagggcaagcggggcgccaaaggcaaacaggccgaggtggccaaccaggagacaaaggaagatctgcctgctgagaacggcgaaaccaagaccgaggaatctccagcttctgacgaggccggagagaaggaggccaaaagcgacagcggctctgagacacctggaacaagcgagagcgccaccccggaatcctatgaacaacttgcaccacaaccgtgtgtgggagaaactttacattctagcctcccacgagacagtgaactgtttgtgcctgaagaggggagcagcgagaaggagagcgaggacgcgccaaaaacatctcctccgacgcctgggaaacatggtttggaacagactggggaggaaaaagtgatggtgactgttcctgacaaaaatccaccttgtccttgctgtggtacccgggtaaactctgtgttgaatctgattgaacatctgaaagtgtcacacgggaaaaggggggtttgttttcggtgtgcaaaatgtggaaaggaaaatagtaactatcacagtgttgtttgtcattttaagaaatgcaggggtccagagacggagaaagccccagctggggagtggatttgtgaggtatgcaacagagattttacaaccaaaattggcctgggacaacacaagagattggcacacccagcagtgagaaatcaggaaaggatcgttgcttcccaaccgaaagaaacatcaaatagaggtgctcacaaaaggtgctggacaaaggaggaggaagaattactaataagactggaggctcagttcgagggaaacaaaaatattaataagcttattgcagaacacataaccaccaaaacagctaagcagatcagtgacaaaaggcgattgctgtccagaaagccagcagaggagccacgtgaggagcctggaacgtgtcatcacaccaggagagcagctgcgagcctgagaacggagcctgagatgagtcatcacgcccaggcagaggacagagataatggacctgggagacgccctctgccaggcagggcagctgccggagggagaacaatggacgagataagacgccaccctgataagggcaacggacagcagagacccaccaagcaaaaatcagaagaacagctgcaggcttactataaaaagacactagaggaacgactttcagctggggcacttaacaccttcccccgagcattcaagcaggtaatggaaggccgggatataaagctagtaatcaatcagacagcgcaggactgcttcggatgcctggaatccataagccaaataagaacggcaacccgagataaaaaggacacggtgacccgggagaaacacccaaagaaaccttttcagaagtggatgaagaagagagcaatcaaaaaaggtaattatcttcggttccagcgtttattttatcttgatagagggaaactggctaaaatcattttagatgatattgaatgcttgtcttgtgacataccactcagtgaaatttattcggtttttaaaacaagatgggaaacaactggtagctttaaaagccttggggactttaaaacttacgggaaggctgacaacactgccttcagagaattaattacggctaaagaaattgagaaaaatgtgcaggaaatgagcaaaggctcggctcccggtccagacgggattactcttggggacgtcgtaaagatggatcccgagttttcccggaccatggagattttcaatttatggttaacaactggtaaaatcccggacatggtgagggggtgcagaaccgttttgattccaaaatcatcaaagccggatcgtttgaaagacattaataactggagacctatcacgatcggttccatcttgctgagactgttctccaggattgtaacagctaggctgagcaaagcgtgccccctgaacccaaggcaaagaggctttatcagagcggcgggatgctctgaaaacttaaaactcctgcaaactataatttggtcggccaaaagagaacacagaccactgggtgttgtattcgtggacatcgccaaggcttttgacaccgtaagccaccagcacatcattcatgctttgcagcaaagagaggtggatccccacatcgtcggtctggtgagcaatatgtacgagaacatcagtacgtatatcaccacaaagaggaacacacacacagacaaaatccagatccgggttggagtaaagcagggtgacccgatgtcgccccttttatttaacctggcaatggaccctctattatgcaagctggaagagagtggcaaaggataccaccgaggacagagcagcatcacagcgatggcatttgcagacgatctggttttgctgagcgactcctgggaaaatatgaatacaaatattagcatactggagaccttctgcaatctgaccggactcaaaacacaggggcaaaagtgccacggcttttacatcaagccgacaaagaagtcttacaccatcaatgactgcgctgcctggactatcaacggcacacccctgaacatgatcgaccccggcgaatctgagaaatacctcggcctgcagtttgacccgtggattggaatagcaaggtccggtctctccacaaaactagatttttggcttcagcggatcgatcaagcaccacttaaacctctgcagaaaactgatattctcaaaacatacaccatccctcggctgatctacatagctgaccactcagaagtgaaaagcgcactactcgaaacccttgaccagaagatccggacagcggtcaaggaatggcttcacctacctccgtgcacctgcgatgccatcctgtactcgagcacgagagacggcggtttgggcatcaccaaattggcaggactgatccccagcgtgcaggcccgtagactgcatcggatcgcacagtcatctgacgatacgatgaaatgcttcatggaaaaagagaaaatggaacagctgcataagaaattgtggattcaagctggaggggacagagagaacataccctcgatttgggaagcaccaccgtcgagtgaaccaccaaacaacgtgagcacaaattcggaatgggaagcaccgacccagaaagataaatttccaaagccttgcaattggaggaaaaacgaattcaaaaaatggaccaaattggcatcccaaggccgcggaattgtaaattttgaaagagacaaaattagtaaccattggatccaatactacagacgcatacctcacaggaaactcctcactgcactacaactcagggccaacgtttaccccacgagagaatttctagccaggggtagacaagaccaatacatcaaggcgtgtaggcactgcgatgcggacaacgaatcctgcgcccacatcatcggcaactgcccagtgacacaggacgcccgaatcaagaggcacaattacatctgcgaactgcttctcgaggaggcgaagaagaaggactgggtagtgttcaaggaaccgcacataagggattccaacaaggaactgtacaaacctgacctgatatttgtgaaggatgggcgtgcacttgtcgtggatgtgacagtacggtatgaagcagccaaatcatcgctggaggaagccgctgcagagaaagtgagaaagtacaaacacctggaaacggaagtaagacatctcacgaatgcaaaggacgttacttttgtgggctttcccctaggagcgcgggggaaatggcaccaagataactttaaacttttgactgagcttggcctctccaaatcgaggcaagtgaaactggcagagactttttccacagtagcgctcttttcatctgtggacattgtacatatgtttgccagtagggccagaaaatctatggttatgtgataataggctgccttctgcggggcttgccttctggccatgcccttcttctctcccttgcacctgtacctcttggtctttgaataaagcctgagtaggaaggaccggtaaaaaaaaaaaaaaaaaaaaaaaaaaaaaaacgttgactaaaaaaaaaaaaaaaaaaaaaaaaaaaaaaaaaaaaaaaaaaaaaaaaaaaaaaaaaaaaaaaaaaaaaa

SEQ ID NO: 11076 - DNA, 5264 bp, synthetic construct
  source 1..5264: mol_type = other DNA
gaaataagagagaaaagaagagtaagaagaaatataagagaattcgccaccatggcccctaagaaaaagcggaaggtgaatatcagcggctctagctgcggcagccccaacagcgccgacaccagcagcgacttcaaggacctgtggaccaagctgaaggaatgccacgaccgggaagtgcagggactccaggtgaaggtcaccaaactcaagcaagaaagaatcctggacgcccagagactggaagaattcttcaccaagaaccagcagctgagagagcagcagaaagtgctgcacgagacaatcaaggttctggaagatagactgcgggccggcctgtgcgacagatgcgccgtgaccgaggaacacatgcgcaaaaagcagcaggagttcgagaacattagacagcaaaatctgaaattgatcacagagctgatgaacgagagaaacacactgcaggaggagaacaagaagctgagcgagcagctgcaacagaagatcgagaatgatcagcaacaccaggccgctgagctggaatgtgaagaggacgtgatccccgacagcccaatcacagctttcagcttttctggcgtgaacagactgaggcggaaggaaaacccccacgtgcggtacatcgagcagacccataccaagctggaacacagcgtgtgtgccaacgagatgagaaaggtgtccaagtcctccacccatccccagcacaaccctaacgaaaatgagatcctggtggctgatacctacgaccagtctcagagccctatggccaaggcccacggcaccagctcttatacccctgataagagctccttcaacctggccaccgtggtggccgagacactgggcctgggcgtgcaggaggaaagcgagacacagggcccaatgagccctctgggagatgagctgtaccactgcctggaaggcaaccacaagaaacagccttttgagtccggctccgagactcctggaacaagcgagagcgctacacctgagggcagccctaagagaaaggtgtccagcgccgagggcgctgccaaggaagagcctaaacggagaagcgccagactgagcgccaagccccccgccaaggtggaagccaagcctaagaaggccgccgctaaggacaagagcagcgataagaaagtccagaccaagggcaagcggggcgccaaaggcaaacaggccgaggtggccaaccaggagacaaaggaagatctgcctgctgagaacggcgaaaccaagaccgaggaatctccagcttctgacgaggccggagagaaggaggccaaaagcgacagcggctctgagacacctggaacaagcgagagcgccaccccggaatcctatgaacaacttgcaccacaaccgtgtgtgggagaaactttacattctagcctcccacgagacagtgaactgtttgtgcctgaagaggggagcagcgagaaggagagcgaggacgcgccaaaaacatctcctccgacgcctgggaaacatggtttggaacagactggggaggaaaaagtgatggtgactgttcctgacaaaaatccaccttgtccttgctgtggtacccgggtaaactctgtgttgaatctgattgaacatctgaaagtgtcacacgggaaaaggggggtttgttttcggtgtgcaaaatgtggaaaggaaaatagtaactatcacagtgttgtttgtcattttaagaaatgcaggggtccagagacggagaaagccccagctggggagtggatttgtgaggtatgcaacagagattttacaaccaaaattggcctgggacaacacaagagattggcacacccagcagtgagaaatcaggaaaggatcgttgcttcccaaccgaaagaaacatcaaatagaggtgctcacaaaaggtgctggacaaaggaggaggaagaattactaataagactggaggctcagttcgagggaaacaaaaatattaataagcttattgcagaacacataaccaccaaaacagctaagcagatcagtgacaaaaggcgattgctgtccagaaagccagcagaggagccacgtgaggagcctggaacgtgtcatcacaccaggagagcagctgcgagcctgagaacggagcctgagatgagtcatcacgcccaggcagaggacagagataatggacctgggagacgccctctgccaggcagggcagctgccggagggagaacaatggacgagataagacgccaccctgataagggcaacggacagcagagacccaccaagcaaaaatcagaagaacagctgcaggcttactataaaaagacactagaggaacgactttcagctggggcacttaacaccttcccccgagcattcaagcaggtaatggaaggccgggatataaagctagtaatcaatcagacagcgcaggactgcttcggatgcctggaatccataagccaaataagaacggcaacccgagataaaaaggacacggtgacccgggagaaacacccaaagaaaccttttcagaagtggatgaagaagagagcaatcaaaaaaggtaattatcttcggttccagcgtttattttatcttgatagagggaaactggctaaaatcattttagatgatattgaatgcttgtcttgtgacataccactcagtgaaatttattcggtttttaaaacaagatgggaaacaactggtagctttaaaagccttggggactttaaaacttacgggaaggctgacaacactgccttcagagaattaattacggctaaagaaattgagaaaaatgtgcaggaaatgagcaaaggctcggctcccggtccagacgggattactcttggggacgtcgtaaagatggatcccgagttttcccggaccatggagattttcaatttatggttaacaactggtaaaatcccggacatggtgagggggtgcagaaccgttttgattccaaaatcatcaaagccggatcgtttgaaagacattaataactggagacctatcacgatcggttccatcttgctgagactgttctccaggattgtaacagctaggctgagcaaagcgtgccccctgaacccaaggcaaagaggctttatcagagcggcgggatgctctgaaaacttaaaactcctgcaaactataatttggtcggccaaaagagaacacagaccactgggtgttgtattcgtggacatcgccaaggcttttgacaccgtaagccaccagcacatcattcatgctttgcagcaaagagaggtggatccccacatcgtcggtctggtgagcaatatgtacgagaacatcagtacgtatatcaccacaaagaggaacacacacacagacaaaatccagatccgggttggagtaaagcagggtgacccgatgtcgccccttttatttaacctggcaatggaccctctattatgcaagctggaagagagtggcaaaggataccaccgaggacagagcagcatcacagcgatggcatttgcagacgatctggttttgctgagcgactcctgggaaaatatgaatacaaatattagcatactggagaccttctgcaatctgaccggactcaaaacacaggggcaaaagtgccacggcttttacatcaagccgacaaagaagtcttacaccatcaatgactgcgctgcctggactatcaacggcacacccctgaacatgatcgaccccggcgaatctgagaaatacctcggcctgcagtttgacccgtggattggaatagcaaggtccggtctctccacaaaactagatttttggcttcagcggatcgatcaagcaccacttaaacctctgcagaaaactgatattctcaaaacatacaccatccctcggctgatctacatagctgaccactcagaagtgaaaagcgcactactcgaaacccttgaccagaagatccggacagcggtcaaggaatggcttcacctacctccgtgcacctgcgatgccatcctgtactcgagcacgagagacggcggtttgggcatcaccaaattggcaggactgatccccagcgtgcaggcccgtagactgcatcggatcgcacagtcatctgacgatacgatgaaatgcttcatggaaaaagagaaaatggaacagctgcataagaaattgtggattcaagctggaggggacagagagaacataccctcgatttgggaagcaccaccgtcgagtgaaccaccaaacaacgtgagcacaaattcggaatgggaagcaccgacccagaaagataaatttccaaagccttgcaattggaggaaaaacgaattcaaaaaatggaccaaattggcatcccaaggccgcggaattgtaaattttgaaagagacaaaattagtaaccattggatccaatactacagacgcatacctcacaggaaactcctcactgcactacaactcagggccaacgtttaccccacgagagaatttctagccaggggtagacaagaccaatacatcaaggcgtgtaggcactgcgatgcggacaacgaatcctgcgcccacatcatcggcaactgcccagtgacacaggacgcccgaatcaagaggcacaattacatctgcgaactgcttctcgaggaggcgaagaagaaggactgggtagtgttcaaggaaccgcacataagggattccaacaaggaactgtacaaacctgacctgatatttgtgaaggatgggcgtgcacttgtcgtggatgtgacagtacggtatgaagcagccaaatcatcgctggaggaagccgctgcagagaaagtgagaaagtacaaacacctggaaacggaagtaagacatctcacgaatgcaaaggacgttacttttgtgggctttcccctaggagcgcgggggaaatggcaccaagataactttaaacttttgactgagcttggcctctccaaatcgaggcaagtgaaaatggcagagactttttccacagtagcgctcttttcatctgtggacattgtacatatgtttgccagtagggccagaagatctatggttatgtgataataggctgccttctgcggggcttgccttctggccatgcccttcttctctcccttgcacctgtacctcttggtctttgaataaagcctgagtaggaaggaccggtaaaaaaaaaaaaaaaaaaaaaaaaaaaaaaacgttgactaaaaaaaaaaaaaaaaaaaaaaaaaaaaaaaaaaaaaaaaaaaaaaaaaaaaaaaaaaaaaaaaaaaaaa

SEQ ID NO: 11077 - DNA, 5389 bp, synthetic construct
  source 1..5389: mol_type = other DNA
ggtctagttacaactgggcatcgctgcagagatcgcacctcctcgtggtcccgctggtagcccttcgaagggtgactaagtcgatctctgccccaggtacggagccgttgggactcaccagtccaacgtaactcctgcctaaattcggtgaaacaaattcctcggtaaaaagccccatggcccctaagaaaaagcggaaggtgaatatcagcggctctagctgcggcagccccaacagcgccgacaccagcagcgacttcaaggacctgtggaccaagctgaaggaatgccacgaccgggaagtgcagggactccaggtgaaggtcaccaaactcaagcaagaaagaatcctggacgcccagagactggaagaattcttcaccaagaaccagcagctgagagagcagcagaaagtgctgcacgagacaatcaaggttctggaagatagactgcgggccggcctgtgcgacagatgcgccgtgaccgaggaacacatgcgcaaaaagcagcaggagttcgagaacattagacagcaaaatctgaaattgatcacagagctgatgaacgagagaaacacactgcaggaggagaacaagaagctgagcgagcagctgcaacagaagatcgagaatgatcagcaacaccaggccgctgagctggaatgtgaagaggacgtgatccccgacagcccaatcacagctttcagcttttctggcgtgaacagactgaggcggaaggaaaacccccacgtgcggtacatcgagcagacccataccaagctggaacacagcgtgtgtgccaacgagatgagaaaggtgtccaagtcctccacccatccccagcacaaccctaacgaaaatgagatcctggtggctgatacctacgaccagtctcagagccctatggccaaggcccacggcaccagctcttatacccctgataagagctccttcaacctggccaccgtggtggccgagacactgggcctgggcgtgcaggaggaaagcgagacacagggcccaatgagccctctgggagatgagctgtaccactgcctggaaggcaaccacaagaaacagccttttgagtccggctccgagactcctggaacaagcgagagcgctacacctgagggcagccctaagagaaaggtgtccagcgccgagggcgctgccaaggaagagcctaaacggagaagcgccagactgagcgccaagccccccgccaaggtggaagccaagcctaagaaggccgccgctaaggacaagagcagcgataagaaagtccagaccaagggcaagcggggcgccaaaggcaaacaggccgaggtggccaaccaggagacaaaggaagatctgcctgctgagaacggcgaaaccaagaccgaggaatctccagcttctgacgaggccggagagaaggaggccaaaagcgacagcggctctgagacacctggaacaagcgagagcgccaccccggaatcctacgaacagctggctccccagccctgtgtaggcgagacattacacagcagcctgcccagagacagcgagctgttcgttccggaagagggctctagcgagaaggagagcgaggacgctcctaagaccagccctcctacccctggcaaacacggcctggagcaaacaggcgaggagaaggtcatggtgaccgtgcccgacaagaaccctccctgtccttgctgtggcacaagagtcaacagcgtgctgaacctcatcgagcacctgaaggtgtcccacggcaagagaggcgtgtgcttcagatgcgccaagtgcggcaaggagaacagcaactaccacagcgtcgtgtgccacttcaagaagtgcagaggccctgagaccgagaaggctcccgctggcgaatggatttgcgaggtgtgcaacagagacttcaccaccaagatcggcctgggccagcacaagcggttagctcaccctgctgtgagaaaccaggagagaatcgtggccagccagcccaaggagacaagcaacaggggcgctcacaagagatgctggaccaaggaggaagaggagctgctcatcagactggaggctcagttcgagggcaacaagaacatcaataagcttatcgccgagcacatcaccacaaagaccgccaagcagatcagcgacaagaggagactgctgtccagaaagcccgccgaggagcctagaatggaacctggtacatgtcaccacaccagaagagccgccgctagcctgagaaccgagcccgaaatgtctcaccacgctcaggccgaggacagagacaacggccctggcaggagacctcttcccggcagagctgctgctggaggcagaaccatggacgagatcaggagacaccccgataagggcaacggccagcagagacccacaaagcagaagtccgaggaacagctccaggcctactacaagaaaaccctggaggagagactgtccgcgggagctctgaacaccttccctagagccttcaaacaagtcatggagggcagagacatcaagctggtgatcaaccagaccgcccaggactgcttcggctgccttgagtctatcagccagatcaggaccgccacacgggataagaaggacaccgtcaccagagagaagcaccccaagaagcccttccagaaatggatgaagaagagggccatcaagaagggcaattacctgagattccagaggctgttccacctggacagaggcaagctggccaagatcatcctggacgacatcgagtgcctgagctgcgacatccctctgagcgagatctacagcgtgttcaagaccagatgggagaccaccggcagcttcaagtctctgggcgacttcaagacatacggcaaggccgacaacaccgccttcagagagctcatcaccgctaaggagatcgagaagaacgtgcaggagatgagcaagggcagcgctcctggccccgatggaattacactgggcgatgtggtgaagatggaccccgagttcagcagaacaatggagatcttcaacctgtggctcaccacaggcaagatccccgacatggtgagaggctgcagaaccgtgcttatccccaagagcagcaagcccgacagactgaaggatatcaacaactggagacccatcaccatcggcagcatcctgctgcggctgttcagccggattgtgaccgctagactgagcaaagcctgtcccctgaaccccagacagagaggcttcatcagagccgctggctgcagcgagaacctgaagctgctccagacaatcatctggagcgccaagagagagcacagacccctgggcgttgttttcgtggacatcgccaaggccttcgacaccgtgtcccatcagcacattatccacgccctgcagcagagggaggtcgaccctcatattgtgggcctggtgtccaacatgtacgagaacatctccacctatattacgaccaagagaaacacccacacagacaagatccagatccgggtcggcgtcaagcagggcgatcctatgtctcctctgctgttcaacctcgccatggaccctctgctctgcaagctcgaggagtctggaaagggctaccatagaggccaatcatcgatcaccgccatggccttcgccgacgacctggtgcttttaagcgacagctgggagaacatgaacaccaacatctctatcctggagacattctgcaaccttaccggcctgaaaacccagggccagaagtgtcatggcttctacatcaaacccaccaagaagagctacaccatcaacgactgcgccgcctggacaatcaacggcacccctctcaacatgatcgaccccggcgagtctgagaagtacctgggcctgcagttcgatccctggatcggcatcgctagaagcggcttgagcaccaagctggacttttggctccaacgcatagaccaggcccccctgaagcctcttcagaaactggacattttgaaaacttatacgatccccagactcatctacatcgccgaccactccgaggtcaagagcgctctgctggaaaccctggaccagaaaatcagaaccgccgtcaaggaatggctgcacctgcccccttgcacatgcgacgctatcctgtacagcagcaccagggacggcggcttaggaatcaccaagttagccggcctcatccccagcgtgcaggctaggagactccacagaatcgcccagagcagcgacgacaccatgaagtgcttcatggagaaggaaaagatggagcagctgcacaagaagctgtggatccaagcgggcggagatcgtgagaacattcccagcatctgggaggcccctcccagctcagaacctcccaataacgtgtccaccaattctgaatgggaggctcccacccagaaggataagtttcccaagccctgcaactggcggaagaacgagttcaaaaaatggacaaagctggctagccagggcaggggcatcgtgaacttcgaaagggacaagattagcaaccactggatccagtactacagaagaatcccccacagaaagctcctcaccgccctccagttacgtgcaaacgtgtacccaaccagagaattcctggccagaggcagacaggaccagtacatcaaggcctgccggcactgcgatgccgataacgagagctgtgctcacatcatcggcaactgccccgtcacccaggacgccagaatcaagagacacaactacatctgcgagttacttctggaggaagccaagaagaaggattgggttgtgttcaaggagccccacatcagagactccaacaaggagctgtacaagccagacctcatcttcgtgaaggacggcagagccctggtggtggacgtcaccgtcagatacgaggctgctaagtccagccttgaggaggctgccgccgagaaagtgcggaagtacaagcacctggaaacagaggtcagacacctcaccaacgccaaggacgttaccttcgtgggcttccccctaggtgctagaggcaaatggcaccaggacaacttcaagctgcttaccgagctgggcctctccaagagccgacaggttaagatggccgagaccttcagcaccgtcgccctgttctcttctgtggacattgtgcacatgttcgcctccagagccagaaagagcatggtgatgtgataataggctgccttctgcggggcttgccttctggccatgcccttcttctctcccttgcacctgtacctcttggtctttgaataaagcctgagtaggaaggaccggtaaaaaaaaaaaaaaaaaaaaaaaaaaaaaaacgttgactaaaaaaaaaaaaaaaaaaaaaaaaaaaaaaaaaaaaaaaaaaaaaaaaaaaaaaaaaaaaaaaaaaaaaa

SEQ ID NO: 11078 - DNA, 6307 bp, synthetic construct
  source 1..6307: mol_type = other DNA
ggtctagttacaactgggcatcgctgcagagatcgcacctcctcgtggtcccgctggtagcccttcgaagggtgactaagtcgatctctgccccaggtacggagccgttgggactcaccagtccaacgtaactcctgcctaaattcggtgaaacaaattcctcggtaaaaagccccatggcccctaagaaaaagcggaaggtggacagaaagacaagactgtctgagcctccaaccctggccctgagactgaagccctacaagaccgccatccagcagctgagaagcgtcatcagagccctgaaggaaaataccaccgttacattcctgcctacacccagcctgatcctgcagacagtgcgcagccactgcgtgtctaagatcacatttaattctagctgcctgtatatcaccgacaagtctttccagcctaagaccatcaacaacagcacccctctgctgggcaactttatgtacctgacctccagcaaggacctgactaaattctacgtgcaagacatctccgatctgagcgccaagatctctatgtgcgcccctgatttcaacatggaattcagcagcgcctgtgtgcatggccaggacatcgtcagagagagcgagaacagcgctgtgcacgtggacctggacttcggcgtggtggctgatctgctcaaatggatcggcccccacaccagagtgaagcggaacgtgaagaaagccccttgtcctacaggcacagtgcagatcctggtgcacgccggaccacctgctatcaagttcatccttacaaacggcagcgagctggaattcaccgccaacaaccgggtgtccttccacggcgtgaaaaacatgcggattaacgtgcaactgaaaaatttttaccagaccctgctgaactgcgccgtgaccaagctgccctgcaccctcaggattgtgaccgagcacgacaccctgctgtacgtcgccagcagaaacggcctgttcgccgtggagaacttcctgaccgaggaaccctttcagcggggtgatcctttcgacaagaactacgtgggaaatagcggcaagagcagatccggctccgagactcctggaacaagcgagagcgctacacctgagggcagcaatatcagcggctctagctgcggcagccccaacagcgccgacaccagcagcgacttcaaggacctgtggaccaagctgaaggaatgccacgaccgggaagtgcagggactccaggtgaaggtcaccaaactcaagcaagaaagaatcctggacgcccagagactggaagaattcttcaccaagaaccagcagctgagagagcagcagaaagtgctgcacgagacaatcaaggttctggaagatagactgcgggccggcctgtgcgacagatgcgccgtgaccgaggaacacatgcgcaaaaagcagcaggagttcgagaacattagacagcaaaatctgaaattgatcacagagctgatgaacgagagaaacacactgcaggaggagaacaagaagctgagcgagcagctgcaacagaagatcgagaatgatcagcaacaccaggccgctgagctggaatgtgaagaggacgtgatccccgacagcccaatcacagctttcagcttttctggcgtgaacagactgaggcggaaggaaaacccccacgtgcggtacatcgagcagacccataccaagctggaacacagcgtgtgtgccaacgagatgagaaaggtgtccaagtcctccacccatccccagcacaaccctaacgaaaatgagatcctggtggctgatacctacgaccagtctcagagccctatggccaaggcccacggcaccagctcttatacccctgataagagctccttcaacctggccaccgtggtggccgagacactgggcctgggcgtgcaggaggaaagcgagacacagggcccaatgagccctctgggagatgagctgtaccactgcctggaaggcaaccacaagaaacagccttttgagtccggctccgagactcctggaacaagcgagagcgctacacctgagggcagccctaagagaaaggtgtccagcgccgagggcgctgccaaggaagagcctaaacggagaagcgccagactgagcgccaagccccccgccaaggtggaagccaagcctaagaaggccgccgctaaggacaagagcagcgataagaaagtccagaccaagggcaagcggggcgccaaaggcaaacaggccgaggtggccaaccaggagacaaaggaagatctgcctgctgagaacggcgaaaccaagaccgaggaatctccagcttctgacgaggccggagagaaggaggccaaaagcgacagcggctctgagacacctggaacaagcgagagcgccaccccggaatcctacgaacagctggctccccagccctgtgtaggcgagacattacacagcagcctgcccagagacagcgagctgttcgttccggaagagggctctagcgagaaggagagcgaggacgctcctaagaccagccctcctacccctggcaaacacggcctggagcaaacaggcgaggagaaggtcatggtgaccgtgcccgacaagaaccctccctgtccttgctgtggcacaagagtcaacagcgtgctgaacctcatcgagcacctgaaggtgtcccacggcaagagaggcgtgtgcttcagatgcgccaagtgcggcaaggagaacagcaactaccacagcgtcgtgtgccacttcaagaagtgcagaggccctgagaccgagaaggctcccgctggcgaatggatttgcgaggtgtgcaacagagacttcaccaccaagatcggcctgggccagcacaagcggttagctcaccctgctgtgagaaaccaggagagaatcgtggccagccagcccaaggagacaagcaacaggggcgctcacaagagatgctggaccaaggaggaagaggagctgctcatcagactggaggctcagttcgagggcaacaagaacatcaataagcttatcgccgagcacatcaccacaaagaccgccaagcagatcagcgacaagaggagactgctgtccagaaagcccgccgaggagcctagaatggaacctggtacatgtcaccacaccagaagagccgccgctagcctgagaaccgagcccgaaatgtctcaccacgctcaggccgaggacagagacaacggccctggcaggagacctcttcccggcagagctgctgctggaggcagaaccatggacgagatcaggagacaccccgataagggcaacggccagcagagacccacaaagcagaagtccgaggaacagctccaggcctactacaagaaaaccctggaggagagactgtccgcgggagctctgaacaccttccctagagccttcaaacaagtcatggagggcagagacatcaagctggtgatcaaccagaccgcccaggactgcttcggctgccttgagtctatcagccagatcaggaccgccacacgggataagaaggacaccgtcaccagagagaagcaccccaagaagcccttccagaaatggatgaagaagagggccatcaagaagggcaattacctgagattccagaggctgttctacctggacagaggcaagctggccaagatcatcctggacgacatcgagtgcctgagctgcgacatccctctgagcgagatctacagcgtgttcaagaccagatgggagaccaccggcagcttcaagtctctgggcgacttcaagacatacggcaaggccgacaacaccgccttcagagagctcatcaccgctaaggagatcgagaagaacgtgcaggagatgagcaagggcagcgctcctggccccgatggaattacactgggcgatgtggtgaagatggaccccgagttcagcagaacaatggagatcttcaacctgtggctcaccacaggcaagatccccgacatggtgagaggctgcagaaccgtgcttatccccaagagcagcaagcccgacagactgaaggatatcaacaactggagacccatcaccatcggcagcatcctgctgcggctgttcagccggattgtgaccgctagactgagcaaagcctgtcccctgaaccccagacagagaggcttcatcagagccgctggctgcagcgagaacctgaagctgctccagacaatcatctggagcgccaagagagagcacagacccctgggcgttgttttcgtggacatcgccaaggccttcgacaccgtgtcccatcagcacattatccacgccctgcagcagagggaggtcgaccctcatattgtgggcctggtgtccaacatgtacgagaacatctccacctatattacgaccaagagaaacacccacacagacaagatccagatccgggtcggcgtcaagcagggcgatcctatgtctcctctgctgttcaacctcgccatggaccctctgctctgcaagctcgaggagtctggaaagggctaccatagaggccaatcatcgatcaccgccatggccttcgccgacgacctggtgcttttaagcgacagctgggagaacatgaacaccaacatctctatcctggagacattctgcaaccttaccggcctgaaaacccagggccagaagtgtcatggcttctacatcaaacccaccaagaagagctacaccatcaacgactgcgccgcctggacaatcaacggcacccctctcaacatgatcgaccccggcgagtctgagaagtacctgggcctgcagttcgatccctggatcggcatcgctagaagcggcttgagcaccaagctggacttttggctccaacgcatagaccaggcccccctgaagcctcttcagaaactggacattttgaaaacttatacgatccccagactcatctacatcgccgaccactccgaggtcaagagcgctctgctggaaaccctggaccagaaaatcagaaccgccgtcaaggaatggctgcacctgcccccttgcacatgcgacgctatcctgtacagcagcaccagggacggcggcttaggaatcaccaagttagccggcctcatccccagcgtgcaggctaggagactccacagaatcgcccagagcagcgacgacaccatgaagtgcttcatggagaaggaaaagatggagcagctgcacaagaagctgtggatccaagcgggcggagatcgtgagaacattcccagcatctgggaggcccctcccagctcagaacctcccaataacgtgtccaccaattctgaatgggaggctcccacccagaaggataagtttcccaagccctgcaactggcggaagaacgagttcaaaaaatggacaaagctggctagccagggcaggggcatcgtgaacttcgaaagggacaagattagcaaccactggatccagtactacagaagaatcccccacagaaagctcctcaccgccctccagttacgtgcaaacgtgtacccaaccagagaattcctggccagaggcagacaggaccagtacatcaaggcctgccggcactgcgatgccgataacgagagctgtgctcacatcatcggcaactgccccgtcacccaggacgccagaatcaagagacacaactacatctgcgagttacttctggaggaagccaagaagaaggattgggttgtgttcaaggagccccacatcagagactccaacaaggagctgtacaagccagacctcatcttcgtgaaggacggcagagccctggtggtggacgtcaccgtcagatacgaggctgctaagtccagccttgaggaggctgccgccgagaaagtgcggaagtacaagcacctggaaacagaggtcagacacctcaccaacgccaaggacgttaccttcgtgggcttccccctaggtgctagaggcaaatggcaccaggacaacttcaagctgcttaccgagctgggcctctccaagagccgacaggttaagatggccgagaccttcagcaccgtcgccctgttctcttctgtggacattgtgcacatgttcgcctccagagccagaaagagcatggtgatgtgataataggctgccttctgcggggcttgccttctggccatgcccttcttctctcccttgcacctgtacctcttggtctttgaataaagcctgagtaggaaggaccggtaaaaaaaaaaaaaaaaaaaaaaaaaaaaaaacgttgactaaaaaaaaaaaaaaaaaaaaaaaaaaaaaaaaaaaaaaaaaaaaaaaaaaaaaaaaaaaaaaaaaaaaaa

SEQ ID NO: 11079 - DNA, 5389 bp, synthetic construct
  source 1..5389: mol_type = other DNA
ggtctagttacaactgggcatcgctgcagagatcgcacctcctcgtggtcccgctggtagcccttcgaagggtgactaagtcgatctctgccccaggtacggagccgttgggactcaccagtccaacgtaactcctgcctaaattcggtgaaacaaattcctcggtaaaaagccccatggcccctaagaaaaagcggaaggtgaatatcagcggctctagctgcggcagccccaacagcgccgacaccagcagcgacttcaaggacctgtggaccaagctgaaggaatgccacgaccgggaagtgcagggactccaggtgaaggtcaccaaactcaagcaagaaagaatcctggacgcccagagactggaagaattcttcaccaagaaccagcagctgagagagcagcagaaagtgctgcacgagacaatcaaggttctggaagatagactgcgggccggcctgtgcgacagatgcgccgtgaccgaggaacacatgcgcaaaaagcagcaggagttcgagaacattagacagcaaaatctgaaattgatcacagagctgatgaacgagagaaacacactgcaggaggagaacaagaagctgagcgagcagctgcaacagaagatcgagaatgatcagcaacaccaggccgctgagctggaatgtgaagaggacgtgatccccgacagcccaatcacagctttcagcttttctggcgtgaacagactgaggcggaaggaaaacccccacgtgcggtacatcgagcagacccataccaagctggaacacagcgtgtgtgccaacgagatgagaaaggtgtccaagtcctccacccatccccagcacaaccctaacgaaaatgagatcctggtggctgatacctacgaccagtctcagagccctatggccaaggcccacggcaccagctcttatacccctgataagagctccttcaacctggccaccgtggtggccgagacactgggcctgggcgtgcaggaggaaagcgagacacagggcccaatgagccctctgggagatgagctgtaccactgcctggaaggcaaccacaagaaacagccttttgagtccggctccgagactcctggaacaagcgagagcgctacacctgagggcagccctaagagaaaggtgtccagcgccgagggcgctgccaaggaagagcctaaacggagaagcgccagactgagcgccaagccccccgccaaggtggaagccaagcctaagaaggccgccgctaaggacaagagcagcgataagaaagtccagaccaagggcaagcggggcgccaaaggcaaacaggccgaggtggccaaccaggagacaaaggaagatctgcctgctgagaacggcgaaaccaagaccgaggaatctccagcttctgacgaggccggagagaaggaggccaaaagcgacagcggctctgagacacctggaacaagcgagagcgccaccccggaatcctacgaacagctggctccccagccctgtgtaggcgagacattacacagcagcctgcccagagacagcgagctgttcgttccggaagagggctctagcgagaaggagagcgaggacgctcctaagaccagccctcctacccctggcaaacacggcctggagcaaacaggcgaggagaaggtcatggtgaccgtgcccgacaagaaccctccctgtccttgctgtggcacaagagtcaacagcgtgctgaacctcatcgagcacctgaaggtgtcccacggcaagagaggcgtgtgcttcagatgcgccaagtgcggcaaggagaacagcaactaccacagcgtcgtgtgccacttcaagaagtgcagaggccctgagaccgagaaggctcccgctggcgaatggatttgcgaggtgtgcaacagagacttcaccaccaagatcggcctgggccagcacaagcggttagctcaccctgctgtgagaaaccaggagagaatcgtggccagccagcccaaggagacaagcaacaggggcgctcacaagagatgctggaccaaggaggaagaggagctgctcatcagactggaggctcagttcgagggcaacaagaacatcaataagcttatcgccgagcacatcaccacaaagaccgccaagcagatcagcgacaagaggagactgctgtccagaaagcccgccgaggagcctagaatggaacctggtacatgtcaccacaccagaagagccgccgctagcctgagaaccgagcccgaaatgtctcaccacgctcaggccgaggacagagacaacggccctggcaggagacctcttcccggcagagctgctgctggaggcagaaccatggacgagatcaggagacaccccgataagggcaacggccagcagagacccacaaagcagaagtccgaggaacagctccaggcctactacaagaaaaccctggaggagagactgtccgcgggagctctgaacaccttccctagagccttcaaacaagtcatggagggcagagacatcaagctggtgatcaaccagaccgcccaggactgcttcggctgccttgagtctatcagccagatcaggaccgccacacgggataagaaggacaccgtcaccagagagaagcaccccaagaagcccttccagaaatggatgaagaagagggccatcaagaagggcaattacctgagattccagaggctgttctacctggacagaggcaagctggccaagatcatcctggacgacatcgagtgcctgagctgcgacatccctctgagcgagatctacagcgtgttcaagaccagatgggagaccaccggcagcttcaagtctctgggcgacttcaagacatacggcaaggccgacaacaccgccttcagagagctcatcaccgctaaggagatcgagaagaacgtgcaggagatgagcaagggcagcgctcctggccccgatggaattacactgggcgatgtggtgaagatggaccccgagttcagcagaacaatggagatcttcaacctgtggctcaccacaggcaagatccccgacatggtgagaggctgcagaaccgtgcttatccccaagagcagcgaccccgacagactgaaggatatcaacaactggagacccatcaccatcggcagcatcctgctgcggctgttcagccggattgtgaccgctagactgagcaaagcctgtcccctgaaccccagacagagaggcttcatcagagccgctggctgcagcgagaacctgaagctgctccagacaatcatctggagcgccaagagagagcacagacccctgggcgttgttttcgtggacatcgccaaggccttcgacaccgtgtcccatcagcacattatccacgccctgcagcagagggaggtcgaccctcatattgtgggcctggtgtccaacatgtacgagaacatctccacctatattacgaccaagagaaacacccacacagacaagatccagatccgggtcggcgtcaagcagggcgatcctatgtctcctctgctgttcaacctcgccatggaccctctgctctgcaagctcgaggagtctggaaagggctaccatagaggccaatcatcgatcaccgccatggccttcgccgacgacctggtgcttttaagcgacagctgggagaacatgaacaccaacatctctatcctggagacattctgcaaccttaccggcctgaaaacccagggccagaagtgtcatggcttctacatcaaacccaccaagaagagctacaccatcaacgactgcgccgcctggacaatcaacggcacccctctcaacatgatcgaccccggcgagtctgagaagtacctgggcctgcagttcgatccctggatcggcatcgctagaagcggcttgagcaccaagctggacttttggctccaacgcatagaccaggcccccctgaagcctcttcagaaactggacattttgaaaacttatacgatccccagactcatctacatcgccgaccactccgaggtcaagagcgctctgctggaaaccctggaccagaaaatcagaaccgccgtcaaggaatggctgcacctgcccccttgcacatgcgacgctatcctgtacagcagcaccagggacggcggcttaggaatcaccaagttagccggcctcatccccagcgtgcaggctaggagactccacagaatcgcccagagcagcgacgacaccatgaagtgcttcatggagaaggaaaagatggagcagctgcacaagaagctgtggatccaagcgggcggagatcgtgagaacattcccagcatctgggaggcccctcccagctcagaacctcccaataacgtgtccaccaattctgaatgggaggctcccacccagaaggataagtttcccaagccctgcaactggcggaagaacgagttcaaaaaatggacaaagctggctagccagggcaggggcatcgtgaacttcgaaagggacaagattagcaaccactggatccagtactacagaagaatcccccacagaaagctcctcaccgccctccagttacgtgcaaacgtgtacccaaccagagaattcctggccagaggcagacaggaccagtacatcaaggcctgccggcactgcgatgccgataacgagagctgtgctcacatcatcggcaactgccccgtcacccaggacgccagaatcaagagacacaactacatctgcgagttacttctggaggaagccaagaagaaggattgggttgtgttcaaggagccccacatcagagactccaacaaggagctgtacaagccagacctcatcttcgtgaaggacggcagagccctggtggtggacgtcaccgtcagatacgaggctgctaagtccagccttgaggaggctgccgccgagaaagtgcggaagtacaagcacctggaaacagaggtcagacacctcaccaacgccaaggacgttaccttcgtgggcttccccctaggtgctagaggcaaatggcaccaggacaacttcaagctgcttaccgagctgggcctctccaagagccgacaggttaagatggccgagaccttcagcaccgtcgccctgttctcttctgtggacattgtgcacatgttcgcctccagagccagaaagagcatggtgatgtgataataggctgccttctgcggggcttgccttctggccatgcccttcttctctcccttgcacctgtacctcttggtctttgaataaagcctgagtaggaaggaccggtaaaaaaaaaaaaaaaaaaaaaaaaaaaaaaacgttgactaaaaaaaaaaaaaaaaaaaaaaaaaaaaaaaaaaaaaaaaaaaaaaaaaaaaaaaaaaaaaaaaaaaaaa

SEQ ID NO: 11080 - DNA, 5389 bp, synthetic construct
  source 1..5389: mol_type = other DNA
ggtctagttacaactgggcatcgctgcagagatcgcacctcctcgtggtcccgctggtagcccttcgaagggtgactaagtcgatctctgccccaggtacggagccgttgggactcaccagtccaacgtaactcctgcctaaattcggtgaaacaaattcctcggtaaaaagccccatggcccctaagaaaaagcggaaggtgaatatcagcggctctagctgcggcagccccaacagcgccgacaccagcagcgacttcaaggacctgtggaccaagctgaaggaatgccacgaccgggaagtgcagggactccaggtgaaggtcaccaaactcaagcaagaaagaatcctggacgcccagagactggaagaattcttcaccaagaaccagcagctgagagagcagcagaaagtgctgcacgagacaatcaaggttctggaagatagactgcgggccggcctgtgcgacagatgcgccgtgaccgaggaacacatgcgcaaaaagcagcaggagttcgagaacattagacagcaaaatctgaaattgatcacagagctgatgaacgagagaaacacactgcaggaggagaacaagaagctgagcgagcagctgcaacagaagatcgagaatgatcagcaacaccaggccgctgagctggaatgtgaagaggacgtgatccccgacagcccaatcacagctttcagcttttctggcgtgaacagactgaggcggaaggaaaacccccacgtgcggtacatcgagcagacccataccaagctggaacacagcgtgtgtgccaacgagatgagaaaggtgtccaagtcctccacccatccccagcacaaccctaacgaaaatgagatcctggtggctgatacctacgaccagtctcagagccctatggccaaggcccacggcaccagctcttatacccctgataagagctccttcaacctggccaccgtggtggccgagacactgggcctgggcgtgcaggaggaaagcgagacacagggcccaatgagccctctgggagatgagctgtaccactgcctggaaggcaaccacaagaaacagccttttgagtccggctccgagactcctggaacaagcgagagcgctacacctgagggcagccctaagagaaaggtgtccagcgccgagggcgctgccaaggaagagcctaaacggagaagcgccagactgagcgccaagccccccgccaaggtggaagccaagcctaagaaggccgccgctaaggacaagagcagcgataagaaagtccagaccaagggcaagcggggcgccaaaggcaaacaggccgaggtggccaaccaggagacaaaggaagatctgcctgctgagaacggcgaaaccaagaccgaggaatctccagcttctgacgaggccggagagaaggaggccaaaagcgacagcggctctgagacacctggaacaagcgagagcgccaccccggaatcctacgaacagctggctccccagccctgtgtaggcgagacattacacagcagcctgcccagagacagcgagctgttcgttccggaagagggctctagcgagaaggagagcgaggacgctcctaagaccagccctcctacccctggcaaacacggcctgagacaaacaggcgaggagaaggtcatggtgaccgtgcccgacaagaaccctccctgtccttgctgtggcacaagagtcaacagcgtgctgaacctcatcgagcacctgaaggtgtcccacggcaagagaggcgtgtgcttcagatgcgccaagtgcggcaaggagaacagcaactaccacagcgtcgtgtgccacttcaagaagtgcagaggccctgagaccgagaaggctcccgctggcgaatggatttgcgaggtgtgcaacagagacttcaccaccaagatcggcctgggccagcacaagcggttagctcaccctgctgtgagaaaccaggagagaatcgtggccagccagcccaaggagacaagcaacaggggcgctcacaagagatgctggaccaaggaggaagaggagctgctcatcagactggaggctcagttcgagggcaacaagaacatcaataagcttatcgccgagcacatcaccacaaagaccgccaagcagatcagcgacaagaggagactgctgtccagaaagcccgccgaggagcctagaatggaacctggtacatgtcaccacaccagaagagccgccgctagcctgagaaccgagcccgaaatgtctcaccacgctcaggccgaggacagagacaacggccctggcaggagacctcttcccggcagagctgctgctggaggcagaaccatggacgagatcaggagacaccccgataagggcaacggccagcagagacccacaaagcagaagtccgaggaacagctccaggcctactacaagaaaaccctggaggagagactgtccgcgggagctctgaacaccttccctagagccttcaaacaagtcatggagggcagagacatcaagctggtgatcaaccagaccgcccaggactgcttcggctgccttgagtctatcagccagatcaggaccgccacacgggataagaaggacaccgtcaccagagagaagcaccccaagaagcccttccagaaatggatgaagaagagggccatcaagaagggcaattacctgagattccagaggctgttctacctggacagaggcaagctggccaagatcatcctggacgacatcgagtgcctgagctgcgacatccctctgagcgagatctacagcgtgttcaagaccagatgggagaccaccggcagcttcaagtctctgggcgacttcaagacatacggcaaggccgacaacaccgccttcagagagctcatcaccgctaaggagatcgagaagaacgtgcaggagatgagcaagggcagcgctcctggccccgatggaattacactgggcgatgtggtgaagatggaccccgagttcagcagaacaatggagatcttcaacctgtggctcaccacaggcaagatccccgacatggtgagaggctgcagaaccgtgcttatccccaagagcagcaagcccgacagactgaaggatatcaacaactggagacccatcaccatcggcagcatcctgctgcggctgttcagccggattgtgaccgctagactgagcaaagcctgtcccctgaaccccagacagagaggcttcatcagagccgctggctgcagcgagaacctgaagctgctccagacaatcatctggagcgccaagagagagcacagacccctgggcgttgttttcgtggacatcgccaaggccttcgacaccgtgtcccatcagcacattatccacgccctgcagcagagggaggtcgaccctcatattgtgggcctggtgtccaacatgtacgagaacatctccacctatattacgaccaagagaaacacccacacagacaagatccagatccgggtcggcgtcaagcagggcgatcctatgtctcctctgctgttcaacctcgccatggaccctctgctctgcaagctcgaggagtctggaaagggctaccatagaggccaatcatcgatcaccgccatggccttcgccgacgacctggtgcttttaagcgacagctgggagaacatgaacaccaacatctctatcctggagacattctgcaaccttaccggcctgaaaacccagggccagaagtgtcatggcttctacatcaaacccaccaagaagagctacaccatcaacgactgcgccgcctggacaatcaacggcacccctctcaacatgatcgaccccggcgagtctgagaagtacctgggcctgcagttcgatccctggatcggcatcgctagaagcggcttgagcaccaagctggacttttggctccaacgcatagaccaggcccccctgaagcctcttcagaaactggacattttgaaaacttatacgatccccagactcatctacatcgccgaccactccgaggtcaagagcgctctgctggaaaccctggaccagaaaatcagaaccgccgtcaaggaatggctgcacctgcccccttgcacatgcgacgctatcctgtacagcagcaccagggacggcggcttaggaatcaccaagttagccggcctcatccccagcgtgcaggctaggagactccacagaatcgcccagagcagcgacgacaccatgaagtgcttcatggagaaggaaaagatggagcagctgcacaagaagctgtggatccaagcgggcggagatcgtgagaacattcccagcatctgggaggcccctcccagctcagaacctcccaataacgtgtccaccaattctgaatgggaggctcccacccagaaggataagtttcccaagccctgcaactggcggaagaacgagttcaaaaaatggacaaagctggctagccagggcaggggcatcgtgaacttcgaaagggacaagattagcaaccactggatccagtactacagaagaatcccccacagaaagctcctcaccgccctccagttacgtgcaaacgtgtacccaaccagagaattcctggccagaggcagacaggaccagtacatcaaggcctgccggcactgcgatgccgataacgagagctgtgctcacatcatcggcaactgccccgtcacccaggacgccagaatcaagagacacaactacatctgcgagttacttctggaggaagccaagaagaaggattgggttgtgttcaaggagccccacatcagagactccaacaaggagctgtacaagccagacctcatcttcgtgaaggacggcagagccctggtggtggacgtcaccgtcagatacgaggctgctaagtccagccttgaggaggctgccgccgagaaagtgcggaagtacaagcacctggaaacagaggtcagacacctcaccaacgccaaggacgttaccttcgtgggcttccccctaggtgctagaggcaaatggcaccaggacaacttcaagctgcttaccgagctgggcctctccaagagccgacaggttaagatggccgagaccttcagcaccgtcgccctgttctcttctgtggacattgtgcacatgttcgcctccagagccagaaagagcatggtgatgtgataataggctgccttctgcggggcttgccttctggccatgcccttcttctctcccttgcacctgtacctcttggtctttgaataaagcctgagtaggaaggaccggtaaaaaaaaaaaaaaaaaaaaaaaaaaaaaaacgttgactaaaaaaaaaaaaaaaaaaaaaaaaaaaaaaaaaaaaaaaaaaaaaaaaaaaaaaaaaaaaaaaaaaaaaa

SEQ ID NO: 11081 - DNA, 5389 bp, synthetic construct
  source 1..5389: mol_type = other DNA
ggtctagttacaactgggcatcgctgcagagatcgcacctcctcgtggtcccgctggtagcccttcgaagggtgactaagtcgatctctgccccaggtacggagccgttgggactcaccagtccaacgtaactcctgcctaaattcggtgaaacaaattcctcggtaaaaagccccatggcccctaagaaaaagcggaaggtgaatatcagcggctctagctgcggcagccccaacagcgccgacaccagcagcgacttcaaggacctgtggaccaagctgaaggaatgccacgaccgggaagtgcagggactccaggtgaaggtcaccaaactcaagcaagaaagaatcctggacgcccagagactggaagaattcttcaccaagaaccagcagctgagagagcagcagaaagtgctgcacgagacaatcaaggttctggaagatagactgcgggccggcctgtgcgacagatgcgccgtgaccgaggaacacatgcgcaaaaagcagcaggagttcgagaacattagacagcaaaatctgaaattgatcacagagctgatgaacgagagaaacacactgcaggaggagaacaagaagctgagcgagcagctgcaacagaagatcgagaatgatcagcaacaccaggccgctgagctggaatgtgaagaggacgtgatccccgacagcccaatcacagctttcagcttttctggcgtgaacagactgaggcggaaggaaaacccccacgtgcggtacatcgagcagacccataccaagctggaacacagcgtgtgtgccaacgagatgagaaaggtgtccaagtcctccacccatccccagcacaaccctaacgaaaatgagatcctggtggctgatacctacgaccagtctcagagccctatggccaaggcccacggcaccagctcttatacccctgataagagctccttcaacctggccaccgtggtggccgagacactgggcctgggcgtgcaggaggaaagcgagacacagggcccaatgagccctctgggagatgagctgtaccactgcctggaaggcaaccacaagaaacagccttttgagtccggctccgagactcctggaacaagcgagagcgctacacctgagggcagccctaagagaaaggtgtccagcgccgagggcgctgccaaggaagagcctaaacggagaagcgccagactgagcgccaagccccccgccaaggtggaagccaagcctaagaaggccgccgctaaggacaagagcagcgataagaaagtccagaccaagggcaagcggggcgccaaaggcaaacaggccgaggtggccaaccaggagacaaaggaagatctgcctgctgagaacggcgaaaccaagaccgaggaatctccagcttctgacgaggccggagagaaggaggccaaaagcgacagcggctctgagacacctggaacaagcgagagcgccaccccggaatcctacgaacagctggctccccagccctgtgtaggcgagacattacacagcagcctgcccagagacagcgagctgttcgttccggaagagggctctagcgagaaggagagcgaggacgctcctaagaccagccctcctacccctggcaaacacggcctggagcaaacaggcgaggagaaggtcatggtgaccgtgcccgacaagaaccctccctgtccttgctgtggcacaagagtcaacagcgtgctgaacctcatcgagcacctgaaggtgtcccacggcaagagaggcgtgtgcttcagatgcgccaagtgcggcaaggagaacagcaactaccacagcgtcgtgtgccacttcaagaagtgcagaggccctgagaccgagaaggctcccgctggcgaatggatttgcgaggtgtgcaacagagacttcaccaccaagatcggcctgggccagcacaagcggttagctcaccctgctgtgagaaaccaggagagaatcgtggccagccagcccaaggagacaagcaacaggggcgctcacaagagatgctggaccaaggaggaagaggagctgctcatcagactggaggctcagttcgagggcaacaagaacatcaataagcttatcgccgagcacatcaccacaaagaccgccaagcagatcagcgacaagaggagactgctgtccagaaagcccgccgaggagcctagaatggaacctggtacatgtcaccacaccagaagagccgccgctagcctgagaaccgagcccgaaatgtctcaccacgctcaggccgaggacagagacaacggccctggcaggagacctcttcccggcagagctgctgctggaggcagaaccatggacgagatcaggagacaccccgataagggcaacggccagcagagacccacaaagcagaagtccgaggaacagctccaggcctactacaagaaaaccctggaggagagactgtccgcgggagctctgaacaccttccctagagccttcaaacaagtcatggagggcagagacatcaagctggtgatcaaccagaccgcccaggactgcttcggctgccttgagtctatcagccagatcaggaccgccacacgggataagaagtacaccgtcaccagagagaagcaccccaagaagcccttccagaaatggatgaagaagagggccatcaagaagggcaattacctgagattccagaggctgttctacctggacagaggcaagctggccaagatcatcctggacgacatcgagtgcctgagctgcgacatccctctgagcgagatctacagcgtgttcaagaccagatgggagaccaccggcagcttcaagtctctgggcgacttcaagacatacggcaaggccgacaacaccgccttcagagagctcatcaccgctaaggagatcgagaagaacgtgcaggagatgagcaagggcagcgctcctggccccgatggaattacactgggcgatgtggtgaagatggaccccgagttcagcagaacaatggagatcttcaacctgtggctcaccacaggcaagatccccgacatggtgagaggctgcagaaccgtgcttatccccaagagcagcaagcccgacagactgaaggatatcaacaactggagacccatcaccatcggcagcatcctgctgcggctgttcagccggattgtgaccgctagactgagcaaagcctgtcccctgaaccccagacagagaggcttcatcagagccgctggctgcagcgagaacctgaagctgctccagacaatcatctggagcgccaagagagagcacagacccctgggcgttgttttcgtggacatcgccaaggccttcgacaccgtgtcccatcagcacattatccacgccctgcagcagagggaggtcgaccctcatattgtgggcctggtgtccaacatgtacgagaacatctccacctatattacgaccaagagaaacacccacacagacaagatccagatccgggtcggcgtcaagcagggcgatcctatgtctcctctgctgttcaacctcgccatggaccctctgctctgcaagctcgaggagtctggaaagggctaccatagaggccaatcatcgatcaccgccatggccttcgccgacgacctggtgcttttaagcgacagctgggagaacatgaacaccaacatctctatcctggagacattctgcaaccttaccggcctgaaaacccagggccagaagtgtcatggcttctacatcaaacccaccaagaagagctacaccatcaacgactgcgccgcctggacaatcaacggcacccctctcaacatgatcgaccccggcgagtctgagaagtacctgggcctgcagttcgatccctggatcggcatcgctagaagcggcttgagcaccaagctggacttttggctccaacgcatagaccaggcccccctgaagcctcttcagaaactggacattttgaaaacttatacgatccccagactcatctacatcgccgaccactccgaggtcaagagcgctctgctggaaaccctggaccagaaaatcagaaccgccgtcaaggaatggctgcacctgcccccttgcacatgcgacgctatcctgtacagcagcaccagggacggcggcttaggaatcaccaagttagccggcctcatccccagcgtgcaggctaggagactccacagaatcgcccagagcagcgacgacaccatgaagtgcttcatggagaaggaaaagatggagcagctgcacaagaagctgtggatccaagcgggcggagatcgtgagaacattcccagcatctgggaggcccctcccagctcagaacctcccaataacgtgtccaccaattctgaatgggaggctcccacccagaaggataagtttcccaagccctgcaactggcggaagaacgagttcaaaaaatggacaaagctggctagccagggcaggggcatcgtgaacttcgaaagggacaagattagcaaccactggatccagtactacagaagaatcccccacagaaagctcctcaccgccctccagttacgtgcaaacgtgtacccaaccagagaattcctggccagaggcagacaggaccagtacatcaaggcctgccggcactgcgatgccgataacgagagctgtgctcacatcatcggcaactgccccgtcacccaggacgccagaatcaagagacacaactacatctgcgagttacttctggaggaagccaagaagaaggattgggttgtgttcaaggagccccacatcagagactccaacaaggagctgtacaagccagacctcatcttcgtgaaggacggcagagccctggtggtggacgtcaccgtcagatacgaggctgctaagtccagccttgaggaggctgccgccgagaaagtgcggaagtacaagcacctggaaacagaggtcagacacctcaccaacgccaaggacgttaccttcgtgggcttccccctaggtgctagaggcaaatggcaccaggacaacttcaagctgcttaccgagctgggcctctccaagagccgacaggttaagatggccgagaccttcagcaccgtcgccctgttctcttctgtggacattgtgcacatgttcgcctccagagccagaaagagcatggtgatgtgataataggctgccttctgcggggcttgccttctggccatgcccttcttctctcccttgcacctgtacctcttggtctttgaataaagcctgagtaggaaggaccggtaaaaaaaaaaaaaaaaaaaaaaaaaaaaaaacgttgactaaaaaaaaaaaaaaaaaaaaaaaaaaaaaaaaaaaaaaaaaaaaaaaaaaaaaaaaaaaaaaaaaaaaaa

SEQ ID NO: 11082 - DNA, 5389 bp, synthetic construct
  source 1..5389: mol_type = other DNA
ggtctagttacaactgggcatcgctgcagagatcgcacctcctcgtggtcccgctggtagcccttcgaagggtgactaagtcgatctctgccccaggtacggagccgttgggactcaccagtccaacgtaactcctgcctaaattcggtgaaacaaattcctcggtaaaaagccccatggcccctaagaaaaagcggaaggtgaatatcagcggctctagctgcggcagccccaacagcgccgacaccagcagcgacttcaaggacctgtggaccaagctgaaggaatgccacgaccgggaagtgcagggactccaggtgaaggtcaccaaactcaagcaagaaagaatcctggacgcccagagactggaagaattcttcaccaagaaccagcagctgagagagcagcagaaagtgctgcacgagacaatcaaggttctggaagatagactgcgggccggcctgtgcgacagatgcgccgtgaccgaggaacacatgcgcaaaaagcagcaggagttcgagaacattagacagcaaaatctgaaattgatcacagagctgatgaacgagagaaacacactgcaggaggagaacaagaagctgagcgagcagctgcaacagaagatcgagaatgatcagcaacaccaggccgctgagctggaatgtgaagaggacgtgatccccgacagcccaatcacagctttcagcttttctggcgtgaacagactgaggcggaaggaaaacccccacgtgcggtacatcgagcagacccataccaagctggaacacagcgtgtgtgccaacgagatgagaaaggtgtccaagtcctccacccatccccagcacaaccctaacgaaaatgagatcctggtggctgatacctacgaccagtctcagagccctatggccaaggcccacggcaccagctcttatacccctgataagagctccttcaacctggccaccgtggtggccgagacactgggcctgggcgtgcaggaggaaagcgagacacagggcccaatgagccctctgggagatgagctgtaccactgcctggaaggcaaccacaagaaacagccttttgagtccggctccgagactcctggaacaagcgagagcgctacacctgagggcagccctaagagaaaggtgtccagcgccgagggcgctgccaaggaagagcctaaacggagaagcgccagactgagcgccaagccccccgccaaggtggaagccaagcctaagaaggccgccgctaaggacaagagcagcgataagaaagtccagaccaagggcaagcggggcgccaaaggcaaacaggccgaggtggccaaccaggagacaaaggaagatctgcctgctgagaacggcgaaaccaagaccgaggaatctccagcttctgacgaggccggagagaaggaggccaaaagcgacagcggctctgagacacctggaacaagcgagagcgccaccccggaatcctacgaacagctggctccccagccctgtgtaggcgagacattacacagcagcctgcccagagacagcgagctgttcgttccggaagagggctctagcgagaaggagagcgaggacgctcctaagaccagccctcctacccctggcaaacacggcctggagcaaacaggcgaggagaaggtcatggtgaccgtgcccgacaagaaccctccctgtccttgctgtggcacaagagtcaacagcgtgctgaacctcatcgagcacctgaaggtgtcccacggcaagagaggcgtgtgcttcagatgcgccaagtgcggcaaggagaacagcaactaccacagcgtcgtgtgccacttcaagaagtgcagaggccctgagaccgagaaggctcccgctggcgaatggatttgcgaggtgtgcaacagagacttcaccaccaagatcggcctgggccagcacaagcggttagctcaccctgctgtgagaaaccaggagagaatcgtggccagccagcccaaggagacaagcaacaggggcgctcacaagagatgctggaccaaggaggaagaggagctgctcatcagactggaggctcagttcgagggcaacaagaacatcaataagcttatcgccgagcacatcaccacaaagaccgccaagcagatcagcgacaagaggagactgctgtccagaaagcccgccgaggagcctagaatggaacctggtacatgtcaccacaccagaagagccgccgctagcctgagaaccgagcccgaaatgtctcaccacgctcaggccgaggacagagacaacggccctggcaggagacctcttcccggcagagctgctgctggaggcagaaccatggacgagatcaggagacaccccgataagggcaacggccagcagagacccacaaagcagaagtccgaggaacagctccaggcctactacaagaaaaccctggaggagagactgtccgcgggagctctgaacaccttccctagagccttcaaacaagtcatggagggcagagacatcaagctggtgatcaaccagaccgcccaggactgcttcggctgccttgagtctatcagccagatcaggaccgccacacgggataagaaggacaccgtcaccagagagaagcaccccaagaagcccttccagaaatggatgaagaagagggccatcaagaagggcaattacctgagattccagaggctgttctacctggacagaggcaagctggccaagatcatcctggacgacatcgagtgcctgagctgcgacatccctctgagcgagatctacagcgtgttcaagaccagatgggagaccaccggcagcttcaagtctctgggcgacttcaagacatacggcaaggccgacaacaccgccttcagagagctcatcaccgctaaggagatcgagaagaacgtgcaggagatgagcaagggcagcgctcctggccccgatggaattacactgggcgatgtggtgaagatggaccccgagttcagcagaacaatggagatcttcaacctgtggctcaccacaggcaagatccccgacatggtgagaggctgcagaaccgtgcttatccccaagagcagcaagcccgacagactgaaggatatcaacaactggagacccatcaccatcggcagcatcctgctgcggctgttcagccggattgtgaccgctagactgagcaaagcctgtcccctgaaccccagacagagaggcttcatcagagccgctggctgcagcgagaacctgaagctgctccagacaatcatctggagcgccaagagagagcacagacccctgggcgttgttttcgtggacatcgccaaggccttcgacaccgtgtcccatcagcacattatccacgccctgcagcagagggaggtcgaccctcatattgtgggcctggtgtccaacatgtacgagaacatctccacctatattacgaccaagagaaacacccacacagacaagatccagatccgggtcggcgtcaagcagggcgatcctatgtctcctctgctgttcaacctcgccatggaccctctgctctgcaagctcgaggagtctggaaagggctaccatagaggccaatcatcgatcaccgccatggccttcgccgacgacctggtgcttttaagcgacagctgggagaacatgaacaccaacatcaaaatcctggagacattctgcaaccttaccggcctgaaaacccagggccagaagtgtcatggcttctacatcaaacccaccaagaagagctacaccatcaacgactgcgccgcctggacaatcaacggcacccctctcaacatgatcgaccccggcgagtctgagaagtacctgggcctgcagttcgatccctggatcggcatcgctagaagcggcttgagcaccaagctggacttttggctccaacgcatagaccaggcccccctgaagcctcttcagaaactggacattttgaaaacttatacgatccccagactcatctacatcgccgaccactccgaggtcaagagcgctctgctggaaaccctggaccagaaaatcagaaccgccgtcaaggaatggctgcacctgcccccttgcacatgcgacgctatcctgtacagcagcaccagggacggcggcttaggaatcaccaagttagccggcctcatccccagcgtgcaggctaggagactccacagaatcgcccagagcagcgacgacaccatgaagtgcttcatggagaaggaaaagatggagcagctgcacaagaagctgtggatccaagcgggcggagatcgtgagaacattcccagcatctgggaggcccctcccagctcagaacctcccaataacgtgtccaccaattctgaatgggaggctcccacccagaaggataagtttcccaagccctgcaactggcggaagaacgagttcaaaaaatggacaaagctggctagccagggcaggggcatcgtgaacttcgaaagggacaagattagcaaccactggatccagtactacagaagaatcccccacagaaagctcctcaccgccctccagttacgtgcaaacgtgtacccaaccagagaattcctggccagaggcagacaggaccagtacatcaaggcctgccggcactgcgatgccgataacgagagctgtgctcacatcatcggcaactgccccgtcacccaggacgccagaatcaagagacacaactacatctgcgagttacttctggaggaagccaagaagaaggattgggttgtgttcaaggagccccacatcagagactccaacaaggagctgtacaagccagacctcatcttcgtgaaggacggcagagccctggtggtggacgtcaccgtcagatacgaggctgctaagtccagccttgaggaggctgccgccgagaaagtgcggaagtacaagcacctggaaacagaggtcagacacctcaccaacgccaaggacgttaccttcgtgggcttccccctaggtgctagaggcaaatggcaccaggacaacttcaagctgcttaccgagctgggcctctccaagagccgacaggttaagatggccgagaccttcagcaccgtcgccctgttctcttctgtggacattgtgcacatgttcgcctccagagccagaaagagcatggtgatgtgataataggctgccttctgcggggcttgccttctggccatgcccttcttctctcccttgcacctgtacctcttggtctttgaataaagcctgagtaggaaggaccggtaaaaaaaaaaaaaaaaaaaaaaaaaaaaaaacgttgactaaaaaaaaaaaaaaaaaaaaaaaaaaaaaaaaaaaaaaaaaaaaaaaaaaaaaaaaaaaaaaaaaaaaaa

SEQ ID NO: 11083 - DNA, 5389 bp, synthetic construct
  source 1..5389: mol_type = other DNA
ggtctagttacaactgggcatcgctgcagagatcgcacctcctcgtggtcccgctggtagcccttcgaagggtgactaagtcgatctctgccccaggtacggagccgttgggactcaccagtccaacgtaactcctgcctaaattcggtgaaacaaattcctcggtaaaaagccccatggcccctaagaaaaagcggaaggtgaatatcagcggctctagctgcggcagccccaacagcgccgacaccagcagcgacttcaaggacctgtggaccaagctgaaggaatgccacgaccgggaagtgcagggactccaggtgaaggtcaccaaactcaagcaagaaagaatcctggacgcccagagactggaagaattcttcaccaagaaccagcagctgagagagcagcagaaagtgctgcacgagacaatcaaggttctggaagatagactgcgggccggcctgtgcgacagatgcgccgtgaccgaggaacacatgcgcaaaaagcagcaggagttcgagaacattagacagcaaaatctgaaattgatcacagagctgatgaacgagagaaacacactgcaggaggagaacaagaagctgagcgagcagctgcaacagaagatcgagaatgatcagcaacaccaggccgctgagctggaatgtgaagaggacgtgatccccgacagcccaatcacagctttcagcttttctggcgtgaacagactgaggcggaaggaaaacccccacgtgcggtacatcgagcagacccataccaagctggaacacagcgtgtgtgccaacgagatgagaaaggtgtccaagtcctccacccatccccagcacaaccctaacgaaaatgagatcctggtggctgatacctacgaccagtctcagagccctatggccaaggcccacggcaccagctcttatacccctgataagagctccttcaacctggccaccgtggtggccgagacactgggcctgggcgtgcaggaggaaagcgagacacagggcccaatgagccctctgggagatgagctgtaccactgcctggaaggcaaccacaagaaacagccttttgagtccggctccgagactcctggaacaagcgagagcgctacacctgagggcagccctaagagaaaggtgtccagcgccgagggcgctgccaaggaagagcctaaacggagaagcgccagactgagcgccaagccccccgccaaggtggaagccaagcctaagaaggccgccgctaaggacaagagcagcgataagaaagtccagaccaagggcaagcggggcgccaaaggcaaacaggccgaggtggccaaccaggagacaaaggaagatctgcctgctgagaacggcgaaaccaagaccgaggaatctccagcttctgacgaggccggagagaaggaggccaaaagcgacagcggctctgagacacctggaacaagcgagagcgccaccccggaatcctacgaacagctggctccccagccctgtgtaggcgagacattacacagcagcctgcccagagacagcgagctgttcgttccggaagagggctctagcgagaaggagagcgaggacgctcctaagaccagccctcctacccctggcaaacacggcctggagcaaacaggcgaggagaaggtcatggtgaccgtgcccgacaagaaccctccctgtccttgctgtggcacaagagtcaacagcgtgctgaacctcatcgagcacctgaaggtgtcccacggcaagagaggcgtgtgcttcagatgcgccaagtgcggcaaggagaacagcaactaccacagcgtcgtgtgccacttcaagaagtgcagaggccctgagaccgagaaggctcccgctggcgaatggatttgcgaggtgtgcaacagagacttcaccaccaagatcggcctgggccagcacaagcggttagctcaccctgctgtgagaaaccaggagagaatcgtggccagccagcccaaggagacaagcaacaggggcgctcacaagagatgctggaccaaggaggaagaggagctgctcatcagactggaggctcagttcgagggcaacaagaacatcaataagcttatcgccgagcacatcaccacaaagaccgccaagcagatcagcgacaagaggagactgctgtccagaaagcccgccgaggagcctagaatggaacctggtacatgtcaccacaccagaagagccgccgctagcctgagaaccgagcccgaaatgtctcaccacgctcaggccgaggacagagacaacggccctggcaggagacctcttcccggcagagctgctgctggaggcagaaccatggacgagatcaggagacaccccgataagggcaacggccagcagagacccacaaagcagaagtccgaggaacagctccaggcctactacaagaaaaccctggaggagagactgtccgcgggagctctgaacaccttccctagagccttcaaacaagtcatggagggcagagacatcaagctggtgatcaaccagaccgcccaggactgcttcggctgccttgagtctatcagccagatcaggaccgccacacgggataagaaggacaccgtcaccagagagaagcaccccaagaagcccttccagaaatggatgaagaagagggccatcaagaagggcaattacctgagattccagaggctgttctacctggacagaggcaagctggccaagatcatcctggacgacatcgagtgcctgagctgcgacatccctctgagcgagatctacagcgtgttcaagaccagatgggagaccaccggcagcttcaagtctctgggcgacttcaagacatacggcaaggccgacaacaccgccttcagagagctcatcaccgctaaggagatcgagaagaacgtgcaggagatgagcaagggcagcgctcctggccccgatggaattacactgggcgatgtggtgaagatggaccccgagttcagcagaacaatggagatcttcaacctgtggctcaccacaggcaagatccccgacatggtgagaggctgcagaaccgtgcttatccccaagagcagcaagcccgacagactgaaggatatcaacaactggagacccatcaccatcggcagcatcctgctgcggctgttcagccggattgtgaccgctagactgagcaaagcctgtcccctgaaccccagacagagaggcttcatcagagccgctggctgcagcgagaacctgaagctgctccagacaatcatctggagcgccaagagagagcacagacccctgggcgttgttttcgtggacatcgccaaggccttcgacaccgtgtcccatcagcacattatccacgccctgcagcagagggaggtcgaccctcatattgtgggcctggtgtccaacatgtacgagaacatctccacctatattacgaccaagagaaacacccacacagacaagatccagatccgggtcggcgtcaagcagggcgatcctatgtctcctctgctgttcaacctcgccatggaccctctgctctgcaagctcgaggagtctggaaagggctaccatagaggccaatcatcgatcaccgccatggccttcgccgacgacctggtgcttttaagcgacagctgggagaacatgaacaccaacatctctatcctggagacattctgcaaccttaccggcctgaaaacccagggccagaagtgtcatggcttctacatcaaacccaccaagaagagctacaccatcaacgactgcgccgcctggacaatcaacggcacccctctcaacatgatcgaccccggcgagtctgagaagtacctgggcctgcagttcgatccctggatcggcatcgctagaagcggcttgagcaccaagctggacttttggctccaacgcatagaccaggcccccctgaagcctcttcagaaactggacattttgaaaacttatacgatccccagactcatctacatcgccgaccactccgaggtcaagagcgctagactggaaaccctggaccagaaaatcagaaccgccgtcaaggaatggctgcacctgcccccttgcacatgcgacgctatcctgtacagcagcaccagggacggcggcttaggaatcaccaagttagccggcctcatccccagcgtgcaggctaggagactccacagaatcgcccagagcagcgacgacaccatgaagtgcttcatggagaaggaaaagatggagcagctgcacaagaagctgtggatccaagcgggcggagatcgtgagaacattcccagcatctgggaggcccctcccagctcagaacctcccaataacgtgtccaccaattctgaatgggaggctcccacccagaaggataagtttcccaagccctgcaactggcggaagaacgagttcaaaaaatggacaaagctggctagccagggcaggggcatcgtgaacttcgaaagggacaagattagcaaccactggatccagtactacagaagaatcccccacagaaagctcctcaccgccctccagttacgtgcaaacgtgtacccaaccagagaattcctggccagaggcagacaggaccagtacatcaaggcctgccggcactgcgatgccgataacgagagctgtgctcacatcatcggcaactgccccgtcacccaggacgccagaatcaagagacacaactacatctgcgagttacttctggaggaagccaagaagaaggattgggttgtgttcaaggagccccacatcagagactccaacaaggagctgtacaagccagacctcatcttcgtgaaggacggcagagccctggtggtggacgtcaccgtcagatacgaggctgctaagtccagccttgaggaggctgccgccgagaaagtgcggaagtacaagcacctggaaacagaggtcagacacctcaccaacgccaaggacgttaccttcgtgggcttccccctaggtgctagaggcaaatggcaccaggacaacttcaagctgcttaccgagctgggcctctccaagagccgacaggttaagatggccgagaccttcagcaccgtcgccctgttctcttctgtggacattgtgcacatgttcgcctccagagccagaaagagcatggtgatgtgataataggctgccttctgcggggcttgccttctggccatgcccttcttctctcccttgcacctgtacctcttggtctttgaataaagcctgagtaggaaggaccggtaaaaaaaaaaaaaaaaaaaaaaaaaaaaaaacgttgactaaaaaaaaaaaaaaaaaaaaaaaaaaaaaaaaaaaaaaaaaaaaaaaaaaaaaaaaaaaaaaaaaaaaaa

SEQ ID NO: 11084 - DNA, 5389 bp, synthetic construct
  source 1..5389: mol_type = other DNA
ggtctagttacaactgggcatcgctgcagagatcgcacctcctcgtggtcccgctggtagcccttcgaagggtgactaagtcgatctctgccccaggtacggagccgttgggactcaccagtccaacgtaactcctgcctaaattcggtgaaacaaattcctcggtaaaaagccccatggcccctaagaaaaagcggaaggtgaatatcagcggctctagctgcggcagccccaacagcgccgacaccagcagcgacttcaaggacctgtggaccaagctgaaggaatgccacgaccgggaagtgcagggactccaggtgaaggtcaccaaactcaagcaagaaagaatcctggacgcccagagactggaagaattcttcaccaagaaccagcagctgagagagcagcagaaagtgctgcacgagacaatcaaggttctggaagatagactgcgggccggcctgtgcgacagatgcgccgtgaccgaggaacacatgcgcaaaaagcagcaggagttcgagaacattagacagcaaaatctgaaattgatcacagagctgatgaacgagagaaacacactgcaggaggagaacaagaagctgagcgagcagctgcaacagaagatcgagaatgatcagcaacaccaggccgctgagctggaatgtgaagaggacgtgatccccgacagcccaatcacagctttcagcttttctggcgtgaacagactgaggcggaaggaaaacccccacgtgcggtacatcgagcagacccataccaagctggaacacagcgtgtgtgccaacgagatgagaaaggtgtccaagtcctccacccatccccagcacaaccctaacgaaaatgagatcctggtggctgatacctacgaccagtctcagagccctatggccaaggcccacggcaccagctcttatacccctgataagagctccttcaacctggccaccgtggtggccgagacactgggcctgggcgtgcaggaggaaagcgagacacagggcccaatgagccctctgggagatgagctgtaccactgcctggaaggcaaccacaagaaacagccttttgagtccggctccgagactcctggaacaagcgagagcgctacacctgagggcagccctaagagaaaggtgtccagcgccgagggcgctgccaaggaagagcctaaacggagaagcgccagactgagcgccaagccccccgccaaggtggaagccaagcctaagaaggccgccgctaaggacaagagcagcgataagaaagtccagaccaagggcaagcggggcgccaaaggcaaacaggccgaggtggccaaccaggagacaaaggaagatctgcctgctgagaacggcgaaaccaagaccgaggaatctccagcttctgacgaggccggagagaaggaggccaaaagcgacagcggctctgagacacctggaacaagcgagagcgccaccccggaatcctacgaacagctggctccccagccctgtgtaggcgagacattacacagcagcctgcccagagacagcgagctgttcgttccggaagagggctctagcgagaaggagagcgaggacgctcctaagaccagccctcctacccctggcaaacacggcctgagacaaacaggcgaggagaaggtcatggtgaccgtgcccgacaagaaccctccctgtccttgctgtggcacaagagtcaacagcgtgctgaacctcatcgagcacctgaaggtgtcccacggcaagagaggcgtgtgcttcagatgcgccaagtgcggcaaggagaacagcaactaccacagcgtcgtgtgccacttcaagaagtgcagaggccctgagaccgagaaggctcccgctggcgaatggatttgcgaggtgtgcaacagagacttcaccaccaagatcggcctgggccagcacaagcggttagctcaccctgctgtgagaaaccaggagagaatcgtggccagccagcccaaggagacaagcaacaggggcgctcacaagagatgctggaccaaggaggaagaggagctgctcatcagactggaggctcagttcgagggcaacaagaacatcaataagcttatcgccgagcacatcaccacaaagaccgccaagcagatcagcgacaagaggagactgctgtccagaaagcccgccgaggagcctagaatggaacctggtacatgtcaccacaccagaagagccgccgctagcctgagaaccgagcccgaaatgtctcaccacgctcaggccgaggacagagacaacggccctggcaggagacctcttcccggcagagctgctgctggaggcagaaccatggacgagatcaggagacaccccgataagggcaacggccagcagagacccacaaagcagaagtccgaggaacagctccaggcctactacaagaaaaccctggaggagagactgtccgcgggagctctgaacaccttccctagagccttcaaacaagtcatggagggcagagacatcaagctggtgatcaaccagaccgcccaggactgcttcggctgccttgagtctatcagccagatcaggaccgccacacgggataagaaggacaccgtcaccagagagaagcaccccaagaagcccttccagaaatggatgaagaagagggccatcaagaagggcaattacctgagattccagaggctgttctacctggacagaggcaagctggccaagatcatcctggacgacatcgagtgcctgagctgcgacatccctctgagcgagatctacagcgtgttcaagaccagatgggagaccaccggcagcttcaagtctctgggcgacttcaagacatacggcaaggccgacaacaccgccttcagagagctcatcaccgctaaggagatcgagaagaacgtgcaggagatgagcaagggcagcgctcctggccccgatggaattacactgggcgatgtggtgaagatggaccccgagttcagcagaacaatggagatcttcaacctgtggctcaccacaggcaagatccccgacatggtgagaggctgcagaaccgtgcttatccccaagagcagcgaccccgacagactgaaggatatcaacaactggagacccatcaccatcggcagcatcctgctgcggctgttcagccggattgtgaccgctagactgagcaaagcctgtcccctgaaccccagacagagaggcttcatcagagccgctggctgcagcgagaacctgaagctgctccagacaatcatctggagcgccaagagagagcacagacccctgggcgttgttttcgtggacatcgccaaggccttcgacaccgtgtcccatcagcacattatccacgccctgcagcagagggaggtcgaccctcatattgtgggcctggtgtccaacatgtacgagaacatctccacctatattacgaccaagagaaacacccacacagacaagatccagatccgggtcggcgtcaagcagggcgatcctatgtctcctctgctgttcaacctcgccatggaccctctgctctgcaagctcgaggagtctggaaagggctaccatagaggccaatcatcgatcaccgccatggccttcgccgacgacctggtgcttttaagcgacagctgggagaacatgaacaccaacatctctatcctggagacattctgcaaccttaccggcctgaaaacccagggccagaagtgtcatggcttctacatcaaacccaccaagaagagctacaccatcaacgactgcgccgcctggacaatcaacggcacccctctcaacatgatcgaccccggcgagtctgagaagtacctgggcctgcagttcgatccctggatcggcatcgctagaagcggcttgagcaccaagctggacttttggctccaacgcatagaccaggcccccctgaagcctcttcagaaactggacattttgaaaacttatacgatccccagactcatctacatcgccgaccactccgaggtcaagagcgctctgctggaaaccctggaccagaaaatcagaaccgccgtcaaggaatggctgcacctgcccccttgcacatgcgacgctatcctgtacagcagcaccagggacggcggcttaggaatcaccaagttagccggcctcatccccagcgtgcaggctaggagactccacagaatcgcccagagcagcgacgacaccatgaagtgcttcatggagaaggaaaagatggagcagctgcacaagaagctgtggatccaagcgggcggagatcgtgagaacattcccagcatctgggaggcccctcccagctcagaacctcccaataacgtgtccaccaattctgaatgggaggctcccacccagaaggataagtttcccaagccctgcaactggcggaagaacgagttcaaaaaatggacaaagctggctagccagggcaggggcatcgtgaacttcgaaagggacaagattagcaaccactggatccagtactacagaagaatcccccacagaaagctcctcaccgccctccagttacgtgcaaacgtgtacccaaccagagaattcctggccagaggcagacaggaccagtacatcaaggcctgccggcactgcgatgccgataacgagagctgtgctcacatcatcggcaactgccccgtcacccaggacgccagaatcaagagacacaactacatctgcgagttacttctggaggaagccaagaagaaggattgggttgtgttcaaggagccccacatcagagactccaacaaggagctgtacaagccagacctcatcttcgtgaaggacggcagagccctggtggtggacgtcaccgtcagatacgaggctgctaagtccagccttgaggaggctgccgccgagaaagtgcggaagtacaagcacctggaaacagaggtcagacacctcaccaacgccaaggacgttaccttcgtgggcttccccctaggtgctagaggcaaatggcaccaggacaacttcaagctgcttaccgagctgggcctctccaagagccgacaggttaagatggccgagaccttcagcaccgtcgccctgttctcttctgtggacattgtgcacatgttcgcctccagagccagaaagagcatggtgatgtgataataggctgccttctgcggggcttgccttctggccatgcccttcttctctcccttgcacctgtacctcttggtctttgaataaagcctgagtaggaaggaccggtaaaaaaaaaaaaaaaaaaaaaaaaaaaaaaacgttgactaaaaaaaaaaaaaaaaaaaaaaaaaaaaaaaaaaaaaaaaaaaaaaaaaaaaaaaaaaaaaaaaaaaaaa

SEQ ID NO: 11085 - DNA, 5389 bp, synthetic construct
  source 1..5389: mol_type = other DNA
ggtctagttacaactgggcatcgctgcagagatcgcacctcctcgtggtcccgctggtagcccttcgaagggtgactaagtcgatctctgccccaggtacggagccgttgggactcaccagtccaacgtaactcctgcctaaattcggtgaaacaaattcctcggtaaaaagccccatggcccctaagaaaaagcggaaggtgaatatcagcggctctagctgcggcagccccaacagcgccgacaccagcagcgacttcaaggacctgtggaccaagctgaaggaatgccacgaccgggaagtgcagggactccaggtgaaggtcaccaaactcaagcaagaaagaatcctggacgcccagagactggaagaattcttcaccaagaaccagcagctgagagagcagcagaaagtgctgcacgagacaatcaaggttctggaagatagactgcgggccggcctgtgcgacagatgcgccgtgaccgaggaacacatgcgcaaaaagcagcaggagttcgagaacattagacagcaaaatctgaaattgatcacagagctgatgaacgagagaaacacactgcaggaggagaacaagaagctgagcgagcagctgcaacagaagatcgagaatgatcagcaacaccaggccgctgagctggaatgtgaagaggacgtgatccccgacagcccaatcacagctttcagcttttctggcgtgaacagactgaggcggaaggaaaacccccacgtgcggtacatcgagcagacccataccaagctggaacacagcgtgtgtgccaacgagatgagaaaggtgtccaagtcctccacccatccccagcacaaccctaacgaaaatgagatcctggtggctgatacctacgaccagtctcagagccctatggccaaggcccacggcaccagctcttatacccctgataagagctccttcaacctggccaccgtggtggccgagacactgggcctgggcgtgcaggaggaaagcgagacacagggcccaatgagccctctgggagatgagctgtaccactgcctggaaggcaaccacaagaaacagccttttgagtccggctccgagactcctggaacaagcgagagcgctacacctgagggcagccctaagagaaaggtgtccagcgccgagggcgctgccaaggaagagcctaaacggagaagcgccagactgagcgccaagccccccgccaaggtggaagccaagcctaagaaggccgccgctaaggacaagagcagcgataagaaagtccagaccaagggcaagcggggcgccaaaggcaaacaggccgaggtggccaaccaggagacaaaggaagatctgcctgctgagaacggcgaaaccaagaccgaggaatctccagcttctgacgaggccggagagaaggaggccaaaagcgacagcggctctgagacacctggaacaagcgagagcgccaccccggaatcctacgaacagctggctccccagccctgtgtaggcgagacattacacagcagcctgcccagagacagcgagctgttcgttccggaagagggctctagcgagaaggagagcgaggacgctcctaagaccagccctcctacccctggcaaacacggcctgagacaaacaggcgaggagaaggtcatggtgaccgtgcccgacaagaaccctccctgtccttgctgtggcacaagagtcaacagcgtgctgaacctcatcgagcacctgaaggtgtcccacggcaagagaggcgtgtgcttcagatgcgccaagtgcggcaaggagagaagcaactaccacagcgtcgtgtgccacttcaagaagtgcagaggccctgagaccgagaaggctcccgctggcgaatggatttgcgaggtgtgcaacagagacttcaccaccaagatcggcctgggccagcacaagcggttagctcaccctgctgtgagaaaccaggagagaatcgtggccagccagcccaaggagacaagcaacaggggcgctcacaagagatgctggaccaaggaggaagaggagctgctcatcagactggaggctcagttcgagggcaacaagaacatcaataagcttatcgccgagcacatcaccacaaagaccgccaagcagatcagcgacaagaggagactgctgtccagaaagcccgccgaggagcctagaatggaacctggtacatgtcaccacaccagaagagccgccgctagcctgagaaccgagcccgaaatgtctcaccacgctcaggccgaggacagagacaacggccctggcaggagacctcttcccggcagagctgctgctggaggcagaaccatggacgagatcaggagacaccccgataagggcaacggccagcagagacccacaaagcagaagtccgaggaacagctccaggcctactacaagaaaaccctggaggagagactgtccgcgggagctctgaacaccttccctagagccttcaaacaagtcatggagggcagagacatcaagctggtgatcaaccagaccgcccaggactgcttcggctgccttgagtctatcagccagatcaggaccgccacacgggataagaaggacaccgtcaccagagagaagcaccccaagaagcccttccagaaatggatgaagaagagggccatcaagaagggcaattacctgagattccagaggctgttctacctggacagaggcaagctggccaagatcatcctggacgacatcgagtgcctgagctgcgacatccctctgagcgagatctacagcgtgttcaagaccagatgggagaccaccggcagcttcaagtctctgggcgacttcaagacatacggcaaggccgacaacaccgccttcagagagctcatcaccgctaaggagatcgagaagaacgtgcaggagatgagcaagggcagcgctcctggccccgatggaattacactgggcgatgtggtgaagatggaccccgagttcagcagaacaatggagatcttcaacctgtggctcaccacaggcaagatccccgacatggtgagaggctgcagaaccgtgcttatccccaagagcagcgaccccgacagactgaaggatatcaacaactggagacccatcaccatcggcagcatcctgctgcggctgttcagccggattgtgaccgctagactgagcaaagcctgtcccctgaaccccagacagagaggcttcatcagagccgctggctgcagcgagaacctgaagctgctccagacaatcatctggagcgccaagagagagcacagacccctgggcgttgttttcgtggacatcgccaaggccttcgacaccgtgtcccatcagcacattatccacgccctgcagcagagggaggtcgaccctcatattgtgggcctggtgtccaacatgtacgagaacatctccacctatattacgaccaagagaaacacccacacagacaagatccagatccgggtcggcgtcaagcagggcgatcctatgtctcctctgctgttcaacctcgccatggaccctctgctctgcaagctcgaggagtctggaaagggctaccatagaggccaatcatcgatcaccgccatggccttcgccgacgacctggtgcttttaagcgacagctgggagaacatgaacaccaacatctctatcctggagacattctgcaaccttaccggcctgaaaacccagggccagaagtgtcatggcttctacatcaaacccaccaagaagagctacaccatcaacgactgcgccgcctggacaatcaacggcacccctctcaacatgatcgaccccggcgagtctgagaagtacctgggcctgcagttcgatccctggatcggcatcgctagaagcggcttgagcaccaagctggacttttggctccaacgcatagaccaggcccccctgaagcctcttcagaaactggacattttgaaaacttatacgatccccagactcatctacatcgccgaccactccgaggtcaagagcgctctgctggaaaccctggaccagaaaatcagaaccgccgtcaaggaatggctgcacctgcccccttgcacatgcgacgctatcctgtacagcagcaccagggacggcggcttaggaatcaccaagttagccggcctcatccccagcgtgcaggctaggagactccacagaatcgcccagagcagcgacgacaccatgaagtgcttcatggagaaggaaaagatggagcagctgcacaagaagctgtggatccaagcgggcggagatcgtgagaacattcccagcatctgggaggcccctcccagctcagaacctcccaataacgtgtccaccaattctgaatgggaggctcccacccagaaggataagtttcccaagccctgcaactggcggaagaacgagttcaaaaaatggacaaagctggctagccagggcaggggcatcgtgaacttcgaaagggacaagattagcaaccactggatccagtactacagaagaatcccccacagaaagctcctcaccgccctccagttacgtgcaaacgtgtacccaaccagagaattcctggccagaggcagacaggaccagtacatcaaggcctgccggcactgcgatgccgataacgagagctgtgctcacatcatcggcaactgccccgtcacccaggacgccagaatcaagagacacaactacatctgcgagttacttctggaggaagccaagaagaaggattgggttgtgttcaaggagccccacatcagagactccaacaaggagctgtacaagccagacctcatcttcgtgaaggacggcagagccctggtggtggacgtcaccgtcagatacgaggctgctaagtccagccttgaggaggctgccgccgagaaagtgcggaagtacaagcacctggaaacagaggtcagacacctcaccaacgccaaggacgttaccttcgtgggcttccccctaggtgctagaggcaaatggcaccaggacaacttcaagctgcttaccgagctgggcctctccaagagccgacaggttaagatggccgagaccttcagcaccgtcgccctgttctcttctgtggacattgtgcacatgttcgcctccagagccagaaagagcatggtgatgtgataataggctgccttctgcggggcttgccttctggccatgcccttcttctctcccttgcacctgtacctcttggtctttgaataaagcctgagtaggaaggaccggtaaaaaaaaaaaaaaaaaaaaaaaaaaaaaaacgttgactaaaaaaaaaaaaaaaaaaaaaaaaaaaaaaaaaaaaaaaaaaaaaaaaaaaaaaaaaaaaaaaaaaaaaa

SEQ ID NO: 11086 - DNA, 5389 bp, synthetic construct
  source 1..5389: mol_type = other DNA
ggtctagttacaactgggcatcgctgcagagatcgcacctcctcgtggtcccgctggtagcccttcgaagggtgactaagtcgatctctgccccaggtacggagccgttgggactcaccagtccaacgtaactcctgcctaaattcggtgaaacaaattcctcggtaaaaagccccatggcccctaagaaaaagcggaaggtgaatatcagcggctctagctgcggcagccccaacagcgccgacaccagcagcgacttcaaggacctgtggaccaagctgaaggaatgccacgaccgggaagtgcagggactccaggtgaaggtcaccaaactcaagcaagaaagaatcctggacgcccagagactggaagaattcttcaccaagaaccagcagctgagagagcagcagaaagtgctgcacgagacaatcaaggttctggaagatagactgcgggccggcctgtgcgacagatgcgccgtgaccgaggaacacatgcgcaaaaagcagcaggagttcgagaacattagacagcaaaatctgaaattgatcacagagctgatgaacgagagaaacacactgcaggaggagaacaagaagctgagcgagcagctgcaacagaagatcgagaatgatcagcaacaccaggccgctgagctggaatgtgaagaggacgtgatccccgacagcccaatcacagctttcagcttttctggcgtgaacagactgaggcggaaggaaaacccccacgtgcggtacatcgagcagacccataccaagctggaacacagcgtgtgtgccaacgagatgagaaaggtgtccaagtcctccacccatccccagcacaaccctaacgaaaatgagatcctggtggctgatacctacgaccagtctcagagccctatggccaaggcccacggcaccagctcttatacccctgataagagctccttcaacctggccaccgtggtggccgagacactgggcctgggcgtgcaggaggaaagcgagacacagggcccaatgagccctctgggagatgagctgtaccactgcctggaaggcaaccacaagaaacagccttttgagtccggctccgagactcctggaacaagcgagagcgctacacctgagggcagccctaagagaaaggtgtccagcgccgagggcgctgccaaggaagagcctaaacggagaagcgccagactgagcgccaagccccccgccaaggtggaagccaagcctaagaaggccgccgctaaggacaagagcagcgataagaaagtccagaccaagggcaagcggggcgccaaaggcaaacaggccgaggtggccaaccaggagacaaaggaagatctgcctgctgagaacggcgaaaccaagaccgaggaatctccagcttctgacgaggccggagagaaggaggccaaaagcgacagcggctctgagacacctggaacaagcgagagcgccaccccggaatcctacgaacagctggctccccagccctgtgtaggcgagacattacacagcagcctgcccagagacagcgagctgttcgttccggaagagggctctagcgagaaggagagcgaggacgctcctaagaccagccctcctacccctggcaaacacggcctggagcaaacaggcgaggagaaggtcatggtgaccgtgcccgacaagaaccctccctgtccttgctgtggcacaagagtcaacagcgtgctgaacctcatcgagcacctgaaggtgtcccacggcaagagaggcgtgtgcttcagatgcgccaagtgcggcaaggagaacagcaactaccacagcgtcgtgtgccacttcaagaagtgcagaggccctgagaccgagaaggctcccgctggcgaatggatttgcgaggtgtgcaacagagacttcaccaccaagatcggcctgggccagcacaagcggttagctcaccctgctgtgagaaaccaggagagaatcgtggccagccagcccaaggagacaagcaacaggggcgctcacaagagatgctggaccaaggaggaagaggagctgctcatcagactggaggctcagttcgagggcaacaagaacatcaataagcttatcgccgagcacatcaccacaaagaccgccaagcagatcagcgacaagaggagactgctgtccagaaagcccgccgaggagcctagaatggaacctggtacatgtcaccacaccagaagagccgccgctagcctgagaaccgagcccgaaatgtctcaccacgctcaggccgaggacagagacaacggccctggcaggagacctcttcccggcagagctgctgctggaggcagaaccatggacgagatcaggagacaccccgataagggcaacggccagcagagacccacaaagcagaagtccgaggaacagctccaggcctactacaagaaaaccctggaggagagactgtccgcgggagctctgaacaccttccctagagccttcaaacaagtcatggagggcagagacatcaagctggtgatcaaccagaccgcccaggactgcttcggctgccttgagtctatcagccagatcaggaccgccacacgggataagaaggacaccgtcaccagagagaagcaccccaagaagcccttccagaaatggatgaagaagagggccatcaagaagggcaattacctgagattccagaggctgttctacctggacagaggcaagctggccaagatcatcctggacgacatcgagtgcctgagctgcgacatccctctgagcgagatctacagcgtgttcaagaccagatgggagaccaccggcagcttcaagtctctgggcgacttcaagacatacggcaaggccgacaacaccgccttcagagagctcatcaccgctaaggagatcgagaagaacgtgcaggagatgagcaagggcagcgctcctggccccgatggaattacactgggcgatgtggtgaagatggaccccgagttcagcctgacaatggagatcttcaacctgtggctcaccacaggcaagatccccgacatggtgagaggctgcagaaccgtgcttatccccaagagcagcaagcccgacagactgaaggatatcaacaactggagacccatcaccatcggcagcatcctgctgcggctgttcagccggattgtgaccgctagactgagcaaagcctgtcccctgaaccccagacagagaggcttcatcagagccgctggctgcagcgagaacctgaagctgctccagacaatcatctggagcgccaagagagagcacagacccctgggcgttgttttcgtggacatcgccaaggccttcgacaccgtgtcccatcagcacattatccacgccctgcagcagagggaggtcgaccctcatattgtgggcctggtgtccaacatgtacgagaacatctccacctatattacgaccaagagaaacacccacacagacaagatccagatccgggtcggcgtcaagcagggcgatcctatgtctcctctgctgttcaacctcgccatggaccctctgctctgcaagctcgaggagtctggaaagggctaccatagaggccaatcatcgatcaccgccatggccttcgccgacgacctggtgcttttaagcgacagctgggagaacatgaacaccaacatctctatcctggagacattctgcaaccttaccggcctgaaaacccagggccagaagtgtcatggcttctacatcaaacccaccaagaagagctacaccatcaacgactgcgccgcctggacaatcaacggcacccctctcaacatgatcgaccccggcgagtctgagaagtacctgggcctgcagttcgatccctggatcggcatcgctagaagcggcttgagcaccaagctggacttttggctccaacgcatagaccaggcccccctgaagcctcttcagaaactggacattttgaaaacttatacgatccccagactcatctacatcgccgaccactccgaggtcaagagcgctctgctggaaaccctggaccagaaaatcagaaccgccgtcaaggaatggctgcacctgcccccttgcacatgcgacgctatcctgtacagcagcaccagggacggcggcttaggaatcaccaagttagccggcctcatccccagcgtgcaggctaggagactccacagaatcgcccagagcagcgacgacaccatgaagtgcttcatggagaaggaaaagatggagcagctgcacaagaagctgtggatccaagcgggcggagatcgtgagaacattcccagcatctgggaggcccctcccagctcagaacctcccaataacgtgtccaccaattctgaatgggaggctcccacccagaaggataagtttcccaagccctgcaactggcggaagaacgagttcaaaaaatggacaaagctggctagccagggcaggggcatcgtgaacttcgaaagggacaagattagcaaccactggatccagtactacagaagaatcccccacagaaagctcctcaccgccctccagttacgtgcaaacgtgtacccaaccagagaattcctggccagaggcagacaggaccagtacatcaaggcctgccggcactgcgatgccgataacgagagctgtgctcacatcatcggcaactgccccgtcacccaggacgccagaatcaagagacacaactacatctgcgagttacttctggaggaagccaagaagaaggattgggttgtgttcaaggagccccacatcagagactccaacaaggagctgtacaagccagacctcatcttcgtgaaggacggcagagccctggtggtggacgtcaccgtcagatacgaggctgctaagtccagccttgaggaggctgccgccgagaaagtgcggaagtacaagcacctggaaacagaggtcagacacctcaccaacgccaaggacgttaccttcgtgggcttccccctaggtgctagaggcaaatggcaccaggacaacttcaagctgcttaccgagctgggcctctccaagagccgacaggttaagatggccgagaccttcagcaccgtcgccctgttctcttctgtggacattgtgcacatgttcgcctccagagccagaaagagcatggtgatgtgataataggctgccttctgcggggcttgccttctggccatgcccttcttctctcccttgcacctgtacctcttggtctttgaataaagcctgagtaggaaggaccggtaaaaaaaaaaaaaaaaaaaaaaaaaaaaaaacgttgactaaaaaaaaaaaaaaaaaaaaaaaaaaaaaaaaaaaaaaaaaaaaaaaaaaaaaaaaaaaaaaaaaaaaaa

SEQ ID NO: 11087 - DNA, 5389 bp, synthetic construct
  source 1..5389: mol_type = other DNA
ggtctagttacaactgggcatcgctgcagagatcgcacctcctcgtggtcccgctggtagcccttcgaagggtgactaagtcgatctctgccccaggtacggagccgttgggactcaccagtccaacgtaactcctgcctaaattcggtgaaacaaattcctcggtaaaaagccccatggcccctaagaaaaagcggaaggtgaatatcagcggctctagctgcggcagccccaacagcgccgacaccagcagcgacttcaaggacctgtggaccaagctgaaggaatgccacgaccgggaagtgcagggactccaggtgaaggtcaccaaactcaagcaagaaagaatcctggacgcccagagactggaagaattcttcaccaagaaccagcagctgagagagcagcagaaagtgctgcacgagacaatcaaggttctggaagatagactgcgggccggcctgtgcgacagatgcgccgtgaccgaggaacacatgcgcaaaaagcagcaggagttcgagaacattagacagcaaaatctgaaattgatcacagagctgatgaacgagagaaacacactgcaggaggagaacaagaagctgagcgagcagctgcaacagaagatcgagaatgatcagcaacaccaggccgctgagctggaatgtgaagaggacgtgatccccgacagcccaatcacagctttcagcttttctggcgtgaacagactgaggcggaaggaaaacccccacgtgcggtacatcgagcagacccataccaagctggaacacagcgtgtgtgccaacgagatgagaaaggtgtccaagtcctccacccatccccagcacaaccctaacgaaaatgagatcctggtggctgatacctacgaccagtctcagagccctatggccaaggcccacggcaccagctcttatacccctgataagagctccttcaacctggccaccgtggtggccgagacactgggcctgggcgtgcaggaggaaagcgagacacagggcccaatgagccctctgggagatgagctgtaccactgcctggaaggcaaccacaagaaacagccttttgagtccggctccgagactcctggaacaagcgagagcgctacacctgagggcagccctaagagaaaggtgtccagcgccgagggcgctgccaaggaagagcctaaacggagaagcgccagactgagcgccaagccccccgccaaggtggaagccaagcctaagaaggccgccgctaaggacaagagcagcgataagaaagtccagaccaagggcaagcggggcgccaaaggcaaacaggccgaggtggccaaccaggagacaaaggaagatctgcctgctgagaacggcgaaaccaagaccgaggaatctccagcttctgacgaggccggagagaaggaggccaaaagcgacagcggctctgagacacctggaacaagcgagagcgccaccccggaatcctacgaacagctggctccccagccctgtgtaggcgagacattacacagcagcctgcccagagacagcgagctgttcgttccggaagagggctctagcgagaaggagagcgaggacgctcctaagaccagccctcctacccctggcaaacacggcctggagcaaacaggcgaggagaaggtcatggtgaccgtgcccgacaagaaccctccctgtccttgctgtggcacaagagtcaacagcgtgctgaacctcatcgagcacctgaaggtgtcccacggcaagagaggcgtgtgcttcagatgcgccaagtgcggcaaggagaacagcaactaccacagcgtcgtgtgccacttcaagaagtgcagaggccctgagaccgagaaggctcccgctggcgaatggatttgcgaggtgtgcaacagagacttcaccaccaagatcggcctgggccagcacaagcggttagctcaccctgctgtgagaaaccaggagagaatcgtggccagccagcccaaggagacaagcaacaggggcgctcacaagagatgctggaccaaggaggaagaggagctgctcatcagactggaggctcagttcgagggcaacaagaacatcaataagcttatcgccgagcacatcaccacaaagaccgccaagcagatcagcgacaagaggagactgctgtccagaaagcccgccgaggagcctagaatggaacctggtacatgtcaccacaccagaagagccgccgctagcctgagaaccgagcccgaaatgtctcaccacgctcaggccgaggacagagacaacggccctggcaggagacctcttcccggcagagctgctgctggaggcagaaccatggacgagatcaggagacaccccgataagggcaacggccagcagagacccacaaagcagaagtccgaggaacagctccaggcctactacaagaaaaccctggaggagagactgtccgcgggagctctgaacaccttccctagagccttcaaacaagtcatggagggcagagacatcaagctggtgatcaaccagaccgcccaggactgcttcggctgccttgagtctatcagccagatcaggaccgccacacgggataagaaggacaccgtcaccagagagaagcaccccaagaagcccttccagaaatggatgaagaagagggccatcaagaagggcaattacctgagattccagaggctgttctacctggacagaggcaagctggccaagatcatcctggacgacatcgagtgcctgagctgcgacatccctctgagcgagatctacagcgtgttcaagaccagatgggagaccaccggcagcttcaagtctctgggcgacttcaagacatacggcaaggccgacaacaccgccttcagagagctcatcaccgctaaggagatcgagaagaacgtgcaggagatgagcaagggcagcgctcctggccccgatggaattacactgggcgatgtggtgaagatggaccccgagttcagcagaacaatggagatcttcaacctgtggctcaccacaggcaagatccccgacatggtgagaggctgcagaaccgtgcttatccccaagagcagcaagcccgacagactgaaggatatcaacaactggagacccatcaccatcggcagcatcctgctgcggctgttcagccggattgtgaccgctagactgagcaaagcctgtcccctgaaccccagacagagaggcttcatcagagccgctggctgcagcgagaacctgaagctgctccagacaatcatctggagcgccaagagagagcacagacccctgggcgttgttttcgtggacatcgccaaggccttcgacaccgtgtcccatcagcacattatccacgccctgcagcagagggaggtcgaccctcatattgtgggcctggtgtccaacatgtacgagaacatctccacctatattacgaccaagagaaacacccacacagacaagatccagatccgggtcggcgtcaagcagggcgatcctatgtctcctctgctgttcaacctcgccatggaccctctgctctgcaagctcgaggagtctggaaagggctaccatagaggccaatcatcgatcaccgccatggccttcgccgacgacctggtgcttttaagcgacagctgggagaacatgaacaccaacatctctatcctggagacattctgcaaccttaccggcctgaaaacccagggccagaagtgtcatggcttctacatcaaacccaccaagaagagctacaccatcaacgactgcgccgcctggacaatcaacggcacccctctcaacatgatcgaccccggcgagtctgagaagtacctgggcctgcagttcgatccctggatcggcatcgctagaagcggcttgagcaccaagctggacgagtggctccaacgcatagaccaggcccccctgaagcctcttcagaaactggacattttgaaaacttatacgatccccagactcatctacatcgccgaccactccgaggtcaagagcgctctgctggaaaccctggaccagaaaatcagaaccgccgtcaaggaatggctgcacctgcccccttgcacatgcgacgctatcctgtacagcagcaccagggacggcggcttaggaatcaccaagttagccggcctcatccccagcgtgcaggctaggagactccacagaatcgcccagagcagcgacgacaccatgaagtgcttcatggagaaggaaaagatggagcagctgcacaagaagctgtggatccaagcgggcggagatcgtgagaacattcccagcatctgggaggcccctcccagctcagaacctcccaataacgtgtccaccaattctgaatgggaggctcccacccagaaggataagtttcccaagccctgcaactggcggaagaacgagttcaaaaaatggacaaagctggctagccagggcaggggcatcgtgaacttcgaaagggacaagattagcaaccactggatccagtactacagaagaatcccccacagaaagctcctcaccgccctccagttacgtgcaaacgtgtacccaaccagagaattcctggccagaggcagacaggaccagtacatcaaggcctgccggcactgcgatgccgataacgagagctgtgctcacatcatcggcaactgccccgtcacccaggacgccagaatcaagagacacaactacatctgcgagttacttctggaggaagccaagaagaaggattgggttgtgttcaaggagccccacatcagagactccaacaaggagctgtacaagccagacctcatcttcgtgaaggacggcagagccctggtggtggacgtcaccgtcagatacgaggctgctaagtccagccttgaggaggctgccgccgagaaagtgcggaagtacaagcacctggaaacagaggtcagacacctcaccaacgccaaggacgttaccttcgtgggcttccccctaggtgctagaggcaaatggcaccaggacaacttcaagctgcttaccgagctgggcctctccaagagccgacaggttaagatggccgagaccttcagcaccgtcgccctgttctcttctgtggacattgtgcacatgttcgcctccagagccagaaagagcatggtgatgtgataataggctgccttctgcggggcttgccttctggccatgcccttcttctctcccttgcacctgtacctcttggtctttgaataaagcctgagtaggaaggaccggtaaaaaaaaaaaaaaaaaaaaaaaaaaaaaaacgttgactaaaaaaaaaaaaaaaaaaaaaaaaaaaaaaaaaaaaaaaaaaaaaaaaaaaaaaaaaaaaaaaaaaaaaa

SEQ ID NO: 11088 - DNA, 5389 bp, synthetic construct
  source 1..5389: mol_type = other DNA
ggtctagttacaactgggcatcgctgcagagatcgcacctcctcgtggtcccgctggtagcccttcgaagggtgactaagtcgatctctgccccaggtacggagccgttgggactcaccagtccaacgtaactcctgcctaaattcggtgaaacaaattcctcggtaaaaagccccatggcccctaagaaaaagcggaaggtgaatatcagcggctctagctgcggcagccccaacagcgccgacaccagcagcgacttcaaggacctgtggaccaagctgaaggaatgccacgaccgggaagtgcagggactccaggtgaaggtcaccaaactcaagcaagaaagaatcctggacgcccagagactggaagaattcttcaccaagaaccagcagctgagagagcagcagaaagtgctgcacgagacaatcaaggttctggaagatagactgcgggccggcctgtgcgacagatgcgccgtgaccgaggaacacatgcgcaaaaagcagcaggagttcgagaacattagacagcaaaatctgaaattgatcacagagctgatgaacgagagaaacacactgcaggaggagaacaagaagctgagcgagcagctgcaacagaagatcgagaatgatcagcaacaccaggccgctgagctggaatgtgaagaggacgtgatccccgacagcccaatcacagctttcagcttttctggcgtgaacagactgaggcggaaggaaaacccccacgtgcggtacatcgagcagacccataccaagctggaacacagcgtgtgtgccaacgagatgagaaaggtgtccaagtcctccacccatccccagcacaaccctaacgaaaatgagatcctggtggctgatacctacgaccagtctcagagccctatggccaaggcccacggcaccagctcttatacccctgataagagctccttcaacctggccaccgtggtggccgagacactgggcctgggcgtgcaggaggaaagcgagacacagggcccaatgagccctctgggagatgagctgtaccactgcctggaaggcaaccacaagaaacagccttttgagtccggctccgagactcctggaacaagcgagagcgctacacctgagggcagccctaagagaaaggtgtccagcgccgagggcgctgccaaggaagagcctaaacggagaagcgccagactgagcgccaagccccccgccaaggtggaagccaagcctaagaaggccgccgctaaggacaagagcagcgataagaaagtccagaccaagggcaagcggggcgccaaaggcaaacaggccgaggtggccaaccaggagacaaaggaagatctgcctgctgagaacggcgaaaccaagaccgaggaatctccagcttctgacgaggccggagagaaggaggccaaaagcgacagcggctctgagacacctggaacaagcgagagcgccaccccggaatcctacgaacagctggctccccagccctgtgtaggcgagacattacacagcagcctgcccagagacagcgagctgttcgttccggaagagggctctagcgagaaggagagcgaggacgctcctaagaccagccctcctacccctggcaaacacggcctggagcaaacaggcgaggagaaggtcatggtgaccgtgcccgacaagaaccctccctgtccttgctgtggcacaagagtcaacagcgtgctgaacctcatcgagcacctgaaggtgtcccacggcaagagaggcgtgtgcttcagatgcgccaagtgcggcaaggagaacagcaactaccacagcgtcgtgtgccacttcaagaagtgcagaggccctgagaccgagaaggctcccgctggcgaatggatttgcgaggtgtgcaacagagacttcaccaccaagatcggcctgggccagcacaagcggttagctcaccctgctgtgagaaaccaggagagaatcgtggccagccagcccaaggagacaagcaacaggggcgctcacaagagatgctggaccaaggaggaagaggagctgctcatcagactggaggctcagttcgagggcaacaagaacatcaataagcttatcgccgagcacatcaccacaaagaccgccaagcagatcagcgacaagaggagactgctgtccagaaagcccgccgaggagcctagaatggaacctggtacatgtcaccacaccagaagagccgccgctagcctgagaaccgagcccgaaatgtctcaccacgctcaggccgaggacagagacaacggccctggcaggagacctcttcccggcagagctgctgctggaggcagaaccatggacgagatcaggagacaccccgataagggcaacggccagcagagacccacaaagcagaagtccgaggaacagctccaggcctactacaagaaaaccctggaggagagactgtccgcgggagctctgaacaccttccctagagccttcaaacaagtcatggagggcagagacatcaagctggtgatcaaccagaccgcccaggactgcttcggctgccttgagtctatcagccagatcaggaccgccacacgggataagaaggacaccgtcaccagagagaagcaccccaagaagcccttccagaaatggatgaagaagagggccatcaagaagggcaattacctgagattccagaggctgttctacctggacagaggcaagctggccaagatcatcctggacgacatcgagtgcctgagctgcgacatccctctgagcgagatctacagcgtgttcaagaccagatgggagaccaccggcagcttcaagtctctgggcgacttcaagacatacggcaaggccgacaacaccgccttcagagagctcatcaccgctaaggagatcgagaagaacgtgcaggagatgagcaagggcagcgctcctggccccgatggaattacactgggcgatgtggtgaagatggaccccgagttcagcctgacaatggagatcttcaacctgtggctcaccacaggcaagatccccgacatggtgagaggctgcagaaccgtgcttatccccaagagcagcaagcccgacagactgaaggatatcaacaactggagacccatcaccatcggcagcatcctgctgcggctgttcagccggattgtgaccgctagactgagcaaagcctgtcccctgaaccccagacagagaggcttcatcagagccgctggctgcagcgagaacctgaagctgctccagacaatcatctggagcgccaagagagagcacagacccctgggcgttgttttcgtggacatcgccaaggccttcgacaccgtgtcccatcagcacattatccacgccctgcagcagagggaggtcgaccctcatattgtgggcctggtgtccaacatgtacgagaacatctccacctatattacgaccaagagaaacacccacacagacaagatccagatccgggtcggcgtcaagcagggcgatcctatgtctcctctgctgttcaacctcgccatggaccctctgctctgcaagctcgaggagtctggaaagggctaccatagaggccaatcatcgatcaccgccatggccttcgccgacgacctggtgcttttaagcgacagctgggagaacatgaacaccaacatctctatcctggagacattctgcaaccttaccggcctgaaaacccagggccagaagtgtcatggcttctacatcaaacccaccaagaagagctacaccatcaacgactgcgccgcctggacaatcaacggcacccctctcaacatgatcgaccccggcgagtctgagaagtacctgggcctgcagttcgatccctggatcggcatcgctagaagcggcttgagcaccaagctggacttttggctccaacgcatagaccaggcccccctgaagcctcttcagaaactggacattttgaaaacttatacgatccccagactcatctacatcgccgaccactccgaggtcaagagcgctctgctggaaaccctggaccagaaaatcagaaccgccgtcaaggaatggctgcacctgcccccttgcacatgcgacgctatcctgtacagcagcaccagggacggcggcttaggaatcaccaagttagccggcctcatccccagcgtgcaggctaggagactccacagaatcgcccagagcagcgacgacaccatgaagtgcttcatggagaaggaaaagatggagcagctgcacaagaagctgtggatccaagcgggcggagatcgtgagaacattcccagcatctgggaggcccctcccagctcagaacctcccaataacgtgtccaccaattctgaatgggaggctcccacccagaagcccaagtttcccaagccctgcaactggcggaagaacgagttcaaaaaatggacaaagctggctagccagggcaggggcatcgtgaacttcgaaagggacaagattagcaaccactggatccagtactacagaagaatcccccacagaaagctcctcaccgccctccagttacgtgcaaacgtgtacccaaccagagaattcctggccagaggcagacaggaccagtacatcaaggcctgccggcactgcgatgccgataacgagagctgtgctcacatcatcggcaactgccccgtcacccaggacgccagaatcaagagacacaactacatctgcgagttacttctggaggaagccaagaagaaggattgggttgtgttcaaggagccccacatcagagactccaacaaggagctgtacaagccagacctcatcttcgtgaaggacggcagagccctggtggtggacgtcaccgtcagatacgaggctgctaagtccagccttgaggaggctgccgccgagaaagtgcggaagtacaagcacctggaaacagaggtcagacacctcaccaacgccaaggacgttaccttcgtgggcttccccctaggtgctagaggcaaatggcaccaggacaacttcaagctgcttaccgagctgggcctctccaagagccgacaggttaagatggccgagaccttcagcaccgtcgccctgttctcttctgtggacattgtgcacatgttcgcctccagagccagaaagagcatggtgatgtgataataggctgccttctgcggggcttgccttctggccatgcccttcttctctcccttgcacctgtacctcttggtctttgaataaagcctgagtaggaaggaccggtaaaaaaaaaaaaaaaaaaaaaaaaaaaaaaacgttgactaaaaaaaaaaaaaaaaaaaaaaaaaaaaaaaaaaaaaaaaaaaaaaaaaaaaaaaaaaaaaaaaaaaaaa

SEQ ID NO: 11089 - DNA, 5389 bp, synthetic construct
  source 1..5389: mol_type = other DNA
ggtctagttacaactgggcatcgctgcagagatcgcacctcctcgtggtcccgctggtagcccttcgaagggtgactaagtcgatctctgccccaggtacggagccgttgggactcaccagtccaacgtaactcctgcctaaattcggtgaaacaaattcctcggtaaaaagccccatggcccctaagaaaaagcggaaggtgaatatcagcggctctagctgcggcagccccaacagcgccgacaccagcagcgacttcaaggacctgtggaccaagctgaaggaatgccacgaccgggaagtgcagggactccaggtgaaggtcaccaaactcaagcaagaaagaatcctggacgcccagagactggaagaattcttcaccaagaaccagcagctgagagagcagcagaaagtgctgcacgagacaatcaaggttctggaagatagactgcgggccggcctgtgcgacagatgcgccgtgaccgaggaacacatgcgcaaaaagcagcaggagttcgagaacattagacagcaaaatctgaaattgatcacagagctgatgaacgagagaaacacactgcaggaggagaacaagaagctgagcgagcagctgcaacagaagatcgagaatgatcagcaacaccaggccgctgagctggaatgtgaagaggacgtgatccccgacagcccaatcacagctttcagcttttctggcgtgaacagactgaggcggaaggaaaacccccacgtgcggtacatcgagcagacccataccaagctggaacacagcgtgtgtgccaacgagatgagaaaggtgtccaagtcctccacccatccccagcacaaccctaacgaaaatgagatcctggtggctgatacctacgaccagtctcagagccctatggccaaggcccacggcaccagctcttatacccctgataagagctccttcaacctggccaccgtggtggccgagacactgggcctgggcgtgcaggaggaaagcgagacacagggcccaatgagccctctgggagatgagctgtaccactgcctggaaggcaaccacaagaaacagccttttgagtccggctccgagactcctggaacaagcgagagcgctacacctgagggcagccctaagagaaaggtgtccagcgccgagggcgctgccaaggaagagcctaaacggagaagcgccagactgagcgccaagccccccgccaaggtggaagccaagcctaagaaggccgccgctaaggacaagagcagcgataagaaagtccagaccaagggcaagcggggcgccaaaggcaaacaggccgaggtggccaaccaggagacaaaggaagatctgcctgctgagaacggcgaaaccaagaccgaggaatctccagcttctgacgaggccggagagaaggaggccaaaagcgacagcggctctgagacacctggaacaagcgagagcgccaccccggaatcctacgaacagctggctccccagccctgtgtaggcgagacattacacagcagcctgcccagagacagcgagctgttcgttccggaagagggctctagcgagaaggagagcgaggacgctcctaagaccagccctcctacccctggcaaacacggcctggagcaaacaggcgaggagaaggtcatggtgaccgtgcccgacaagaaccctccctgtccttgctgtggcacaagagtcaacagcgtgctgaacctcatcgagcacctgaaggtgtcccacggcaagagaggcgtgtgcttcagatgcgccaagtgcggcaaggagaacagcaactaccacagcgtcgtgtgccacttcaagaagtgcagaggccctgagaccgagaaggctcccgctggcgaatggatttgcgaggtgtgcaacagagacttcaccaccaagatcggcctgggccagcacaagcggttagctcaccctgctgtgagaaaccaggagagaatcgtggccagccagcccaaggagacaagcaacaggggcgctcacaagagatgctggaccaaggaggaagaggagctgctcatcagactggaggctcagttcgagggcaacaagaacatcaataagcttatcgccgagcacatcaccacaaagaccgccaagcagatcagcgacaagaggagactgctgtccagaaagcccgccgaggagcctagaatggaacctggtacatgtcaccacaccagaagagccgccgctagcctgagaaccgagcccgaaatgtctcaccacgctcaggccgaggacagagacaacggccctggcaggagacctcttcccggcagagctgctgctggaggcagaaccatggacgagatcaggagacaccccgataagggcaacggccagcagagacccacaaagcagaagtccgaggaacagctccaggcctactacaagaaaaccctggaggagagactgtccgcgggagctctgaacaccttccctagagccttcaaacaagtcatggagggcagagacatcaagctggtgatcaaccagaccgcccaggactgcttcggctgccttgagtctatcagccagatcaggaccgccacacgggataagaagtacaccgtcaccagagagaagcaccccaagaagcccttccagaaatggatgaagaagagggccatcaagaagggcaattacctgagattccagaggctgttctacctggacagaggcaagctggccaagatcatcctggacgacatcgagtgcctgagctgcgacatccctctgagcgagatctacagcgtgttcaagaccagatgggagaccaccggcagcttcaagtctctgggcgacttcaagacatacggcaaggccgacaacaccgccttcagagagctcatcaccgctaaggagatcgagaagaacgtgcaggagatgagcaagggcagcgctcctggccccgatggaattacactgggcgatgtggtgaagatggaccccgagttcagcctgacaatggagatcttcaacctgtggctcaccacaggcaagatccccgacatggtgagaggctgcagaaccgtgcttatccccaagagcagcaagcccgacagactgaaggatatcaacaactggagacccatcaccatcggcagcatcctgctgcggctgttcagccggattgtgaccgctagactgagcaaagcctgtcccctgaaccccagacagagaggcttcatcagagccgctggctgcagcgagaacctgaagctgctccagacaatcatctggagcgccaagagagagcacagacccctgggcgttgttttcgtggacatcgccaaggccttcgacaccgtgtcccatcagcacattatccacgccctgcagcagagggaggtcgaccctcatattgtgggcctggtgtccaacatgtacgagaacatctccacctatattacgaccaagagaaacacccacacagacaagatccagatccgggtcggcgtcaagcagggcgatcctatgtctcctctgctgttcaacctcgccatggaccctctgctctgcaagctcgaggagtctggaaagggctaccatagaggccaatcatcgatcaccgccatggccttcgccgacgacctggtgcttttaagcgacagctgggagaacatgaacaccaacatctctatcctggagacattctgcaaccttaccggcctgaaaacccagggccagaagtgtcatggcttctacatcaaacccaccaagaagagctacaccatcaacgactgcgccgcctggacaatcaacggcacccctctcaacatgatcgaccccggcgagtctgagaagtacctgggcctgcagttcgatccctggatcggcatcgctagaagcggcttgagcaccaagctggacttttggctccaacgcatagaccaggcccccctgaagcctcttcagaaactggacattttgaaaacttatacgatccccagactcatctacatcgccgaccactccgaggtcaagagcgctctgctggaaaccctggaccagaaaatcagaaccgccgtcaaggaatggctgcacctgcccccttgcacatgcgacgctatcctgtacagcagcaccagggacggcggcttaggaatcaccaagttagccggcctcatccccagcgtgcaggctaggagactccacagaatcgcccagagcagcgacgacaccatgaagtgcttcatggagaaggaaaagatggagcagctgcacaagaagctgtggatccaagcgggcggagatcgtgagaacattcccagcatctgggaggcccctcccagctcagaacctcccaataacgtgtccaccaattctgaatgggaggctcccacccagaagcccaagtttcccaagccctgcaactggcggaagaacgagttcaaaaaatggacaaagctggctagccagggcaggggcatcgtgaacttcgaaagggacaagattagcaaccactggatccagtactacagaagaatcccccacagaaagctcctcaccgccctccagttacgtgcaaacgtgtacccaaccagagaattcctggccagaggcagacaggaccagtacatcaaggcctgccggcactgcgatgccgataacgagagctgtgctcacatcatcggcaactgccccgtcacccaggacgccagaatcaagagacacaactacatctgcgagttacttctggaggaagccaagaagaaggattgggttgtgttcaaggagccccacatcagagactccaacaaggagctgtacaagccagacctcatcttcgtgaaggacggcagagccctggtggtggacgtcaccgtcagatacgaggctgctaagtccagccttgaggaggctgccgccgagaaagtgcggaagtacaagcacctggaaacagaggtcagacacctcaccaacgccaaggacgttaccttcgtgggcttccccctaggtgctagaggcaaatggcaccaggacaacttcaagctgcttaccgagctgggcctctccaagagccgacaggttaagatggccgagaccttcagcaccgtcgccctgttctcttctgtggacattgtgcacatgttcgcctccagagccagaaagagcatggtgatgtgataataggctgccttctgcggggcttgccttctggccatgcccttcttctctcccttgcacctgtacctcttggtctttgaataaagcctgagtaggaaggaccggtaaaaaaaaaaaaaaaaaaaaaaaaaaaaaaacgttgactaaaaaaaaaaaaaaaaaaaaaaaaaaaaaaaaaaaaaaaaaaaaaaaaaaaaaaaaaaaaaaaaaaaaaa

SEQ ID NO: 11090 - DNA, 5389 bp, synthetic construct
  source 1..5389: mol_type = other DNA
ggtctagttacaactgggcatcgctgcagagatcgcacctcctcgtggtcccgctggtagcccttcgaagggtgactaagtcgatctctgccccaggtacggagccgttgggactcaccagtccaacgtaactcctgcctaaattcggtgaaacaaattcctcggtaaaaagccccatggcccctaagaaaaagcggaaggtgaatatcagcggctctagctgcggcagccccaacagcgccgacaccagcagcgacttcaaggacctgtggaccaagctgaaggaatgccacgaccgggaagtgcagggactccaggtgaaggtcaccaaactcaagcaagaaagaatcctggacgcccagagactggaagaattcttcaccaagaaccagcagctgagagagcagcagaaagtgctgcacgagacaatcaaggttctggaagatagactgcgggccggcctgtgcgacagatgcgccgtgaccgaggaacacatgcgcaaaaagcagcaggagttcgagaacattagacagcaaaatctgaaattgatcacagagctgatgaacgagagaaacacactgcaggaggagaacaagaagctgagcgagcagctgcaacagaagatcgagaatgatcagcaacaccaggccgctgagctggaatgtgaagaggacgtgatccccgacagcccaatcacagctttcagcttttctggcgtgaacagactgaggcggaaggaaaacccccacgtgcggtacatcgagcagacccataccaagctggaacacagcgtgtgtgccaacgagatgagaaaggtgtccaagtcctccacccatccccagcacaaccctaacgaaaatgagatcctggtggctgatacctacgaccagtctcagagccctatggccaaggcccacggcaccagctcttatacccctgataagagctccttcaacctggccaccgtggtggccgagacactgggcctgggcgtgcaggaggaaagcgagacacagggcccaatgagccctctgggagatgagctgtaccactgcctggaaggcaaccacaagaaacagccttttgagtccggctccgagactcctggaacaagcgagagcgctacacctgagggcagccctaagagaaaggtgtccagcgccgagggcgctgccaaggaagagcctaaacggagaagcgccagactgagcgccaagccccccgccaaggtggaagccaagcctaagaaggccgccgctaaggacaagagcagcgataagaaagtccagaccaagggcaagcggggcgccaaaggcaaacaggccgaggtggccaaccaggagacaaaggaagatctgcctgctgagaacggcgaaaccaagaccgaggaatctccagcttctgacgaggccggagagaaggaggccaaaagcgacagcggctctgagacacctggaacaagcgagagcgccaccccggaatcctacgaacagctggctccccagccctgtgtaggcgagacattacacagcagcctgcccagagacagcgagctgttcgttccggaagagggctctagcgagaaggagagcgaggacgctcctaagaccagccctcctacccctggcaaacacggcctggagcaaacaggcgaggagaaggtcatggtgaccgtgcccgacaagaaccctccctgtccttgctgtggcacaagagtcaacagcgtgctgaacctcatcgagcacctgaaggtgtcccacggcaagagaggcgtgtgcttcagatgcgccaagtgcggcaaggagaacagcaactaccacagcgtcgtgtgccacttcaagaagtgcagaggccctgagaccgagaaggctcccgctggcgaatggatttgcgaggtgtgcaacagagacttcaccaccaagatcggcctgggccagcacaagcggttagctcaccctgctgtgagaaaccaggagagaatcgtggccagccagcccaaggagacaagcaacaggggcgctcacaagagatgctggaccaaggaggaagaggagctgctcatcagactggaggctcagttcgagggcaacaagaacatcaataagcttatcgccgagcacatcaccacaaagaccgccaagcagatcagcgacaagaggagactgctgtccagaaagcccgccgaggagcctagaatggaacctggtacatgtcaccacaccagaagagccgccgctagcctgagaaccgagcccgaaatgtctcaccacgctcaggccgaggacagagacaacggccctggcaggagacctcttcccggcagagctgctgctggaggcagaaccatggacgagatcaggagacaccccgataagggcaacggccagcagagacccacaaagcagaagtccgaggaacagctccaggcctactacaagaaaaccctggaggagagactgtccgcgggagctctgaacaccttccctagagccttcaaacaagtcatggagggcagagacatcaagctggtgatcaaccagaccgcccaggactgcttcggctgccttgagtctatcagccagatcaggaccgccacacgggataagaaggacaccgtcaccagagagaagcaccccaagagacccttccagaaatggatgaagaagagggccatcaagaagggcaattacctgagattccagaggctgttctacctggacagaggcaagctggccaagatcatcctggacgacatcgagtgcctgagctgcgacatccctctgagcgagatctacagcgtgttcaagaccagatgggagaccaccggcagcttcaagtctctgggcgacttcaagacatacggcaaggccgacaacaccgccttcagagagctcatcaccgctaaggagatcgagaagaacgtgcaggagatgagcaagggcagcgctcctggccccgatggaattacactgggcgatgtggtgaagatggaccccgagttcagcagaacaatggagatcttcaacctgtggctcaccacaggcaagatccccgacatggtgagaggctgcagaaccgtgcttatccccaagagcagcaagcccgacagactgaaggatatcaacaactggagacccatcaccatcggcagcatcctgctgcggctgttcagccggattgtgaccgctagactgagcaaagcctgtcccctgaaccccagacagagaggcttcatcagagccgctggctgcagcgagaacctgaagctgctccagacaatcatctggagcgccaagagagagcacagacccctgggcgttgttttcgtggacatcgccaaggccttcgacaccgtgtcccatcagcacattatccacgccctgcagcagagggaggtcgaccctcatattgtgggcctggtgtccaacatgtacgagaacatctccacctatattacgaccaagagaaacacccacacagacaagatccagatccgggtcggcgtcaagcagggcgatcctatgtctcctctgctgttcaacctcgccatggaccctctgctctgcaagctcgaggagtctggaaagggctaccatagaggccaatcatcgatcaccgccatggccttcgccgacgacctggtgcttttaagcgacagctgggagaacatgaacaccaacatctctatcctggagacattctgcaaccttaccggcctgaaaacccagggccagaagtgtcatggcttctacatcaaacccaccaagaagagctacaccatcaacgactgcgccgcctggacaatcaacggcacccctctcaacatgatcgaccccggcgagtctgagaagtacctgggcctgcagttcgatccctggatcggcatcgctagaagcggcttgagcaccaagctggacttttggctccaacgcatagaccaggcccccctgaagcctcttcagaaactggacattttgaaaacttatacgatccccagactcatctacatcgccgaccactccgaggtcaagagcgctctgctggaaaccctggaccagaaaatcagaaccgccgtcaaggaatggctgcacctgcccccttgcacatgcgacgctatcctgtacagcagcaccagggacggcggcttaggaatcaccaagttagccggcctcatccccagcgtgcaggctaggagactccacagaatcgcccagagcagcgacgacaccatgaagtgcttcatggagaaggaaaagatggagcagctgcacaagaagctgtggatccaagcgggcggagatcgtgagaacattcccagcatctgggaggcccctcccagctcagaacctcccaataacgtgtccaccaattctgaatgggaggctcccacccagaaggataagtttcccaagccctgcaactggcggaagaacgagttcaaaaaatggacaaagctggctagccagggcaggggcatcgtgaacttcgaaagggacaagattagcaaccactggatccagtactacagaagaatcccccacagaaagctcctcaccgccctccagttacgtgcaaacgtgtacccaaccagagaattcctggccagaggcagacaggaccagtacatcaaggcctgccggcactgcgatgccgataacgagagctgtgctcacatcatcggcaactgccccgtcacccaggacgccagaatcaagagacacaactacatctgcgagttacttctggaggaagccaagaagaaggattgggttgtgttcaaggagccccacatcagagactccaacaaggagctgtacaagccagacctcatcttcgtgaaggacggcagagccctggtggtggacgtcaccgtcagatacgaggctgctaagtccagccttgaggaggctgccgccgagaaagtgcggaagtacaagcacctggaaacagaggtcagacacctcaccaacgccaaggacgttaccttcgtgggcttccccctaggtgctagaggcaaatggcaccaggacaacttcaagctgcttaccgagctgggcctctccaagagccgacaggttaagatggccgagaccttcagcaccgtcgccctgttctcttctgtggacattgtgcacatgttcgcctccagagccagaaagagcatggtgatgtgataataggctgccttctgcggggcttgccttctggccatgcccttcttctctcccttgcacctgtacctcttggtctttgaataaagcctgagtaggaaggaccggtaaaaaaaaaaaaaaaaaaaaaaaaaaaaaaacgttgactaaaaaaaaaaaaaaaaaaaaaaaaaaaaaaaaaaaaaaaaaaaaaaaaaaaaaaaaaaaaaaaaaaaaaa

SEQ ID NO: 11091 - DNA, 5389 bp, synthetic construct
  source 1..5389: mol_type = other DNA
ggtctagttacaactgggcatcgctgcagagatcgcacctcctcgtggtcccgctggtagcccttcgaagggtgactaagtcgatctctgccccaggtacggagccgttgggactcaccagtccaacgtaactcctgcctaaattcggtgaaacaaattcctcggtaaaaagccccatggcccctaagaaaaagcggaaggtgaatatcagcggctctagctgcggcagccccaacagcgccgacaccagcagcgacttcaaggacctgtggaccaagctgaaggaatgccacgaccgggaagtgcagggactccaggtgaaggtcaccaaactcaagcaagaaagaatcctggacgcccagagactggaagaattcttcaccaagaaccagcagctgagagagcagcagaaagtgctgcacgagacaatcaaggttctggaagatagactgcgggccggcctgtgcgacagatgcgccgtgaccgaggaacacatgcgcaaaaagcagcaggagttcgagaacattagacagcaaaatctgaaattgatcacagagctgatgaacgagagaaacacactgcaggaggagaacaagaagctgagcgagcagctgcaacagaagatcgagaatgatcagcaacaccaggccgctgagctggaatgtgaagaggacgtgatccccgacagcccaatcacagctttcagcttttctggcgtgaacagactgaggcggaaggaaaacccccacgtgcggtacatcgagcagacccataccaagctggaacacagcgtgtgtgccaacgagatgagaaaggtgtccaagtcctccacccatccccagcacaaccctaacgaaaatgagatcctggtggctgatacctacgaccagtctcagagccctatggccaaggcccacggcaccagctcttatacccctgataagagctccttcaacctggccaccgtggtggccgagacactgggcctgggcgtgcaggaggaaagcgagacacagggcccaatgagccctctgggagatgagctgtaccactgcctggaaggcaaccacaagaaacagccttttgagtccggctccgagactcctggaacaagcgagagcgctacacctgagggcagccctaagagaaaggtgtccagcgccgagggcgctgccaaggaagagcctaaacggagaagcgccagactgagcgccaagccccccgccaaggtggaagccaagcctaagaaggccgccgctaaggacaagagcagcgataagaaagtccagaccaagggcaagcggggcgccaaaggcaaacaggccgaggtggccaaccaggagacaaaggaagatctgcctgctgagaacggcgaaaccaagaccgaggaatctccagcttctgacgaggccggagagaaggaggccaaaagcgacagcggctctgagacacctggaacaagcgagagcgccaccccggaatcctacgaacagctggctccccagccctgtgtaggcgagacattacacagcagcctgcccagagacagcgagctgttcgttccggaagagggctctagcgagaaggagagcgaggacgctcctaagaccagccctcctacccctggcaaacacggcctggagcaaacaggcgaggagaaggtcatggtgaccgtgcccgacaagaaccctccctgtccttgctgtggcacaagagtcaacagcgtgctgaacctcatcgagcacctgaaggtgtcccacggcaagagaagagtgtgcttcagatgcgccaagtgcggcaaggagaacagcaactaccacagcgtcgtgtgccacttcaagaagtgcagaggccctgagaccgagaaggctcccgctggcgaatggatttgcgaggtgtgcaacagagacttcaccaccaagatcggcctgggccagcacaagcggttagctcaccctgctgtgagaaaccaggagagaatcgtggccagccagcccaaggagacaagcaacaggggcgctcacaagagatgctggaccaaggaggaagaggagctgctcatcagactggaggctcagttcgagggcaacaagaacatcaataagcttatcgccgagcacatcaccacaaagaccgccaagcagatcagcgacaagaggagactgctgtccagaaagcccgccgaggagcctagaatggaacctggtacatgtcaccacaccagaagagccgccgctagcctgagaaccgagcccgaaatgtctcaccacgctcaggccgaggacagagacaacggccctggcaggagacctcttcccggcagagctgctgctggaggcagaaccatggacgagatcaggagacaccccgataagggcaacggccagcagagacccacaaagcagaagtccgaggaacagctccaggcctactacaagaaaaccctggaggagagactgtccgcgggagctctgaacaccttccctagagccttcaaacaagtcatggagggcagagacatcaagctggtgatcaaccagaccgcccaggactgcttcggctgccttgagtctatcagccagatcaggaccgccacacgggataagaaggacaccgtcaccagagagaagcaccccaagaagcccttccagaaatggatgaagaagagggccatcaagaagggcaattacctgagattccagaggctgttctacctggacagaggcaagctggccaagatcatcctggacgacatcgagtgcctgagctgcgacatccctctgagcgagatctacagcgtgttcaagaccagatgggagaccaccggcagcttcaagtctctgggcgacttcaagacatacggcaaggccgacaacaccgccttcagagagctcatcaccgctaaggagatcgagaagaacgtgcaggagatgagcaagggcagcgctcctggccccgatggaattacactgggcgatgtggtgaagatggaccccgagttcagcagaacaatggagatcttcaacctgtggctcaccacaggcaagatccccgacatggtgagaggctgcagaaccgtgcttatccccaagagcagcaagcccgacagactgaaggatatcaacaactggagacccatcaccatcggcagcatcctgctgcggctgttcagccggattgtgaccgctagactgagcaaagcctgtcccctgaaccccagacagagaggcttcatcagagccgctggctgcagcgagaacctgaagctgctccagacaatcatctggagcgccaagagagagcacagacccctgggcgttgttttcgtggacatcgccaaggccttcgacaccgtgtcccatcagcacattatccacgccctgcagcagagggaggtcgaccctcatattgtgggcctggtgtccaacatgtacgagaacatctccacctatattacgaccaagagaaacacccacacagacaagatccagatccgggtcggcgtcaagcagggcgatcctatgtctcctctgctgttcaacctcgccatggaccctctgctctgcaagctcgaggagtctggaaagggctaccatagaggccaatcatcgatcaccgccatggccttcgccgacgacctggtgcttttaagcgacagctgggagaacatgaacaccaacatctctatcctggagacattctgcaaccttaccggcctgaaaacccagggccagaagtgtcatggcttctacatcaaacccaccaagaagagctacaccatcaacgactgcgccgcctggacaatcaacggcacccctctcaacatgatcgaccccggcgagtctgagaagtacctgggcctgcagttcgatccctggatcggcatcgctagaagcggcttgagcaccaagctggacttttggctccaacgcatagaccaggcccccctgaagcctcttcagaaactggacattttgaaaacttatacgatccccagactcatctacatcgccgaccactccgaggtcaagagcgctctgctggaaaccctggaccagaaaatcagaaccgccgtcaaggaatggctgcacctgcccccttgcacatgcgacgctatcctgtacagcagcaccagggacggcggcttaggaatcaccaagttagccggcctcatccccagcgtgcaggctaggagactccacagaatcgcccagagcagcgacgacaccatgaagtgcttcatggagaaggaaaagatggagcagctgcacaagaagctgtggatccaagcgggcggagatcgtgagaacattcccagcatctgggaggcccctcccagctcagaacctcccaataacgtgtccaccaattctgaatgggaggctcccacccagaaggataagtttcccaagccctgcaactggcggaagaacgagttcaaaaaatggacaaagctggctagccagggcaggggcatcgtgaacttcgaaagggacaagattagcaaccactggatccagtactacagaagaatcccccacagaaagctcctcaccgccctccagttacgtgcaaacgtgtacccaaccagagaattcctggccagaggcagacaggaccagtacatcaaggcctgccggcactgcgatgccgataacgagagctgtgctcacatcatcggcaactgccccgtcacccaggacgccagaatcaagagacacaactacatctgcgagttacttctggaggaagccaagaagaaggattgggttgtgttcaaggagccccacatcagagactccaacaaggagctgtacaagccagacctcatcttcgtgaaggacggcagagccctggtggtggacgtcaccgtcagatacgaggctgctaagtccagccttgaggaggctgccgccgagaaagtgcggaagtacaagcacctggaaacagaggtcagacacctcaccaacgccaaggacgttaccttcgtgggcttccccctaggtgctagaggcaaatggcaccaggacaacttcaagctgcttaccgagctgggcctctccaagagccgacaggttaagatggccgagaccttcagcaccgtcgccctgttctcttctgtggacattgtgcacatgttcgcctccagagccagaaagagcatggtgatgtgataataggctgccttctgcggggcttgccttctggccatgcccttcttctctcccttgcacctgtacctcttggtctttgaataaagcctgagtaggaaggaccggtaaaaaaaaaaaaaaaaaaaaaaaaaaaaaaacgttgactaaaaaaaaaaaaaaaaaaaaaaaaaaaaaaaaaaaaaaaaaaaaaaaaaaaaaaaaaaaaaaaaaaaaaa

SEQ ID NO: 11092 - DNA, 5389 bp, synthetic construct
  source 1..5389: mol_type = other DNA
ggtctagttacaactgggcatcgctgcagagatcgcacctcctcgtggtcccgctggtagcccttcgaagggtgactaagtcgatctctgccccaggtacggagccgttgggactcaccagtccaacgtaactcctgcctaaattcggtgaaacaaattcctcggtaaaaagccccatggcccctaagaaaaagcggaaggtgaatatcagcggctctagctgcggcagccccaacagcgccgacaccagcagcgacttcaaggacctgtggaccaagctgaaggaatgccacgaccgggaagtgcagggactccaggtgaaggtcaccaaactcaagcaagaaagaatcctggacgcccagagactggaagaattcttcaccaagaaccagcagctgagagagcagcagaaagtgctgcacgagacaatcaaggttctggaagatagactgcgggccggcctgtgcgacagatgcgccgtgaccgaggaacacatgcgcaaaaagcagcaggagttcgagaacattagacagcaaaatctgaaattgatcacagagctgatgaacgagagaaacacactgcaggaggagaacaagaagctgagcgagcagctgcaacagaagatcgagaatgatcagcaacaccaggccgctgagctggaatgtgaagaggacgtgatccccgacagcccaatcacagctttcagcttttctggcgtgaacagactgaggcggaaggaaaacccccacgtgcggtacatcgagcagacccataccaagctggaacacagcgtgtgtgccaacgagatgagaaaggtgtccaagtcctccacccatccccagcacaaccctaacgaaaatgagatcctggtggctgatacctacgaccagtctcagagccctatggccaaggcccacggcaccagctcttatacccctgataagagctccttcaacctggccaccgtggtggccgagacactgggcctgggcgtgcaggaggaaagcgagacacagggcccaatgagccctctgggagatgagctgtaccactgcctggaaggcaaccacaagaaacagccttttgagtccggctccgagactcctggaacaagcgagagcgctacacctgagggcagccctaagagaaaggtgtccagcgccgagggcgctgccaaggaagagcctaaacggagaagcgccagactgagcgccaagccccccgccaaggtggaagccaagcctaagaaggccgccgctaaggacaagagcagcgataagaaagtccagaccaagggcaagcggggcgccaaaggcaaacaggccgaggtggccaaccaggagacaaaggaagatctgcctgctgagaacggcgaaaccaagaccgaggaatctccagcttctgacgaggccggagagaaggaggccaaaagcgacagcggctctgagacacctggaacaagcgagagcgccaccccggaatcctacgaacagctggctccccagccctgtgtaggcgagacattacacagcagcctgcccagagacagcgagctgttcgttccggaagagggctctagcgagaaggagagcgaggacgctcctaagaccagccctcctacccctggcaaacacggcctggagcaaacaggcgaggagaaggtcatggtgaccgtgcccgacaagaaccctccctgtccttgctgtggcacaagagtcaacagcgtgctgaacctcatcgagcacctgaaggtgtcccacggcaagagaggcgtgtgcttcagatgcgccaagtgcggcaaggagaacagcaactaccacagcgtcgtgtgccacttcaagaagtgcagaggccctgagaccgagaaggctcccgctggcgaatggatttgcgaggtgtgcaacagagacttcaccaccaagatcggcctgggccagcacaagcggttagctcaccctgctgtgagaaaccaggagagaatcgtggccagccagcccaaggagacaagcaacaggggcgctcacaagagatgctggaccaaggaggaagaggagctgctcatcagactggaggctcagttcgagggcaacaagaacatcaataagcttatcgccgagcacatcaccacaaagaccgccaagcagatcagcgacaagaggagactgctgtccagaaagcccgccgaggagcctagaatggaacctggtacatgtcaccacaccagaagagccgccgctagcctgagaaccgagcccgaaatgtctcaccacgctcaggccgaggacagagacaacggccctggcaggagacctcttcccggcagagctgctgctggaggcagaaccatggacgagatcaggagacaccccgataagggcaacggccagcagagacccacaaagcagaagtccgaggaacagctccaggcctactacaagaaaaccctggaggagagactgtccgcgggagctctgaacaccttccctagagccttcaaacaagtcatggagggcagagacatcaagctggtgatcaaccagaccgcccaggactgcttcggctgccttgagtctatcagccagatcaggaccgccacacgggataagaaggacaccggcaccagagagaagcaccccaagaagcccttccagaaatggatgaagaagagggccatcaagaagggcaattacctgagattccagaggctgttctacctggacagaggcaagctggccaagatcatcctggacgacatcgagtgcctgagctgcgacatccctctgagcgagatctacagcgtgttcaagaccagatgggagaccaccggcagcttcaagtctctgggcgacttcaagacatacggcaaggccgacaacaccgccttcagagagctcatcaccgctaaggagatcgagaagaacgtgcaggagatgagcaagggcagcgctcctggccccgatggaattacactgggcgatgtggtgaagatggaccccgagttcagcagaacaatggagatcttcaacctgtggctcaccacaggcaagatccccgacatggtgagaggctgcagaaccgtgcttatccccaagagcagcaagcccgacagactgaaggatatcaacaactggagacccatcaccatcggcagcatcctgctgcggctgttcagccggattgtgaccgctagactgagcaaagcctgtcccctgaaccccagacagagaggcttcatcagagccgctggctgcagcgagaacctgaagctgctccagacaatcatctggagcgccaagagagagcacagacccctgggcgttgttttcgtggacatcgccaaggccttcgacaccgtgtcccatcagcacattatccacgccctgcagcagagggaggtcgaccctcatattgtgggcctggtgtccaacatgtacgagaacatctccacctatattacgaccaagagaaacacccacacagacaagatccagatccgggtcggcgtcaagcagggcgatcctatgtctcctctgctgttcaacctcgccatggaccctctgctctgcaagctcgaggagtctggaaagggctaccatagaggccaatcatcgatcaccgccatggccttcgccgacgacctggtgcttttaagcgacagctgggagaacatgaacaccaacatctctatcctggagacattctgcaaccttaccggcctgaaaacccagggccagaagtgtcatggcttctacatcaaacccaccaagaagagctacaccatcaacgactgcgccgcctggacaatcaacggcacccctctcaacatgatcgaccccggcgagtctgagaagtacctgggcctgcagttcgatccctggatcggcatcgctagaagcggcttgagcaccaagctggacttttggctccaacgcatagaccaggcccccctgaagcctcttcagaaactggacattttgaaaacttatacgatccccagactcatctacatcgccgaccactccgaggtcaagagcgctctgctggaaaccctggaccagaaaatcagaaccgccgtcaaggaatggctgcacctgcccccttgcacatgcgacgctatcctgtacagcagcaccagggacggcggcttaggaatcaccaagttagccggcctcatccccagcgtgcaggctaggagactccacagaatcgcccagagcagcgacgacaccatgaagtgcttcatggagaaggaaaagatggagcagctgcacaagaagctgtggatccaagcgggcggagatcgtgagaacattcccagcatctgggaggcccctcccagctcagaacctcccaataacgtgtccaccaattctgaatgggaggctcccacccagaaggataagtttcccaagccctgcaactggcggaagaacgagttcaaaaaatggacaaagctggctagccagggcaggggcatcgtgaacttcgaaagggacaagattagcaaccactggatccagtactacagaagaatcccccacagaaagctcctcaccgccctccagttacgtgcaaacgtgtacccaaccagagaattcctggccagaggcagacaggaccagtacatcaaggcctgccggcactgcgatgccgataacgagagctgtgctcacatcatcggcaactgccccgtcacccaggacgccagaatcaagagacacaactacatctgcgagttacttctggaggaagccaagaagaaggattgggttgtgttcaaggagccccacatcagagactccaacaaggagctgtacaagccagacctcatcttcgtgaaggacggcagagccctggtggtggacgtcaccgtcagatacgaggctgctaagtccagccttgaggaggctgccgccgagaaagtgcggaagtacaagcacctggaaacagaggtcagacacctcaccaacgccaaggacgttaccttcgtgggcttccccctaggtgctagaggcaaatggcaccaggacaacttcaagctgcttaccgagctgggcctctccaagagccgacaggttaagatggccgagaccttcagcaccgtcgccctgttctcttctgtggacattgtgcacatgttcgcctccagagccagaaagagcatggtgatgtgataataggctgccttctgcggggcttgccttctggccatgcccttcttctctcccttgcacctgtacctcttggtctttgaataaagcctgagtaggaaggaccggtaaaaaaaaaaaaaaaaaaaaaaaaaaaaaaacgttgactaaaaaaaaaaaaaaaaaaaaaaaaaaaaaaaaaaaaaaaaaaaaaaaaaaaaaaaaaaaaaaaaaaaaaa

SEQ ID NO: 11093 - DNA, 5389 bp, synthetic construct
  source 1..5389: mol_type = other DNA
ggtctagttacaactgggcatcgctgcagagatcgcacctcctcgtggtcccgctggtagcccttcgaagggtgactaagtcgatctctgccccaggtacggagccgttgggactcaccagtccaacgtaactcctgcctaaattcggtgaaacaaattcctcggtaaaaagccccatggcccctaagaaaaagcggaaggtgaatatcagcggctctagctgcggcagccccaacagcgccgacaccagcagcgacttcaaggacctgtggaccaagctgaaggaatgccacgaccgggaagtgcagggactccaggtgaaggtcaccaaactcaagcaagaaagaatcctggacgcccagagactggaagaattcttcaccaagaaccagcagctgagagagcagcagaaagtgctgcacgagacaatcaaggttctggaagatagactgcgggccggcctgtgcgacagatgcgccgtgaccgaggaacacatgcgcaaaaagcagcaggagttcgagaacattagacagcaaaatctgaaattgatcacagagctgatgaacgagagaaacacactgcaggaggagaacaagaagctgagcgagcagctgcaacagaagatcgagaatgatcagcaacaccaggccgctgagctggaatgtgaagaggacgtgatccccgacagcccaatcacagctttcagcttttctggcgtgaacagactgaggcggaaggaaaacccccacgtgcggtacatcgagcagacccataccaagctggaacacagcgtgtgtgccaacgagatgagaaaggtgtccaagtcctccacccatccccagcacaaccctaacgaaaatgagatcctggtggctgatacctacgaccagtctcagagccctatggccaaggcccacggcaccagctcttatacccctgataagagctccttcaacctggccaccgtggtggccgagacactgggcctgggcgtgcaggaggaaagcgagacacagggcccaatgagccctctgggagatgagctgtaccactgcctggaaggcaaccacaagaaacagccttttgagtccggctccgagactcctggaacaagcgagagcgctacacctgagggcagccctaagagaaaggtgtccagcgccgagggcgctgccaaggaagagcctaaacggagaagcgccagactgagcgccaagccccccgccaaggtggaagccaagcctaagaaggccgccgctaaggacaagagcagcgataagaaagtccagaccaagggcaagcggggcgccaaaggcaaacaggccgaggtggccaaccaggagacaaaggaagatctgcctgctgagaacggcgaaaccaagaccgaggaatctccagcttctgacgaggccggagagaaggaggccaaaagcgacagcggctctgagacacctggaacaagcgagagcgccaccccggaatcctacgaacagctggctccccagccctgtgtaggcgagacattacacagcagcctgcccagagacagcgagctgttcgttccggaagagggctctagcgagaaggagagcgaggacgctcctaagaccagccctcctacccctggcaaacacggcctggagcaaacaggcgaggagaaggtcatggtgaccgtgcccgacaagaaccctccctgtccttgctgtggcacaagagtcaacagcgtgctgaacctcatcgagcacctgaaggtgtcccacggcaagagaggcgtgtgcttcagatgcgccaagtgcggcaaggagaacagcaactaccacagcgtcgtgtgccacttcaagaagtgcagaggccctgagaccgagaaggctcccgctggcgaatggatttgcgaggtgtgcaacagagacttcaccaccaagatcggcctgggccagcacaagcggttagctcaccctgctgtgagaaaccaggagagaatcgtggccagccagcccaaggagacaagcaacaggggcgctcacaagagatgctggaccaaggaggaagaggagctgctcatcagactggaggctcagttcgagggccacaagaacatcaataagcttatcgccgagcacatcaccacaaagaccgccaagcagatcagcgacaagaggagactgctgtccagaaagcccgccgaggagcctagaatggaacctggtacatgtcaccacaccagaagagccgccgctagcctgagaaccgagcccgaaatgtctcaccacgctcaggccgaggacagagacaacggccctggcaggagacctcttcccggcagagctgctgctggaggcagaaccatggacgagatcaggagacaccccgataagggcaacggccagcagagacccacaaagcagaagtccgaggaacagctccaggcctactacaagaaaaccctggaggagagactgtccgcgggagctctgaacaccttccctagagccttcaaacaagtcatggagggcagagacatcaagctggtgatcaaccagaccgcccaggactgcttcggctgccttgagtctatcagccagatcaggaccgccacacgggataagaaggacaccgtcaccagagagaagcaccccaagaagcccttccagaaatggatgaagaagagggccatcaagaagggcaattacctgagattccagaggctgttctacctggacagaggcaagctggccaagatcatcctggacgacatcgagtgcctgagctgcgacatccctctgagcgagatctacagcgtgttcaagaccagatgggagaccaccggcagcttcaagtctctgggcgacttcaagacatacggcaaggccgacaacaccgccttcagagagctcatcaccgctaaggagatcgagaagaacgtgcaggagatgagcaagggcagcgctcctggccccgatggaattacactgggcgatgtggtgaagatggaccccgagttcagcagaacaatggagatcttcaacctgtggctcaccacaggcaagatccccgacatggtgagaggctgcagaaccgtgcttatccccaagagcagcaagcccgacagactgaaggatatcaacaactggagacccatcaccatcggcagcatcctgctgcggctgttcagccggattgtgaccgctagactgagcaaagcctgtcccctgaaccccagacagagaggcttcatcagagccgctggctgcagcgagaacctgaagctgctccagacaatcatctggagcgccaagagagagcacagacccctgggcgttgttttcgtggacatcgccaaggccttcgacaccgtgtcccatcagcacattatccacgccctgcagcagagggaggtcgaccctcatattgtgggcctggtgtccaacatgtacgagaacatctccacctatattacgaccaagagaaacacccacacagacaagatccagatccgggtcggcgtcaagcagggcgatcctatgtctcctctgctgttcaacctcgccatggaccctctgctctgcaagctcgaggagtctggaaagggctaccatagaggccaatcatcgatcaccgccatggccttcgccgacgacctggtgcttttaagcgacagctgggagaacatgaacaccaacatctctatcctggagacattctgcaaccttaccggcctgaaaacccagggccagaagtgtcatggcttctacatcaaacccaccaagaagagctacaccatcaacgactgcgccgcctggacaatcaacggcacccctctcaacatgatcgaccccggcgagtctgagaagtacctgggcctgcagttcgatccctggatcggcatcgctagaagcggcttgagcaccaagctggacttttggctccaacgcatagaccaggcccccctgaagcctcttcagaaactggacattttgaaaacttatacgatccccagactcatctacatcgccgaccactccgaggtcaagagcgctctgctggaaaccctggaccagaaaatcagaaccgccgtcaaggaatggctgcacctgcccccttgcacatgcgacgctatcctgtacagcagcaccagggacggcggcttaggaatcaccaagttagccggcctcatccccagcgtgcaggctaggagactccacagaatcgcccagagcagcgacgacaccatgaagtgcttcatggagaaggaaaagatggagcagctgcacaagaagctgtggatccaagcgggcggagatcgtgagaacattcccagcatctgggaggcccctcccagctcagaacctcccaataacgtgtccaccaattctgaatgggaggctcccacccagaaggataagtttcccaagccctgcaactggcggaagaacgagttcaaaaaatggacaaagctggctagccagggcaggggcatcgtgaacttcgaaagggacaagattagcaaccactggatccagtactacagaagaatcccccacagaaagctcctcaccgccctccagttacgtgcaaacgtgtacccaaccagagaattcctggccagaggcagacaggaccagtacatcaaggcctgccggcactgcgatgccgataacgagagctgtgctcacatcatcggcaactgccccgtcacccaggacgccagaatcaagagacacaactacatctgcgagttacttctggaggaagccaagaagaaggattgggttgtgttcaaggagccccacatcagagactccaacaaggagctgtacaagccagacctcatcttcgtgaaggacggcagagccctggtggtggacgtcaccgtcagatacgaggctgctaagtccagccttgaggaggctgccgccgagaaagtgcggaagtacaagcacctggaaacagaggtcagacacctcaccaacgccaaggacgttaccttcgtgggcttccccctaggtgctagaggcaaatggcaccaggacaacttcaagctgcttaccgagctgggcctctccaagagccgacaggttaagatggccgagaccttcagcaccgtcgccctgttctcttctgtggacattgtgcacatgttcgcctccagagccagaaagagcatggtgatgtgataataggctgccttctgcggggcttgccttctggccatgcccttcttctctcccttgcacctgtacctcttggtctttgaataaagcctgagtaggaaggaccggtaaaaaaaaaaaaaaaaaaaaaaaaaaaaaaacgttgactaaaaaaaaaaaaaaaaaaaaaaaaaaaaaaaaaaaaaaaaaaaaaaaaaaaaaaaaaaaaaaaaaaaaaa

SEQ ID NO: 11094 - DNA, 5389 bp, synthetic construct
  source 1..5389: mol_type = other DNA
ggtctagttacaactgggcatcgctgcagagatcgcacctcctcgtggtcccgctggtagcccttcgaagggtgactaagtcgatctctgccccaggtacggagccgttgggactcaccagtccaacgtaactcctgcctaaattcggtgaaacaaattcctcggtaaaaagccccatggcccctaagaaaaagcggaaggtgaatatcagcggctctagctgcggcagccccaacagcgccgacaccagcagcgacttcaaggacctgtggaccaagctgaaggaatgccacgaccgggaagtgcagggactccaggtgaaggtcaccaaactcaagcaagaaagaatcctggacgcccagagactggaagaattcttcaccaagaaccagcagctgagagagcagcagaaagtgctgcacgagacaatcaaggttctggaagatagactgcgggccggcctgtgcgacagatgcgccgtgaccgaggaacacatgcgcaaaaagcagcaggagttcgagaacattagacagcaaaatctgaaattgatcacagagctgatgaacgagagaaacacactgcaggaggagaacaagaagctgagcgagcagctgcaacagaagatcgagaatgatcagcaacaccaggccgctgagctggaatgtgaagaggacgtgatccccgacagcccaatcacagctttcagcttttctggcgtgaacagactgaggcggaaggaaaacccccacgtgcggtacatcgagcagacccataccaagctggaacacagcgtgtgtgccaacgagatgagaaaggtgtccaagtcctccacccatccccagcacaaccctaacgaaaatgagatcctggtggctgatacctacgaccagtctcagagccctatggccaaggcccacggcaccagctcttatacccctgataagagctccttcaacctggccaccgtggtggccgagacactgggcctgggcgtgcaggaggaaagcgagacacagggcccaatgagccctctgggagatgagctgtaccactgcctggaaggcaaccacaagaaacagccttttgagtccggctccgagactcctggaacaagcgagagcgctacacctgagggcagccctaagagaaaggtgtccagcgccgagggcgctgccaaggaagagcctaaacggagaagcgccagactgagcgccaagccccccgccaaggtggaagccaagcctaagaaggccgccgctaaggacaagagcagcgataagaaagtccagaccaagggcaagcggggcgccaaaggcaaacaggccgaggtggccaaccaggagacaaaggaagatctgcctgctgagaacggcgaaaccaagaccgaggaatctccagcttctgacgaggccggagagaaggaggccaaaagcgacagcggctctgagacacctggaacaagcgagagcgccaccccggaatcctacgaacagctggctccccagccctgtgtaggcgagacattacacagcagcctgcccagagacagcgagctgttcgttccggaagagggctctagcgagaaggagagcgaggacgctcctaagaccagccctcctacccctggcaaacacggcctggagcaaacaggcgaggagaaggtcatggtgaccgtgcccgacaagaaccctccctgtccttgctgtggcacaagagtcaacagcgtgctgaacctcatcgagcacctgaaggtgtcccacggcaagagaggcgtgtgcttcagatgcgccaagtgcggcaaggagaacagcaactaccacagcgtcgtgtgccacttcaagaagtgcagaggccctgagaccgagaaggctcccgctggcgaatggatttgcgaggtgtgcaacagagacttcaccaccaagatcggcctgggccagcacaagcggttagctcaccctgctgtgagaaaccaggagagaatcgtggccagccagcccaaggagacaagcaacaggggcgctcacaagagatgctggaccaaggaggaagaggagctgctcatcagactggaggctcagttcgagggcaacaagaacatcaataagcttatcgccgagcacatcaccacaaagaccgccaagcagatcagcgacaagaggagactgctgtccagaaagcccgccgaggagcctagaatggaacctggtacatgtcaccacaccagaagagccgccgctagcctgagaaccgagcccgaaatgtctcaccacgctcaggccgaggacagagacaacggccctggcaggagacctcttcccggcagacccgctgctggaggcagaaccatggacgagatcaggagacaccccgataagggcaacggccagcagagacccacaaagcagaagtccgaggaacagctccaggcctactacaagaaaaccctggaggagagactgtccgcgggagctctgaacaccttccctagagccttcaaacaagtcatggagggcagagacatcaagctggtgatcaaccagaccgcccaggactgcttcggctgccttgagtctatcagccagatcaggaccgccacacgggataagaaggacaccgtcaccagagagaagcaccccaagaagcccttccagaaatggatgaagaagagggccatcaagaagggcaattacctgagattccagaggctgttctacctggacagaggcaagctggccaagatcatcctggacgacatcgagtgcctgagctgcgacatccctctgagcgagatctacagcgtgttcaagaccagatgggagaccaccggcagcttcaagtctctgggcgacttcaagacatacggcaaggccgacaacaccgccttcagagagctcatcaccgctaaggagatcgagaagaacgtgcaggagatgagcaagggcagcgctcctggccccgatggaattacactgggcgatgtggtgaagatggaccccgagttcagcagaacaatggagatcttcaacctgtggctcaccacaggcaagatccccgacatggtgagaggctgcagaaccgtgcttatccccaagagcagcaagcccgacagactgaaggatatcaacaactggagacccatcaccatcggcagcatcctgctgcggctgttcagccggattgtgaccgctagactgagcaaagcctgtcccctgaaccccagacagagaggcttcatcagagccgctggctgcagcgagaacctgaagctgctccagacaatcatctggagcgccaagagagagcacagacccctgggcgttgttttcgtggacatcgccaaggccttcgacaccgtgtcccatcagcacattatccacgccctgcagcagagggaggtcgaccctcatattgtgggcctggtgtccaacatgtacgagaacatctccacctatattacgaccaagagaaacacccacacagacaagatccagatccgggtcggcgtcaagcagggcgatcctatgtctcctctgctgttcaacctcgccatggaccctctgctctgcaagctcgaggagtctggaaagggctaccatagaggccaatcatcgatcaccgccatggccttcgccgacgacctggtgcttttaagcgacagctgggagaacatgaacaccaacatctctatcctggagacattctgcaaccttaccggcctgaaaacccagggccagaagtgtcatggcttctacatcaaacccaccaagaagagctacaccatcaacgactgcgccgcctggacaatcaacggcacccctctcaacatgatcgaccccggcgagtctgagaagtacctgggcctgcagttcgatccctggatcggcatcgctagaagcggcttgagcaccaagctggacttttggctccaacgcatagaccaggcccccctgaagcctcttcagaaactggacattttgaaaacttatacgatccccagactcatctacatcgccgaccactccgaggtcaagagcgctctgctggaaaccctggaccagaaaatcagaaccgccgtcaaggaatggctgcacctgcccccttgcacatgcgacgctatcctgtacagcagcaccagggacggcggcttaggaatcaccaagttagccggcctcatccccagcgtgcaggctaggagactccacagaatcgcccagagcagcgacgacaccatgaagtgcttcatggagaaggaaaagatggagcagctgcacaagaagctgtggatccaagcgggcggagatcgtgagaacattcccagcatctgggaggcccctcccagctcagaacctcccaataacgtgtccaccaattctgaatgggaggctcccacccagaaggataagtttcccaagccctgcaactggcggaagaacgagttcaaaaaatggacaaagctggctagccagggcaggggcatcgtgaacttcgaaagggacaagattagcaaccactggatccagtactacagaagaatcccccacagaaagctcctcaccgccctccagttacgtgcaaacgtgtacccaaccagagaattcctggccagaggcagacaggaccagtacatcaaggcctgccggcactgcgatgccgataacgagagctgtgctcacatcatcggcaactgccccgtcacccaggacgccagaatcaagagacacaactacatctgcgagttacttctggaggaagccaagaagaaggattgggttgtgttcaaggagccccacatcagagactccaacaaggagctgtacaagccagacctcatcttcgtgaaggacggcagagccctggtggtggacgtcaccgtcagatacgaggctgctaagtccagccttgaggaggctgccgccgagaaagtgcggaagtacaagcacctggaaacagaggtcagacacctcaccaacgccaaggacgttaccttcgtgggcttccccctaggtgctagaggcaaatggcaccaggacaacttcaagctgcttaccgagctgggcctctccaagagccgacaggttaagatggccgagaccttcagcaccgtcgccctgttctcttctgtggacattgtgcacatgttcgcctccagagccagaaagagcatggtgatgtgataataggctgccttctgcggggcttgccttctggccatgcccttcttctctcccttgcacctgtacctcttggtctttgaataaagcctgagtaggaaggaccggtaaaaaaaaaaaaaaaaaaaaaaaaaaaaaaacgttgactaaaaaaaaaaaaaaaaaaaaaaaaaaaaaaaaaaaaaaaaaaaaaaaaaaaaaaaaaaaaaaaaaaaaaa

SEQ ID NO: 11095 - DNA, 5389 bp, synthetic construct
  source 1..5389: mol_type = other DNA
ggtctagttacaactgggcatcgctgcagagatcgcacctcctcgtggtcccgctggtagcccttcgaagggtgactaagtcgatctctgccccaggtacggagccgttgggactcaccagtccaacgtaactcctgcctaaattcggtgaaacaaattcctcggtaaaaagccccatggcccctaagaaaaagcggaaggtgaatatcagcggctctagctgcggcagccccaacagcgccgacaccagcagcgacttcaaggacctgtggaccaagctgaaggaatgccacgaccgggaagtgcagggactccaggtgaaggtcaccaaactcaagcaagaaagaatcctggacgcccagagactggaagaattcttcaccaagaaccagcagctgagagagcagcagaaagtgctgcacgagacaatcaaggttctggaagatagactgcgggccggcctgtgcgacagatgcgccgtgaccgaggaacacatgcgcaaaaagcagcaggagttcgagaacattagacagcaaaatctgaaattgatcacagagctgatgaacgagagaaacacactgcaggaggagaacaagaagctgagcgagcagctgcaacagaagatcgagaatgatcagcaacaccaggccgctgagctggaatgtgaagaggacgtgatccccgacagcccaatcacagctttcagcttttctggcgtgaacagactgaggcggaaggaaaacccccacgtgcggtacatcgagcagacccataccaagctggaacacagcgtgtgtgccaacgagatgagaaaggtgtccaagtcctccacccatccccagcacaaccctaacgaaaatgagatcctggtggctgatacctacgaccagtctcagagccctatggccaaggcccacggcaccagctcttatacccctgataagagctccttcaacctggccaccgtggtggccgagacactgggcctgggcgtgcaggaggaaagcgagacacagggcccaatgagccctctgggagatgagctgtaccactgcctggaaggcaaccacaagaaacagccttttgagtccggctccgagactcctggaacaagcgagagcgctacacctgagggcagccctaagagaaaggtgtccagcgccgagggcgctgccaaggaagagcctaaacggagaagcgccagactgagcgccaagccccccgccaaggtggaagccaagcctaagaaggccgccgctaaggacaagagcagcgataagaaagtccagaccaagggcaagcggggcgccaaaggcaaacaggccgaggtggccaaccaggagacaaaggaagatctgcctgctgagaacggcgaaaccaagaccgaggaatctccagcttctgacgaggccggagagaaggaggccaaaagcgacagcggctctgagacacctggaacaagcgagagcgccaccccggaatcctacgaacagctggctccccagccctgtgtaggcgagacattacacagcagcctgcccagagacagcgagctgttcgttccggaagagggctctagcgagaaggagagcgaggacgctcctaagaccagccctcctacccctggcaaacacggcctggagcaaacaggcgaggagaaggtcatggtgaccgtgcccgacaagaaccctccctgtccttgctgtggcacaagagtcaacagcgtgctgaacctcatcgagcacctgaaggtgtcccacggcaagagaggcgtgtgcttcagatgcgccaagtgcggcaaggagaacagcaactaccacagcgtcgtgtgccacttcaagaagtgcagaggccctgagaccgagaaggctcccgctggcgaatggatttgcgaggtgtgcaacagagacttcaccaccaagatcggcctgggccagcacaagcggttagctcaccctgctgtgagaaaccaggagagaatcgtggccagccagcccaaggagacaagcaacaggggcgctcacaagagatgctggaccaaggaggaagaggagctgctcatcagactggaggctcagttcgagggcaacaagaacatcaataagcttatcgccgagcacatcaccacaaagaccgccaagcagatcagcgacaagaggagactgctgtccagaaagcccgccgaggagcctagaatggaacctggtacatgtcaccacaccagaagagccgccgctagcctgagaaccgagcccgaaatgtctcaccacgctcaggccgaggacagagacaacggccctggcaggagacctcttcccggcagagctgctgctggaggcagaaccatggacgagatcaggagacaccccgataagggcaacggccagcagagacccacaaagcagaagtccgaggaacagctccaggcctactacaagaaaaccctggaggagagactgtccgcgggagctctgaacaccttccctagagccttcaaacaagtcatggagggcagagacatcaagctggtgatcaaccagaccgcccaggactgcttcggctgccttgagtctatcagccagatcaggaccgccacacgggataagaaggacaccgtcaccagagagaagcaccccaagagacccttccagaaatggatgaagaagagggccatcaagaagggcaattacctgagattccagaggctgttctacctggacagaggcaagctggccaagatcatcctggacgacatcgagtgcctgagctgcgacatccctctgagcgagatctacagcgtgttcaagaccagatgggagaccaccggcagcttcaagtctctgggcgacttcaagacatacggcaaggccgacaacaccgccttcagagagctcatcaccgctaaggagatcgagaagaacgtgcaggagatgagcaagggcagcgctcctggccccgatggaattacactgggcgatgtggtgaagatggaccccgagttcagcagaacaatggagatcttcaacctgtggctcaccacaggcaagatccccgacatggtgagaggctgcagaaccgtgcttatccccaagagcagcaagcccgacagactgaaggatatcaacaactggagacccatcaccatcggcagcatcctgctgcggctgttcagccggattgtgaccgctagactgagcaaagcctgtcccctgaaccccagacagagaggcttcatcagagccgctggctgcagcgagaacctgaagctgctccagacaatcatctggagcgccaagagagagcacagacccctgggcgttgttttcgtggacatcgccaaggccttcgacaccgtgtcccatcagcacattatccacgccctgcagcagagggaggtcgaccctcatattgtgggcctggtgtccaacatgtacgagaacatctccacctatattacgaccaagagaaacacccacacagacaagatccagatccgggtcggcgtcaagcagggcgatcctatgtctcctctgctgttcaacctcgccatggaccctctgctctgcaagctcgaggagtctggaaagggctaccatagaggccaatcatcgatcaccgccatggccttcgccgacgacctggtgcttttaagcgacagctgggagaacatgaacaccaacatctctatcctggagacattctgcaaccttaccggcctgaaaacccagggccagaagtgtcatggcttctacatcaaacccaccaagaagagctacaccatcaacgactgcgccgcctggacaatcaacggcacccctctcaacatgatcgaccccggcgagtctgagaagtacctgggcctgcagttcgatccctggatcggcatcgctagaagcggcttgagcaccaagctggacttttggctccaacgcatagaccaggcccccctgaagcctcttcagaaactggacattttgaaaacttatacgatccccagactcatctacatcgccgaccactccgaggtcaagagcgctctgctggaaaccctggaccagaaaatcagaaccgccgtcaaggaatggctgcacctgcccccttgcacatgcgacgctatcctgtacagcagcaccagggacggcggcttaggaatcaccaagttagccggcctcatccccagcgtgcaggctaggagactccacagaatcgcccagagcagcgacgacaccatgaagtgcttcatggagaaggaaagaatggagcagctgcacaagaagctgtggatccaagcgggcggagatcgtgagaacattcccagcatctgggaggcccctcccagctcagaacctcccaataacgtgtccaccaattctgaatgggaggctcccacccagaaggataagtttcccaagccctgcaactggcggaagaacgagttcaaaaaatggacaaagctggctagccagggcaggggcatcgtgaacttcgaaagggacaagattagcaaccactggatccagtactacagaagaatcccccacagaaagctcctcaccgccctccagttacgtgcaaacgtgtacccaaccagagaattcctggccagaggcagacaggaccagtacatcaaggcctgccggcactgcgatgccgataacgagagctgtgctcacatcatcggcaactgccccgtcacccaggacgccagaatcaagagacacaactacatctgcgagttacttctggaggaagccaagaagaaggattgggttgtgttcaaggagccccacatcagagactccaacaaggagctgtacaagccagacctcatcttcgtgaaggacggcagagccctggtggtggacgtcaccgtcagatacgaggctgctaagtccagccttgaggaggctgccgccgagaaagtgcggaagtacaagcacctggaaacagaggtcagacacctcaccaacgccaaggacgttaccttcgtgggcttccccctaggtgctagaggcaaatggcaccaggacaacttcaagctgcttaccgagctgggcctctccaagagccgacaggttaagatggccgagaccttcagcaccgtcgccctgttctcttctgtggacattgtgcacatgttcgcctccagagccagaaagagcatggtgatgtgataataggctgccttctgcggggcttgccttctggccatgcccttcttctctcccttgcacctgtacctcttggtctttgaataaagcctgagtaggaaggaccggtaaaaaaaaaaaaaaaaaaaaaaaaaaaaaaacgttgactaaaaaaaaaaaaaaaaaaaaaaaaaaaaaaaaaaaaaaaaaaaaaaaaaaaaaaaaaaaaaaaaaaaaaa

SEQ ID NO: 11096 - DNA, 5389 bp, synthetic construct
  source 1..5389: mol_type = other DNA
ggtctagttacaactgggcatcgctgcagagatcgcacctcctcgtggtcccgctggtagcccttcgaagggtgactaagtcgatctctgccccaggtacggagccgttgggactcaccagtccaacgtaactcctgcctaaattcggtgaaacaaattcctcggtaaaaagccccatggcccctaagaaaaagcggaaggtgaatatcagcggctctagctgcggcagccccaacagcgccgacaccagcagcgacttcaaggacctgtggaccaagctgaaggaatgccacgaccgggaagtgcagggactccaggtgaaggtcaccaaactcaagcaagaaagaatcctggacgcccagagactggaagaattcttcaccaagaaccagcagctgagagagcagcagaaagtgctgcacgagacaatcaaggttctggaagatagactgcgggccggcctgtgcgacagatgcgccgtgaccgaggaacacatgcgcaaaaagcagcaggagttcgagaacattagacagcaaaatctgaaattgatcacagagctgatgaacgagagaaacacactgcaggaggagaacaagaagctgagcgagcagctgcaacagaagatcgagaatgatcagcaacaccaggccgctgagctggaatgtgaagaggacgtgatccccgacagcccaatcacagctttcagcttttctggcgtgaacagactgaggcggaaggaaaacccccacgtgcggtacatcgagcagacccataccaagctggaacacagcgtgtgtgccaacgagatgagaaaggtgtccaagtcctccacccatccccagcacaaccctaacgaaaatgagatcctggtggctgatacctacgaccagtctcagagccctatggccaaggcccacggcaccagctcttatacccctgataagagctccttcaacctggccaccgtggtggccgagacactgggcctgggcgtgcaggaggaaagcgagacacagggcccaatgagccctctgggagatgagctgtaccactgcctggaaggcaaccacaagaaacagccttttgagtccggctccgagactcctggaacaagcgagagcgctacacctgagggcagccctaagagaaaggtgtccagcgccgagggcgctgccaaggaagagcctaaacggagaagcgccagactgagcgccaagccccccgccaaggtggaagccaagcctaagaaggccgccgctaaggacaagagcagcgataagaaagtccagaccaagggcaagcggggcgccaaaggcaaacaggccgaggtggccaaccaggagacaaaggaagatctgcctgctgagaacggcgaaaccaagaccgaggaatctccagcttctgacgaggccggagagaaggaggccaaaagcgacagcggctctgagacacctggaacaagcgagagcgccaccccggaatcctacgaacagctggctccccagccctgtgtaggcgagacattacacagcagcctgcccagagacagcgagctgttcgttccggaagagggctctagcgagaaggagagcgaggacgctcctaagaccagccctcctacccctggcaaacacggcctggagcaaacaggcgaggagaaggtcatggtgaccgtgcccgacaagaaccctccctgtccttgctgtggcacaagagtcaacagcgtgctgaacctcatcgagcacctgaaggtgtcccacggcaagagaggcgtgtgcttcagatgcgccaagtgcggcaaggagaacagcaactaccacagcgtcgtgtgccacttcaagaagtgcagaggccctgagaccgagaaggctcccgctggcgaatggatttgcgaggtgtgcaacagagacttcaccaccaagatcggcctgggccagcacaagcggttagctcaccctgctgtgagaaaccaggagagaatcgtggccagccagcccaaggagacaagcaacaggggcgctcacaagagatgctggaccaaggaggaagaggagctgctcatcagactggaggctcagttcgagggcaacaagaacatcaataagcttatcgccgagcacatcaccacaaagaccgccaagcagatcagcgacaagaggagactgctgtccagaaagcccgccgaggagcctagaatggaacctggtacatgtcaccacaccagaagagccgccgctagcctgagaaccgagcccgaaatgtctcaccacgctcaggccgaggacagagacaacggccctggcaggagacctcttcccggcagagctgctgctggaggcagaaccatggacgagatcaggagacaccccgataagggcaacggccagcagagacccacaaagcagaagtccgaggaacagctccaggcctactacaagaaaaccctggaggagagactgtccgcgggagctctgaacaccttccctagagccttcaaacaagtcatggagggcagagacatcaagctggtgatcaaccagaccgcccaggactgcttcggctgccttgagtctatcagccagatcaggaccgccacacgggataagaaggacaccgtcaccagagagaagcaccccaagaagcccttccagaaatggatgaagaagagggccatcaagaagggcaattacctgagattccagaggctgttctacctggacagaggcaagctggccaagatcatcctggacgacatcgagtgcctgagctgcgacatccctctgagcgagatctacagcgtgttcaagaccagatgggagaccaccggcagcttcaagtctctgggcgacttcaagacatacggcaaggccgacaacaccgccttcagagagctcatcaccgctaaggagatcgagaagaacgtgcaggagatgagcaagggcagcgctcctggccccgatggaattacactgggcgatgtggtgaagatggaccccgagttcagcagaacaatggagatcttcaacctgtggctcaccacaggcaagatccccgacatggtgagaggctgcagaaccgtgcttatccccaagagcagcaagcccgacagactgaaggatatcaacaactggagacccatcaccatcggcagcatcctgctgcggctgttcagccggattgtgaccgctagactgagcaaagcctgtcccctgaaccccagacagagaggcttcatcagagccgctggctgcagcgagaacctgaagctgctccagacaatcatctggagcgccaagagagagcacagacccctgggcgttgttttcgtggacatcgccaaggccttcgacaccgtgtcccatcagcacattatccacgccctgcagcagagggaggtcgaccctcatattgtgggcctggtgtccaacatgtacgagaacatctccacctatattacgaccaagagaaacacccacacagacaagatccagatccgggtcggcgtcaagcagggcgatcctatgtctcctctgctgttcaacctcgccatggaccctctgctctgcaagctcgaggagtctggaaagggctaccatagaggccaatcatcgatcaccgccatggccttcgccgacgacctggtgcttttaagcgacagctgggagaacatgaacaccaacatctctatcctggagacattctgcaaccttaccggcctgaaaacccagggccagaagtgtcatggcttctacatcaaacccaccaagaagagctacaccatcaacgactgcgccgcctggacaatcaacggcacccctctcaacatgatcgaccccggcgagtctgagaagtacctgggcctgcagttcgatccctggatcggcatcgctagaagcggcttgagcaccaagctggacttttggctccaacgcatagaccaggcccccctgaagcctcttcagaaactggacattttgaaaacttatacgatccccagactcatctacatcgccgaccactccgaggtcaagagcgctctgctggaaaccctggaccagaaaatcagaaccgccgtcaaggaatggctgcacctgcccccttgcacatgcgacgctatcctgtacagcagcaccagggacggcggcttaggaatcaccaagttagccggcctcatccccagcgtgcaggctaggagactccacagaatcgcccagagcagcgacgacaccatgaagtgcttcatggagaaggaaaagatggagcagctgcacaagaagctgtggatccaagcgggcggagatcgtgagaacattcccagcatctgggaggcccctcccagctcagaacctcccaataacgtgtccaccaattctgaatgggaggctcccacccagaaggataagtttcccaagccctgcaactggcggaagaacgagttcaaaaaatggacaaagctggctagccagggcaggggcatcgtgaacttcgaaagggacaagattagcaaccactggatccagtactacagaagaatcccccacagaaagctcctcaccgccctccagttacgtgcaaacgtgtacccaaccagagaattcctggccagaggcagacaggaccagtacatcaaggcctgccggcactgcgatgccgataacgagagctgtgctcacatcatcggcaactgccccgtcacccaggacgccagaatcaagagacacaactacatctgcgagttacttctggaggaagccaagaagaaggattgggttgtgttcaaggagccccacatcagagactccaacaaggagctgtacaagccagacctcatcttcgtgaaggacggcagagccctggtggtggacgtcaccgtcagatacgaggctgctaagtccagccttgaggaggctgccgccgagaaagtgcggaaggccaagcacctggaaacagaggtcagacacctcaccaacgccaaggacgttaccttcgtgggcttccccctaggtgctagaggcaaatggcaccaggacaacttcaagctgcttaccgagctgggcctctccaagagccgacaggttaagatggccgagaccttcagcaccgtcgccctgttctcttctgtggacattgtgcacatgttcgcctccagagccagaaagagcatggtgatgtgataataggctgccttctgcggggcttgccttctggccatgcccttcttctctcccttgcacctgtacctcttggtctttgaataaagcctgagtaggaaggaccggtaaaaaaaaaaaaaaaaaaaaaaaaaaaaaaacgttgactaaaaaaaaaaaaaaaaaaaaaaaaaaaaaaaaaaaaaaaaaaaaaaaaaaaaaaaaaaaaaaaaaaaaaa

SEQ ID NO: 11097 - DNA, 5389 bp, synthetic construct
  source 1..5389: mol_type = other DNA
ggtctagttacaactgggcatcgctgcagagatcgcacctcctcgtggtcccgctggtagcccttcgaagggtgactaagtcgatctctgccccaggtacggagccgttgggactcaccagtccaacgtaactcctgcctaaattcggtgaaacaaattcctcggtaaaaagccccatggcccctaagaaaaagcggaaggtgaatatcagcggctctagctgcggcagccccaacagcgccgacaccagcagcgacttcaaggacctgtggaccaagctgaaggaatgccacgaccgggaagtgcagggactccaggtgaaggtcaccaaactcaagcaagaaagaatcctggacgcccagagactggaagaattcttcaccaagaaccagcagctgagagagcagcagaaagtgctgcacgagacaatcaaggttctggaagatagactgcgggccggcctgtgcgacagatgcgccgtgaccgaggaacacatgcgcaaaaagcagcaggagttcgagaacattagacagcaaaatctgaaattgatcacagagctgatgaacgagagaaacacactgcaggaggagaacaagaagctgagcgagcagctgcaacagaagatcgagaatgatcagcaacaccaggccgctgagctggaatgtgaagaggacgtgatccccgacagcccaatcacagctttcagcttttctggcgtgaacagactgaggcggaaggaaaacccccacgtgcggtacatcgagcagacccataccaagctggaacacagcgtgtgtgccaacgagatgagaaaggtgtccaagtcctccacccatccccagcacaaccctaacgaaaatgagatcctggtggctgatacctacgaccagtctcagagccctatggccaaggcccacggcaccagctcttatacccctgataagagctccttcaacctggccaccgtggtggccgagacactgggcctgggcgtgcaggaggaaagcgagacacagggcccaatgagccctctgggagatgagctgtaccactgcctggaaggcaaccacaagaaacagccttttgagtccggctccgagactcctggaacaagcgagagcgctacacctgagggcagccctaagagaaaggtgtccagcgccgagggcgctgccaaggaagagcctaaacggagaagcgccagactgagcgccaagccccccgccaaggtggaagccaagcctaagaaggccgccgctaaggacaagagcagcgataagaaagtccagaccaagggcaagcggggcgccaaaggcaaacaggccgaggtggccaaccaggagacaaaggaagatctgcctgctgagaacggcgaaaccaagaccgaggaatctccagcttctgacgaggccggagagaaggaggccaaaagcgacagcggctctgagacacctggaacaagcgagagcgccaccccggaatcctacgaacagctggctccccagccctgtgtaggcgagacattacacagcagcctgcccagagacagcgagctgttcgttccggaagagggctctagcgagaaggagagcgaggacgctcctaagaccagccctcctacccctggcaaacacggcctggagcaaacaggcgaggagaaggtcatggtgaccgtgcccgacaagaaccctccctgtccttgctgtggcacaagagtcaacagcgtgctgaacctcatcgagcacctgaaggtgtcccacggcaagagaggcgtgtgcttcagatgcgccaagtgcggcaaggagaacagcaactaccacagcgtcgtgtgccacttcaagaagtgcagaggccctgagaccgagaaggctcccgctggcgaatggatttgcgaggtgtgcaacagagacttcaccaccaagatcggcctgggccagcacaagcggttagctcaccctgctgtgagaaaccaggagagaatcgtggccagccagcccaaggagacaagcaacaggggcgctcacaagagatgctggaccaaggaggaagaggagctgctcatcagactggaggctcagttcgagggcaacaagaacatcaataagcttatcgccgagcacatcaccacaaagaccgccaagcagatcagcgacaagaggagactgctgtccagaaagcccgccgaggagcctagaatggaacctggtacatgtcaccacaccagaagagccgccgctagcctgagaaccgagcccgaaatgtctcaccacgctcaggccgaggacagagacaacggccctggcaggagacctcttcccggcagagctgctgctggaggcagaaccatggacgagatcaggagacaccccgataagggcaacggccagcagagacccacaaagcagaagtccgaggaacagctccaggcctactacaagaaaaccctggaggagagactgtccgcgggagctctgaacaccttccctagagccttcaaacaagtcatggagggcagagacatcaagctggtgatcaaccagaccgcccaggactgcttcggctgccttgagtctatcagccagatcaggaccgccacacgggataagaaggacaccgtcaccagagagaagcaccccaagaagcccttccagaaatggatgaagaagagggccatcaagaagggcaattacctgagattccagaggctgttctacctggacagaggcaagctggccaagatcatcctggacgacatcgagtgcctgagctgcgacatccctctgagcgagatctacagcgtgttcaagaccagatgggagaccaccggcagcttcaagtctctgggcgacttcaagacatacggcaaggccgacaacaccgccttcagagagctcatcaccgctaaggagatcgagaagaacgtgcaggagatgagcaagggcagcgctcctggccccgatggaattacactgggcgatgtggtgaagatggaccccgagttcagcagaacaatggagatcttcaacctgtggctcaccacaggcaagatccccgacatggtgagaggctgcagaaccgtgcttatccccaagagcagcaagcccgacagactgaaggatatcaacaactggagacccatcaccatcggcagcatcctgctgcggctgttcagccggattgtgaccgctagactgagcaaagcctgtcccctgaaccccagacagagaggcttcatcagagccgctggctgcagcgagaacctgaagctgctccagacaatcatctggagcgccaagagagagcacagacccctgggcgttgttttcgtggacatcgccaaggccttcgacaccgtgtcccatcagcacattatccacgccctgcagcagagggaggtcgaccctcatattgtgggcctggtgtccaacatgtacgagaacatctccacctatattacgaccaagagaaacacccacacagacaagatccagatccgggtcggcgtcaagcagggcgatcctatgtctcctctgctgttcaacctcgccatggaccctctgctctgcaagctcgaggagtctggaaagggctaccatagaggccaatcatcgatcaccgccatggccttcgccgacgacctggtgcttttaagcgacagctgggagaacatgaacaccaacatctctatcctggagacattctgcaaccttaccggcctgaaaacccagggccagaagtgtcatggcttctacatcaaacccaccaagaagagctacaccatcaacgactgcgccgcctggacaatcaacggcacccctctcaacatgatcgaccccggcgagtctgagaagtacctgggcctgcagttcgatccctggatcggcatcgctagaagcggcttgagcaccaagctggacttttggctccaacgcatagaccaggcccccctgaagcctcttcagaaactggacattttgaaaacttatacgatccccagactcatctacatcgccgaccactccgaggtcaagagcgctctgctggaaaccctggaccagaaaatcagaaccgccgtcaaggaatggctgcacctgcccccttgcacatgcgacgctatcctgtacagcagcaccagggacggcggcttaggaatcaccaagttagccggcctcatccccagcgtgcaggctaggagactccacagaatcgcccagagcagcgacgacaccatgaagtgcttcatggagaaggaaaagatggagcagctgcacaagaagctgtggatccaagcgggcggagatcgtgagaacattcccagcatctgggaggcccctcccagctcagaacctcccaataacgtgtccaccaattctgaatgggaggctcccacccagaaggataagtttcccaagccctgcaactggcggaagaacgagttcaaaaaatggacaaagctggctagccagggcaggggcatcgtgaacttcgaaagggacaagattagcaaccactggatccagtactacagaagaatcccccacagaaagctcctcaccgccctccagttacgtgcaaacgtgtacccaaccagagaattcctggccagaggcagacaggaccagtacatcaaggcctgccggcactgcgatgccgataacgagagctgtgctcacatcatcggcaactgccccgtcacccaggacgccagaatcaagagacacaactacatctgcgagttacttctggaggaagccaagaagaaggattgggttgtgttcaaggagccccacatcagagactccaacaaggagctgtacaagccagacctcatcttcgtgaaggacggcagagccctggtggtggacgtcaccgtcagatacgaggctgctaagtccagccttgaggaggctgccgccgagaaagtgcggaaggccaagcacctggaaacagaggtcagacacctcaccaacgccaaggacgttaccttcgtgggcttccccctaggtgctgccggcaaatggcaccaggacaacttcaagctgcttaccgagctgggcctctccaagagccgacaggttaagatggccgagaccttcagcaccgtcgccctgttctcttctgtggacattgtgcacatgttcgcctccagagccagaaagagcatggtgatgtgataataggctgccttctgcggggcttgccttctggccatgcccttcttctctcccttgcacctgtacctcttggtctttgaataaagcctgagtaggaaggaccggtaaaaaaaaaaaaaaaaaaaaaaaaaaaaaaacgttgactaaaaaaaaaaaaaaaaaaaaaaaaaaaaaaaaaaaaaaaaaaaaaaaaaaaaaaaaaaaaaaaaaaaaaa

SEQ ID NO: 11098 - DNA, 5389 bp, synthetic construct
  source 1..5389: mol_type = other DNA
ggtctagttacaactgggcatcgctgcagagatcgcacctcctcgtggtcccgctggtagcccttcgaagggtgactaagtcgatctctgccccaggtacggagccgttgggactcaccagtccaacgtaactcctgcctaaattcggtgaaacaaattcctcggtaaaaagccccatggcccctaagaaaaagcggaaggtgaatatcagcggctctagctgcggcagccccaacagcgccgacaccagcagcgacttcaaggacctgtggaccaagctgaaggaatgccacgaccgggaagtgcagggactccaggtgaaggtcaccaaactcaagcaagaaagaatcctggacgcccagagactggaagaattcttcaccaagaaccagcagctgagagagcagcagaaagtgctgcacgagacaatcaaggttctggaagatagactgcgggccggcctgtgcgacagatgcgccgtgaccgaggaacacatgcgcaaaaagcagcaggagttcgagaacattagacagcaaaatctgaaattgatcacagagctgatgaacgagagaaacacactgcaggaggagaacaagaagctgagcgagcagctgcaacagaagatcgagaatgatcagcaacaccaggccgctgagctggaatgtgaagaggacgtgatccccgacagcccaatcacagctttcagcttttctggcgtgaacagactgaggcggaaggaaaacccccacgtgcggtacatcgagcagacccataccaagctggaacacagcgtgtgtgccaacgagatgagaaaggtgtccaagtcctccacccatccccagcacaaccctaacgaaaatgagatcctggtggctgatacctacgaccagtctcagagccctatggccaaggcccacggcaccagctcttatacccctgataagagctccttcaacctggccaccgtggtggccgagacactgggcctgggcgtgcaggaggaaagcgagacacagggcccaatgagccctctgggagatgagctgtaccactgcctggaaggcaaccacaagaaacagccttttgagtccggctccgagactcctggaacaagcgagagcgctacacctgagggcagccctaagagaaaggtgtccagcgccgagggcgctgccaaggaagagcctaaacggagaagcgccagactgagcgccaagccccccgccaaggtggaagccaagcctaagaaggccgccgctaaggacaagagcagcgataagaaagtccagaccaagggcaagcggggcgccaaaggcaaacaggccgaggtggccaaccaggagacaaaggaagatctgcctgctgagaacggcgaaaccaagaccgaggaatctccagcttctgacgaggccggagagaaggaggccaaaagcgacagcggctctgagacacctggaacaagcgagagcgccaccccggaatcctacgaacagctggctccccagccctgtgtaggcgagacattacacagcagcctgcccagagacagcgagctgttcgttccggaagagggctctagcgagaaggagagcgaggacgctcctaagaccagccctcctacccctggcaaacacggcctggagcaaacaggcgaggagaaggtcatggtgaccgtgcccgacaagaaccctccctgtccttgctgtggcacaagagtcaacagcgtgctgaacctcatcgagcacctgaaggtgtcccacggcaagagaggcgtgtgcttcagatgcgccaagtgcggcaaggagaacagcaactaccacagcgtcgtgtgccacttcaagaagtgcagaggccctgagaccgagaaggctcccgctggcgaatggatttgcgaggtgtgcaacagagacttcaccaccaagatcggcctgggccagcacaagcggttagctcaccctgctgtgagaaaccaggagagaatcgtggccagccagcccaaggagacaagcaacaggggcgctcacaagagatgctggaccaaggaggaagaggagctgctcatcagactggaggctcagttcgagggcaacaagaacatcaataagcttatcgccgagcacatcaccacaaagaccgccaagcagatcagcgacaagaggagactgctgtccagaaagcccgccgaggagcctagaatggaacctggtacatgtcaccacaccagaagagccgccgctagcctgagaaccgagcccgaaatgtctcaccacgctcaggccgaggacagagacaacggccctggcaggagacctcttcccggcagagctgctgctggaggcagaaccatggacgagatcaggagacaccccgataagggcaacggccagcagagacccacaaagcagaagtccgaggaacagctccaggcctactacaagaaaaccctggaggagagactgtccgcgggagctctgaacaccttccctagagccttcaaacaagtcatggagggcagagacatcaagctggtgatcaaccagaccgcccaggactgcttcggctgccttgagtctatcagccagatcaggaccgccacacgggataagaaggacaccgtcaccagagagaagcaccccaagaagcccttccagaaatggatgaagaagagggccatcaagaagggcaattacctgagattccagaggctgttctacctggacagaggcaagctggccaagatcatcctggacgacatcgagtgcctgagctgcgacatccctctgagcgagatctacagcgtgttcaagaccagatgggagaccaccggcagcttcaagtctctgggcgacttcaagacatacggcaaggccgacaacaccgccttcagagagctcatcaccgctaaggagatcgagaagaacgtgcaggagatgagcaagggcagcgctcctggccccgatggaattacactgggcgatgtggtgaagatggaccccgagttcagcagaacaatggagatcttcaacctgtggctcaccacaggcaagatccccgacatggtgagaggctgcagaaccgtgcttatccccaagagcagcaagcccgacagactgaaggatatcaacaactggagacccatcaccatcggcagcatcctgctgcggctgttcagccggattgtgaccgctagactgagcaaagcctgtcccctgaaccccagacagagaggcttcatcagagccgctggctgcagcgagaacctgaagctgctccagacaatcatctggagcgccaagagagagcacagacccctgggcgttgttttcgtggacatcgccaaggccttcgacaccgtgtcccatcagcacattatccacgccctgcagcagagggaggtcgaccctcatattgtgggcctggtgtccaacatgtacgagaacatctccacctatattacgaccaagagaaacacccacacagacaagatccagatccgggtcggcgtcaagcagggcgatcctatgtctcctctgctgttcaacctcgccatggaccctctgctctgcaagctcgaggagtctggaaagggctaccatagaggccaatcatcgatcaccgccatggccttcgccgacgacctggtgcttttaagcgacagctgggagaacatgaacaccaacatctctatcctggagacattctgcaaccttaccggcctgaaaacccagggccagaagtgtcatggcttctacatcaaacccaccaagaagagctacaccatcaacgactgcgccgcctggacaatcaacggcacccctctcaacatgatcgaccccggcgagtctgagaagtacctgggcctgcagttcgatccctggatcggcatcgctagaagcggcttgagcaccaagctggacttttggctccaacgcatagaccaggcccccctgaagcctcttcagaaactggacattttgaaaacttatacgatccccagactcatctacatcgccgaccactccgaggtcaagagcgctctgctggaaaccctggaccagaaaatcagaaccgccgtcaaggaatggctgcacctgcccccttgcacatgcgacgctatcctgtacagcagcaccagggacggcggcttaggaatcaccaagttagccggcctcatccccagcgtgcaggctaggagactccacagaatcgcccagagcagcgacgacaccatgaagtgcttcatggagaaggaaaagatggagcagctgcacaagaagctgtggatccaagcgggcggagatcgtgagaacattcccagcatctgggaggcccctcccagctcagaacctcccaataacgtgtccaccaattctgaatgggaggctcccacccagaaggataagtttcccaagccctgcaactggcggaagaacgagttcaaaaaatggacaaagctggctagccagggcaggggcatcgtgaacttcgaaagggacaagattagcaaccactggatccagtactacagaagaatcccccacagaaagctcctcaccgccctccagttacgtgcaaacgtgtacccaaccagagaattcctggccagaggcagacaggaccagtacatcaaggcctgccggcactgcgatgccgataacgagagctgtgctcacatcatcggcaactgccccgtcacccaggacgccagaatcaagagagccaactacatctgcgagttacttctggaggaagccaagaagaaggattgggttgtgttcaaggagccccacatcagagactccaacaaggagctgtacaagccagacctcatcttcgtgaaggacggcagagccctggtggtggacgtcaccgtcagatacgaggctgctaagtccagccttgaggaggctgccgccgagaaagtgcggaaggccaagcacctggaaacagaggtcagacacctcaccaacgccaaggacgttaccttcgtgggcttccccctaggtgctgccggcaaatggcaccaggacaacttcaagctgcttaccgagctgggcctctccaagagccgacaggttaagatggccgagaccttcagcaccgtcgccctgttctcttctgtggacattgtgcacatgttcgcctccagagccagaaagagcatggtgatgtgataataggctgccttctgcggggcttgccttctggccatgcccttcttctctcccttgcacctgtacctcttggtctttgaataaagcctgagtaggaaggaccggtaaaaaaaaaaaaaaaaaaaaaaaaaaaaaaacgttgactaaaaaaaaaaaaaaaaaaaaaaaaaaaaaaaaaaaaaaaaaaaaaaaaaaaaaaaaaaaaaaaaaaaaaa

SEQ ID NO: 11099 - DNA, 5389 bp, synthetic construct
  source 1..5389: mol_type = other DNA
ggtctagttacaactgggcatcgctgcagagatcgcacctcctcgtggtcccgctggtagcccttcgaagggtgactaagtcgatctctgccccaggtacggagccgttgggactcaccagtccaacgtaactcctgcctaaattcggtgaaacaaattcctcggtaaaaagccccatggcccctaagaaaaagcggaaggtgaatatcagcggctctagctgcggcagccccaacagcgccgacaccagcagcgacttcaaggacctgtggaccaagctgaaggaatgccacgaccgggaagtgcagggactccaggtgaaggtcaccaaactcaagcaagaaagaatcctggacgcccagagactggaagaattcttcaccaagaaccagcagctgagagagcagcagaaagtgctgcacgagacaatcaaggttctggaagatagactgcgggccggcctgtgcgacagatgcgccgtgaccgaggaacacatgcgcaaaaagcagcaggagttcgagaacattagacagcaaaatctgaaattgatcacagagctgatgaacgagagaaacacactgcaggaggagaacaagaagctgagcgagcagctgcaacagaagatcgagaatgatcagcaacaccaggccgctgagctggaatgtgaagaggacgtgatccccgacagcccaatcacagctttcagcttttctggcgtgaacagactgaggcggaaggaaaacccccacgtgcggtacatcgagcagacccataccaagctggaacacagcgtgtgtgccaacgagatgagaaaggtgtccaagtcctccacccatccccagcacaaccctaacgaaaatgagatcctggtggctgatacctacgaccagtctcagagccctatggccaaggcccacggcaccagctcttatacccctgataagagctccttcaacctggccaccgtggtggccgagacactgggcctgggcgtgcaggaggaaagcgagacacagggcccaatgagccctctgggagatgagctgtaccactgcctggaaggcaaccacaagaaacagccttttgagtccggctccgagactcctggaacaagcgagagcgctacacctgagggcagccctaagagaaaggtgtccagcgccgagggcgctgccaaggaagagcctaaacggagaagcgccagactgagcgccaagccccccgccaaggtggaagccaagcctaagaaggccgccgctaaggacaagagcagcgataagaaagtccagaccaagggcaagcggggcgccaaaggcaaacaggccgaggtggccaaccaggagacaaaggaagatctgcctgctgagaacggcgaaaccaagaccgaggaatctccagcttctgacgaggccggagagaaggaggccaaaagcgacagcggctctgagacacctggaacaagcgagagcgccaccccggaatcctacgaacagctggctccccagccctgtgtaggcgagacattacacagcagcctgcccagagacagcgagctgttcgttccggaagagggctctagcgagaaggagagcgaggacgctcctaagaccagccctcctacccctggcaaacacggcctggagcaaacaggcgaggagaaggtcatggtgaccgtgcccgacaagaaccctccctgtccttgctgtggcacaagagtcaacagcgtgctgaacctcatcgagcacctgaaggtgtcccacggcaagagaggcgtgtgcttcagatgcgccaagtgcggcaaggagaacagcaactaccacagcgtcgtgtgccacttcaagaagtgcagaggccctgagaccgagaaggctcccgctggcgaatggatttgcgaggtgtgcaacagagacttcaccaccaagatcggcctgggccagcacaagcggttagctcaccctgctgtgagaaaccaggagagaatcgtggccagccagcccaaggagacaagcaacaggggcgctcacaagagatgctggaccaaggaggaagaggagctgctcatcagactggaggctcagttcgagggcaacaagaacatcaataagcttatcgccgagcacatcaccacaaagaccgccaagcagatcagcgacaagaggagactgctgtccagaaagcccgccgaggagcctagaatggaacctggtacatgtcaccacaccagaagagccgccgctagcctgagaaccgagcccgaaatgtctcaccacgctcaggccgaggacagagacaacggccctggcaggagacctcttcccggcagagctgctgctggaggcagaaccatggacgagatcaggagacaccccgataagggcaacggccagcagagacccacaaagcagaagtccgaggaacagctccaggcctactacaagaaaaccctggaggagagactgtccgcgggagctctgaacaccttccctagagccttcaaacaagtcatggagggcagagacatcaagctggtgatcaaccagaccgcccaggactgcttcggctgccttgagtctatcagccagatcaggaccgccacacgggataagaaggacaccgtcaccagagagaagcaccccaagaagcccttccagaaatggatgaagaagagggccatcaagaagggcaattacctgagattccagaggctgttctacctggacagaggcaagctggccaagatcatcctggacgacatcgagtgcctgagctgcgacatccctctgagcgagatctacagcgtgttcaagaccagatgggagaccaccggcagcttcaagtctctgggcgacttcaagacatacggcaaggccgacaacaccgccttcagagagctcatcaccgctaaggagatcgagaagaacgtgcaggagatgagcaagggcagcgctcctggccccgatggaattacactgggcgatgtggtgaagatggaccccgagttcagcagaacaatggagatcttcaacctgtggctcaccacaggcaagatccccgacatggtgagaggctgcagaaccgtgcttatccccaagagcagcaagcccgacagactgaaggatatcaacaactggagacccatcaccatcggcagcatcctgctgcggctgttcagccggattgtgaccgctagactgagcaaagcctgtcccctgaaccccagacagagaggcttcatcagagccgctggctgcagcgagaacctgaagctgctccagacaatcatctggagcgccaagagagagcacagacccctgggcgttgttttcgtggacatcgccaaggccttcgacaccgtgtcccatcagcacattatccacgccctgcagcagagggaggtcgaccctcatattgtgggcctggtgtccaacatgtacgagaacatctccacctatattacgaccaagagaaacacccacacagacaagatccagatccgggtcggcgtcaagcagggcgatcctatgtctcctctgctgttcaacctcgccatggaccctctgctctgcaagctcgaggagtctggaaagggctaccatagaggccaatcatcgatcaccgccatggccttcgccgacgacctggtgcttttaagcgacagctgggagaacatgaacaccaacatctctatcctggagacattctgcaaccttaccggcctgaaaacccagggccagaagtgtcatggcttctacatcaaacccaccaagaagagctacaccatcaacgactgcgccgcctggacaatcaacggcacccctctcaacatgatcgaccccggcgagtctgagaagtacctgggcctgcagttcgatccctggatcggcatcgctagaagcggcttgagcaccaagctggacttttggctccaacgcatagaccaggcccccctgaagcctcttcagaaactggacattttgaaaacttatacgatccccagactcatctacatcgccgaccactccgaggtcaagagcgctctgctggaaaccctggaccagaaaatcagaaccgccgtcaaggaatggctgcacctgcccccttgcacatgcgacgctatcctgtacagcagcaccagggacggcggcttaggaatcaccaagttagccggcctcatccccagcgtgcaggctaggagactccacagaatcgcccagagcagcgacgacaccatgaagtgcttcatggagaaggaaaagatggagcagctgcacaagaagctgtggatccaagcgggcggagatcgtgagaacattcccagcatctgggaggcccctcccagctcagaacctcccaataacgtgtccaccaattctgaatgggaggctcccacccagaaggataagtttcccaagccctgcaactggcggaagaacgagttcaaaaaatggacaaagctggctagccagggcaggggcatcgtgaacttcgaaagggacaagattagcaaccactggatccagtactacagaagaatcccccacagaaagctcctcaccgccctccagttacgtgcaaacgtgtacccaaccagagaattcctggccagaggcagacaggaccagtacatcaaggcctgccggcactgcgatgccgataacgagagctgtgctcacatcatcggcaactgccccgtcacccaggacgccagaatcaagagagccaactacatctgcgagttacttctggaggaagccaagaagaaggattgggttgtgttcaaggagccccacatcagagactccaacaaggagctgtacaagccagacctcatcttcgtgaaggacggcagagccctggtggtggacgtcaccgtcagatacgaggctgctaagtccagccttgaggaggctgccgccgagaaagtgcggaaggccaagcacctggaaacagaggtcagacacctcaccaacgccaaggacgttaccttcgtgggcttccccctaggtgctagaggcaaatggcaccaggacaacttcaagctgcttaccgagctgggcctctccaagagccgacaggttaagatggccgagaccttcagcaccgtcgccctgttctcttctgtggacattgtgcacatgttcgcctccagagccagaaagagcatggtgatgtgataataggctgccttctgcggggcttgccttctggccatgcccttcttctctcccttgcacctgtacctcttggtctttgaataaagcctgagtaggaaggaccggtaaaaaaaaaaaaaaaaaaaaaaaaaaaaaaacgttgactaaaaaaaaaaaaaaaaaaaaaaaaaaaaaaaaaaaaaaaaaaaaaaaaaaaaaaaaaaaaaaaaaaaaaa

SEQ ID NO: 11100 - DNA, 5264 bp, synthetic construct
  source 1..5264: mol_type = other DNA
gaaataagagagaaaagaagagtaagaagaaatataagagaattcgccaccatggcccctaagaaaaagcggaaggtgaatatcagcggctctagctgcggcagccccaacagcgccgacaccagcagcgacttcaaggacctgtggaccaagctgaaggaatgccacgaccgggaagtgcagggactccaggtgaaggtcaccaaactcaagcaagaaagaatcctggacgcccagagactggaagaattcttcaccaagaaccagcagctgagagagcagcagaaagtgctgcacgagacaatcaaggttctggaagatagactgcgggccggcctgtgcgacagatgcgccgtgaccgaggaacacatgcgcaaaaagcagcaggagttcgagaacattagacagcaaaatctgaaattgatcacagagctgatgaacgagagaaacacactgcaggaggagaacaagaagctgagcgagcagctgcaacagaagatcgagaatgatcagcaacaccaggccgctgagctggaatgtgaagaggacgtgatccccgacagcccaatcacagctttcagcttttctggcgtgaacagactgaggcggaaggaaaacccccacgtgcggtacatcgagcagacccataccaagctggaacacagcgtgtgtgccaacgagatgagaaaggtgtccaagtcctccacccatccccagcacaaccctaacgaaaatgagatcctggtggctgatacctacgaccagtctcagagccctatggccaaggcccacggcaccagctcttatacccctgataagagctccttcaacctggccaccgtggtggccgagacactgggcctgggcgtgcaggaggaaagcgagacacagggcccaatgagccctctgggagatgagctgtaccactgcctggaaggcaaccacaagaaacagccttttgagtccggctccgagactcctggaacaagcgagagcgctacacctgagggcagccctaagagaaaggtgtccagcgccgagggcgctgccaaggaagagcctaaacggagaagcgccagactgagcgccaagccccccgccaaggtggaagccaagcctaagaaggccgccgctaaggacaagagcagcgataagaaagtccagaccaagggcaagcggggcgccaaaggcaaacaggccgaggtggccaaccaggagacaaaggaagatctgcctgctgagaacggcgaaaccaagaccgaggaatctccagcttctgacgaggccggagagaaggaggccaaaagcgacagcggctctgagacacctggaacaagcgagagcgccaccccggaatcctatgaacaacttgcaccacaaccgtgtgtgggagaaactttacattctagcctcccacgagacagtgaactgtttgtgcctgaagaggggagcagcgagaaggagagcgaggacgcgccaaaaacatctcctccgacgcctgggaaacatggtttggaacagactggggaggaaaaagtgatggtgactgttcctgacaaaaatccaccttgtccttgctgtggtacccgggtaaactctgtgttgaatctgattgaacatctgaaagtgtcacacgggaaaaggggggtttgttttcggtgtgcaaaatgtggaaaggaaaatagtaactatcacagtgttgtttgtcattttaagaaatgcaggggtccagagacggagaaagccccagctggggagtggatttgtgaggtatgcaacagagattttacaaccaaaattggcctgggacaacacaagagattggcacacccagcagtgagaaatcaggaaaggatcgttgcttcccaaccgaaagaaacatcaaatagaggtgctcacaaaaggtgctggacaaaggaggaggaagaattactaataagactggaggctcagttcgagggaaacaaaaatattaataagcttattgcagaacacataaccaccaaaacagctaagcagatcagtgacaaaaggcgattgctgtccagaaagccagcagaggagccacgtgaggagcctggaacgtgtcatcacaccaggagagcagctgcgagcctgagaacggagcctgagatgagtcatcacgcccaggcagaggacagagataatggacctgggagacgccctctgccaggcagggcagctgccggagggagaacaatggacgagataagacgccaccctgataagggcaacggacagcagagacccaccaagcaaaaatcagaagaacagctgcaggcttactataaaaagacactagaggaacgactttcagctggggcacttaacaccttcccccgagcattcaagcaggtaatggaaggccgggatataaagctagtaatcaatcagacagcgcaggactgcttcggatgcctggaatccataagccaaataagaacggcaacccgagataaaaaggacacggtgacccgggagaaacacccaaagaaaccttttcagaagtggatgaagaagagagcaatcaaaaaaggtaattatcttcggttccagcgtttattttatcttgatagagggaaactggctaaaatcattttagatgatattgaatgcttgtcttgtgacataccactcagtgaaatttattcggtttttaaaacaagatgggaaacaactggtagctttaaaagccttggggactttaaaacttacgggaaggctgacaacactgccttcagagaattaattacggctaaagaaattgagaaaaatgtgcaggaaatgagcaaaggctcggctcccggtccagacgggattactcttggggacgtcgtaaagatggatcccgagttttcccggaccatggagattttcaatttatggttaacaactggtaaaatcccggacatggtgagggggtgcagaaccgttttgattccaaaatcatcaaagccggatcgtttgaaagacattaataactggagacctatcacgatcggttccatcttgctgagactgttctccaggattgtaacagctaggctgagcaaagcgtgccccctgaacccaaggcaaagaggctttatcagagcggcgggatgctctgaaaacttaaaactcctgcaaactataatttggtcggccaaaagagaacacagaccactgggtgttgtattcgtggacatcgccaaggcttttgacaccgtaagccaccagcacatcattcatgctttgcagcaaagagaggtggatccccacatcgtcggtctggtgagcaatatgtacgagaacatcagtacgtatatcaccacaaagaggaacacacacacagacaaaatccagatccgggttggagtaaagcagggtgacccgatgtcgccccttttatttaacctggcaatggaccctctattatgcaagctggaagagagtggcaaaggataccaccgaggacagagcagcatcacagcgatggcatttgcagacgatctggttttgctgagcgactcctgggaaaatatgaaaacaaatattagcatactggagaccttctgcaatctgaccggactcaaaacacaggggcaaaagtgccacggcttttacatcaagccgacaaagaagtcttacaccatcaatgactgcgctgcctggactatcaacggcacacccctgaacatgatcgaccccggcgaatctgagaaatacctcggcctgcagtttgacccgtggattggaatagcaaggtccggtctctccacaaaactagatttttggcttcagcggatcgatcaagcaccacttaaacctctgcagaaaactgatattctcaaaacatacaccatccctcggctgatctacatagctgaccactcagaagtgaaaagcgcactactcgaaacccttgaccagaagatccggacagcggtcaaggaatggcttcacctacctccgtgcacctgcgatgccatcctgtactcgagcacgagagacggcggtttgggcatcaccaaattggcaggactgatccccagcgtgcaggcccgtagactgcatcggatcgcacagtcatctgacgatacgatgaaatgcttcatggaaaaagagaaaatggaacagctgcataagaaattgtggattcaagctggaggggacagagagaacataccctcgatttgggaagcaccaccgtcgagtgaaccaccaaacaacgtgagcacaaattcggaatgggaagcaccgacccagaaagataaatttccaaagccttgcaattggaggaaaaacgaattcaaaaaatggaccaaattggcatcccaaggccgcggaattgtaaattttgaaagagacaaaattagtaaccattggatccaatactacagacgcatacctcacaggaaactcctcactgcactacaactcagggccaacgtttaccccacgagagaatttctagccaggggtagacaagaccaatacatcaaggcgtgtaggcactgcgatgcggacaacgaatcctgcgcccacatcatcggcaactgcccagtgacacaggacgcccgaatcaagaggcacaattacatctgcgaactgcttctcgaggaggcgaagaagaaggactgggtagtgttcaaggaaccgcacataagggattccaacaaggaactgtacaaacctgacctgatatttgtgaaggatgggcgtgcacttgtcgtggatgtgacagtacggtatgaagcagccaaatcatcgctggaggaagccgctgcagagaaagtgagaaagtacaaacacctggaaacggaagtaagacatctcacgaatgcaaaggacgttacttttgtgggctttcccctaggagcgcgggggaaatggcaccaagataactttaaacttttgactgagcttggcctctccaaatcgaggcaagtgaaaatggcagagactttttccacagtagcgctcttttcatctgtggacattgtacatatgtttgccagtagggccagaaaatctatggttatgtgataataggctgccttctgcggggcttgccttctggccatgcccttcttctctcccttgcacctgtacctcttggtctttgaataaagcctgagtaggaaggaccggtaaaaaaaaaaaaaaaaaaaaaaaaaaaaaaacgttgactaaaaaaaaaaaaaaaaaaaaaaaaaaaaaaaaaaaaaaaaaaaaaaaaaaaaaaaaaaaaaaaaaaaaaa

SEQ ID NO: 11101 - DNA, 5264 bp, synthetic construct
  source 1..5264: mol_type = other DNA
gaaataagagagaaaagaagagtaagaagaaatataagagaattcgccaccatggcccctaagaaaaagcggaaggtgaatatcagcggctctagctgcggcagccccaacagcgccgacaccagcagcgacttcaaggacctgtggaccaagctgaaggaatgccacgaccgggaagtgcagggactccaggtgaaggtcaccaaactcaagcaagaaagaatcctggacgcccagagactggaagaattcttcaccaagaaccagcagctgagagagcagcagaaagtgctgcacgagacaatcaaggttctggaagatagactgcgggccggcctgtgcgacagatgcgccgtgaccgaggaacacatgcgcaaaaagcagcaggagttcgagaacattagacagcaaaatctgaaattgatcacagagctgatgaacgagagaaacacactgcaggaggagaacaagaagctgagcgagcagctgcaacagaagatcgagaatgatcagcaacaccaggccgctgagctggaatgtgaagaggacgtgatccccgacagcccaatcacagctttcagcttttctggcgtgaacagactgaggcggaaggaaaacccccacgtgcggtacatcgagcagacccataccaagctggaacacagcgtgtgtgccaacgagatgagaaaggtgtccaagtcctccacccatccccagcacaaccctaacgaaaatgagatcctggtggctgatacctacgaccagtctcagagccctatggccaaggcccacggcaccagctcttatacccctgataagagctccttcaacctggccaccgtggtggccgagacactgggcctgggcgtgcaggaggaaagcgagacacagggcccaatgagccctctgggagatgagctgtaccactgcctggaaggcaaccacaagaaacagccttttgagtccggctccgagactcctggaacaagcgagagcgctacacctgagggcagccctaagagaaaggtgtccagcgccgagggcgctgccaaggaagagcctaaacggagaagcgccagactgagcgccaagccccccgccaaggtggaagccaagcctaagaaggccgccgctaaggacaagagcagcgataagaaagtccagaccaagggcaagcggggcgccaaaggcaaacaggccgaggtggccaaccaggagacaaaggaagatctgcctgctgagaacggcgaaaccaagaccgaggaatctccagcttctgacgaggccggagagaaggaggccaaaagcgacagcggctctgagacacctggaacaagcgagagcgccaccccggaatcctatgaacaacttgcaccacaaccgtgtgtgggagaaactttacattctagcctcccacgagacagtgaactgtttgtgcctgaagaggggagcagcgagaaggagagcgaggacgcgccaaaaacatctcctccgacgcctgggaaacatggtttggaacagactggggaggaaaaagtgatggtgactgttcctgacaaaaatccaccttgtccttgctgtggtacccgggtaaactctgtgttgaatctgattgaacatctgaaagtgtcacacgggaaaaggggggtttgttttcggtgtgcaaaatgtggaaaggaaaatagtaactatcacagtgttgtttgtcattttaagaaatgcaggggtccagagacggagaaagccccagctggggagtggatttgtgaggtatgcaacagagattttacaaccaaaattggcctgggacaacacaagagattggcacacccagcagtgagaaatcaggaaaggatcgttgcttcccaaccgaaagaaacatcaaatagaggtgctcacaaaaggtgctggacaaaggaggaggaagaattactaataagactggaggctcagttcgagggaaacaaaaatattaataagcttattgcagaacacataaccaccaaaacagctaagcagatcagtgacaaaaggcgattgctgtccagaaagccagcagaggagccacgtgaggagcctggaacgtgtcatcacaccaggagagcagctgcgagcctgagaacggagcctgagatgagtcatcacgcccaggcagaggacagagataatggacctgggagacgccctctgccaggcagggcagctgccggagggagaacaatggacgagataagacgccaccctgataagggcaacggacagcagagacccaccaagcaaaaatcagaagaacagctgcaggcttactataaaaagacactagaggaacgactttcagctggggcacttaacaccttcccccgagcattcaagcaggtaatggaaggccgggatataaagctagtaatcaatcagacagcgcaggactgcttcggatgcctggaatccataagccaaataagaacggcaacccgagataaaaaggacacggtgacccgggagaaacacccaaagaaaccttttcagaagtggatgaagaagagagcaatcaaaaaaggtaattatcttcggttccagcgtttattttatcttgatagagggaaactggctaaaatcattttagatgatattgaatgcttgtcttgtgacataccactcagtgaaatttattcggtttttaaaacaagatgggaaacaactggtagctttaaaagccttggggactttaaaacttacgggaaggctgacaacactgccttcagagaattaattacggctaaagaaattgagaaaaatgtgcaggaaatgagcaaaggctcggctcccggtccagacgggattactcttggggacgtcgtaaagatggatcccgagttttcccggaccatggagattttcaatttatggttaacaactggtaaaatcccggacatggtgagggggtgcagaaccgttttgattccaaaatcatcaaagccggatcgtttgaaagacattaataactggagacctatcacgatcggttccatcttgctgagactgttctccaggattgtaacagctaggctgagcaaagcgtgccccctgaacccaaggcaaagaggctttatcagagcggcgggatgctctgaaaacttaaaactcctgcaaactataatttggtcggccaaaagagaacacagaccactgggtgttgtattcgtggacatcgccaaggcttttgacaccgtaagccaccagcacatcattcatgctttgcagcaaagagaggtggatccccacatcgtcggtctggtgagcaatatgtacgagaacatcagtacgtatatcaccacaaagaggaacacacacacagacaaaatccagatccgggttggagtaaagcagggtgacccgatgtcgccccttttatttaacctggcaatggaccctctattatgcaagctggaagagagtggcaaaggataccaccgaggacagagcagcatcacagcgatggcatttgcagacgatctggttttgctgagcgactcctgggaaaatatgaatacaaatattagcatactggagaccttctgcaatctgaccggactcaaaacacaggggcaaaagtgccacggcttttacatcaagccgacaaagaagtcttacaccatcaatgactgcgctgcctggactatcaacggcacacccctgaacatgatcgaccccggcgaatctgagaaatacctcggcctgcagtttgacccgtggattggaatagcaaggtccggtctctccacaaaactagatttttggcttcagcggatcgatcaagcaccacttaaacctctgcagaaaactgatattctcaaaacatacaccatccctcggctgatctacatagctgaccactcagaagtgaaaagcgcactactcgaaacccttgaccagaagatccggacagcggtcaaggaatggcttcacctacctccgtgcacctgcgatgccatcctgtactcgagcacgagagacggcggtttgggcatcaccaaattggcaggactgatccccagcgtgcaggcccgtagactgcatcggatcgcacagtcatctgacgatacgatgaaatgcttcatggaaaaagagaaaatggaacagctgcataagaaattgtggattcaagctggaggggacagagagaacataccctcgatttgggaagcaccaccgtcgagtgaaccaccaaacaacgtgagcacaaattcggaatgggaagcaccgacccagaaagataaatttccaaagccttgcaattggaggaaaaacgaattcaaaaaatggaccaaattggcatcccaaggccgcggaattgtaaattttgaaagagacaaaattagtaaccattggatccaatactacagacgcatacctcacaggaaactcctcactgcactacaactcagggccaacgtttaccccacgagagaatttctagccaggggtagacaagaccaatacatcaaggcgtgtaggcactgcgatgcggacaacgaatcctgcgcccacatcatcggcaactgcccagtgacacaggacgcccgaatcaagaggcacaattacatctgcgaactgcttctcgaggaggcgaagaagaaggactgggtagtgttcaaggaaccgcacataagggattccaacggcgaactgtacaaacctgacctgatatttgtgaaggatgggcgtgcacttgtcgtggatgtgacagtacggtatgaagcagccaaatcatcgctggaggaagccgctgcagagaaagtgagaaagtacaaacacctggaaacggaagtaagacatctcacgaatgcaaaggacgttacttttgtgggctttcccctaggagcgcgggggaaatggcaccaagataactttaaacttttgactgagcttggcctctccaaatcgaggcaagtgaaaatggcagagactttttccacagtagcgctcttttcatctgtggacattgtacatatgtttgccagtagggccagaaaatctatggttatgtgataataggctgccttctgcggggcttgccttctggccatgcccttcttctctcccttgcacctgtacctcttggtctttgaataaagcctgagtaggaaggaccggtaaaaaaaaaaaaaaaaaaaaaaaaaaaaaaacgttgactaaaaaaaaaaaaaaaaaaaaaaaaaaaaaaaaaaaaaaaaaaaaaaaaaaaaaaaaaaaaaaaaaaaaaa

SEQ ID NO: 11102 - DNA, 5264 bp, synthetic construct
  source 1..5264: mol_type = other DNA
gaaataagagagaaaagaagagtaagaagaaatataagagaattcgccaccatggcccctaagaaaaagcggaaggtgaatatcagcggctctagctgcggcagccccaacagcgccgacaccagcagcgacttcaaggacctgtggaccaagctgaaggaatgccacgaccgggaagtgcagggactccaggtgaaggtcaccaaactcaagcaagaaagaatcctggacgcccagagactggaagaattcttcaccaagaaccagcagctgagagagcagcagaaagtgctgcacgagacaatcaaggttctggaagatagactgcgggccggcctgtgcgacagatgcgccgtgaccgaggaacacatgcgcaaaaagcagcaggagttcgagaacattagacagcaaaatctgaaattgatcacagagctgatgaacgagagaaacacactgcaggaggagaacaagaagctgagcgagcagctgcaacagaagatcgagaatgatcagcaacaccaggccgctgagctggaatgtgaagaggacgtgatccccgacagcccaatcacagctttcagcttttctggcgtgaacagactgaggcggaaggaaaacccccacgtgcggtacatcgagcagacccataccaagctggaacacagcgtgtgtgccaacgagatgagaaaggtgtccaagtcctccacccatccccagcacaaccctaacgaaaatgagatcctggtggctgatacctacgaccagtctcagagccctatggccaaggcccacggcaccagctcttatacccctgataagagctccttcaacctggccaccgtggtggccgagacactgggcctgggcgtgcaggaggaaagcgagacacagggcccaatgagccctctgggagatgagctgtaccactgcctggaaggcaaccacaagaaacagccttttgagtccggctccgagactcctggaacaagcgagagcgctacacctgagggcagccctaagagaaaggtgtccagcgccgagggcgctgccaaggaagagcctaaacggagaagcgccagactgagcgccaagccccccgccaaggtggaagccaagcctaagaaggccgccgctaaggacaagagcagcgataagaaagtccagaccaagggcaagcggggcgccaaaggcaaacaggccgaggtggccaaccaggagacaaaggaagatctgcctgctgagaacggcgaaaccaagaccgaggaatctccagcttctgacgaggccggagagaaggaggccaaaagcgacagcggctctgagacacctggaacaagcgagagcgccaccccggaatcctatgaacaacttgcaccacaaccgtgtgtgggagaaactttacattctagcctcccacgagacagtgaactgtttgtgcctgaagaggggagcagcgagaaggagagcgaggacgcgccaaaaacatctcctccgacgcctgggaaacatggtttggaacagactggggaggaaaaagtgatggtgactgttcctgacaaaaatccaccttgtccttgctgtggtacccgggtaaactctgtgttgaatctgattgaacatctgaaagtgtcacacgggaaaaggggggtttgttttcggtgtgcaaaatgtggaaaggaaaatagtaactatcacagtgttgtttgtcattttaagaaatgcaggggtccagagacggagaaagccccagctggggagtggatttgtgaggtatgcaacagagattttacaaccaaaattggcctgggacaacacaagagattggcacacccagcagtgagaaatcaggaaaggatcgttgcttcccaaccgaaagaaacatcaaatagaggtgctcacaaaaggtgctggacaaaggaggaggaagaattactaataagactggaggctcagttcgagggaaacaaaaatattaataagcttattgcagaacacataaccaccaaaacagctaagcagatcagtgacaaaaggcgattgctgtccagaaagccagcagaggagccacgtgaggagcctggaacgtgtcatcacaccaggagagcagctgcgagcctgagaacggagcctgagatgagtcatcacgcccaggcagaggacagagataatggacctgggagacgccctctgccaggcagggcagctgccggagggagaacaatggacgagataagacgccaccctgataagggcaacggacagcagagacccaccaagcaaaaatcagaagaacagctgcaggcttactataaaaagacactagaggaacgactttcagctggggcacttaacaccttcccccgagcattcaagcaggtaatggaaggccgggatataaagctagtaatcaatcagacagcgcaggactgcttcggatgcctggaatccataagccaaataagaacggcaacccgagataaaaaggacacggtgacccgggagaaacacccaaagaaaccttttcagaagtggatgaagaagagagcaatcaaaaaaggtaattatcttcggttccagcgtttattttatcttgatggcgggaaactggctaaaatcattttagatgatattgaatgcttgtcttgtgacataccactcagtgaaatttattcggtttttaaaacaagatgggaaacaactggtagctttaaaagccttggggactttaaaacttacgggaaggctgacaacactgccttcagagaattaattacggctaaagaaattgagaaaaatgtgcaggaaatgagcaaaggctcggctcccggtccagacgggattactcttggggacgtcgtaaagatggatcccgagttttcccggaccatggagattttcaatttatggttaacaactggtaaaatcccggacatggtgagggggtgcagaaccgttttgattccaaaatcatcaaagccggatcgtttgaaagacattaataactggagacctatcacgatcggttccatcttgctgagactgttctccaggattgtaacagctaggctgagcaaagcgtgccccctgaacccaaggcaaagaggctttatcagagcggcgggatgctctgaaaacttaaaactcctgcaaactataatttggtcggccaaaagagaacacagaccactgggtgttgtattcgtggacatcgccaaggcttttgacaccgtaagccaccagcacatcattcatgctttgcagcaaagagaggtggatccccacatcgtcggtctggtgagcaatatgtacgagaacatcagtacgtatatcaccacaaagaggaacacacacacagacaaaatccagatccgggttggagtaaagcagggtgacccgatgtcgccccttttatttaacctggcaatggaccctctattatgcaagctggaagagagtggcaaaggataccaccgaggacagagcagcatcacagcgatggcatttgcagacgatctggttttgctgagcgactcctgggaaaatatgaatacaaatattagcatactggagaccttctgcaatctgaccggactcaaaacacaggggcaaaagtgccacggcttttacatcaagccgacaaagaagtcttacaccatcaatgactgcgctgcctggactatcaacggcacacccctgaacatgatcgaccccggcgaatctgagaaatacctcggcctgcagtttgacccgtggattggaatagcaaggtccggtctctccacaaaactagatttttggcttcagcggatcgatcaagcaccacttaaacctctgcagaaaactgatattctcaaaacatacaccatccctcggctgatctacatagctgaccactcagaagtgaaaagcgcactactcgaaacccttgaccagaagatccggacagcggtcaaggaatggcttcacctacctccgtgcacctgcgatgccatcctgtactcgagcacgagagacggcggtttgggcatcaccaaattggcaggactgatccccagcgtgcaggcccgtagactgcatcggatcgcacagtcatctgacgatacgatgaaatgcttcatggaaaaagagaaaatggaacagctgcataagaaattgtggattcaagctggaggggacagagagaacataccctcgatttgggaagcaccaccgtcgagtgaaccaccaaacaacgtgagcacaaattcggaatgggaagcaccgacccagaaagataaatttccaaagccttgcaattggaggaaaaacgaattcaaaaaatggaccaaattggcatcccaaggccgcggaattgtaaattttgaaagagacaaaattagtaaccattggatccaatactacagacgcatacctcacaggaaactcctcactgcactacaactcagggccaacgtttaccccacgagagaatttctagccaggggtagacaagaccaatacatcaaggcgtgtaggcactgcgatgcggacaacgaatcctgcgcccacatcatcggcaactgcccagtgacacaggacgcccgaatcaagaggcacaattacatctgcgaactgcttctcgaggaggcgaagaagaaggactgggtagtgttcaaggaaccgcacataagggattccaacaaggaactgtacaaacctgacctgatatttgtgaaggatgggcgtgcacttgtcgtggatgtgacagtacggtatgaagcagccaaatcatcgctggaggaagccgctgcagagaaagtgagaaagtacaaacacctggaaacggaagtaagacatctcacgaatgcaaaggacgttacttttgtgggctttcccctaggagcgcgggggaaatggcaccaagataactttaaacttttgactgagcttggcctctccaaatcgaggcaagtgaaaatggcagagactttttccacagtagcgctcttttcatctgtggacattgtacatatgtttgccagtagggccagaaaatctatggttatgtgataataggctgccttctgcggggcttgccttctggccatgcccttcttctctcccttgcacctgtacctcttggtctttgaataaagcctgagtaggaaggaccggtaaaaaaaaaaaaaaaaaaaaaaaaaaaaaaacgttgactaaaaaaaaaaaaaaaaaaaaaaaaaaaaaaaaaaaaaaaaaaaaaaaaaaaaaaaaaaaaaaaaaaaaaa

SEQ ID NO: 11103 - DNA, 5264 bp, synthetic construct
  source 1..5264: mol_type = other DNA
gaaataagagagaaaagaagagtaagaagaaatataagagaattcgccaccatggcccctaagaaaaagcggaaggtgaatatcagcggctctagctgcggcagccccaacagcgccgacaccagcagcgacttcaaggacctgtggaccaagctgaaggaatgccacgaccgggaagtgcagggactccaggtgaaggtcaccaaactcaagcaagaaagaatcctggacgcccagagactggaagaattcttcaccaagaaccagcagctgagagagcagcagaaagtgctgcacgagacaatcaaggttctggaagatagactgcgggccggcctgtgcgacagatgcgccgtgaccgaggaacacatgcgcaaaaagcagcaggagttcgagaacattagacagcaaaatctgaaattgatcacagagctgatgaacgagagaaacacactgcaggaggagaacaagaagctgagcgagcagctgcaacagaagatcgagaatgatcagcaacaccaggccgctgagctggaatgtgaagaggacgtgatccccgacagcccaatcacagctttcagcttttctggcgtgaacagactgaggcggaaggaaaacccccacgtgcggtacatcgagcagacccataccaagctggaacacagcgtgtgtgccaacgagatgagaaaggtgtccaagtcctccacccatccccagcacaaccctaacgaaaatgagatcctggtggctgatacctacgaccagtctcagagccctatggccaaggcccacggcaccagctcttatacccctgataagagctccttcaacctggccaccgtggtggccgagacactgggcctgggcgtgcaggaggaaagcgagacacagggcccaatgagccctctgggagatgagctgtaccactgcctggaaggcaaccacaagaaacagccttttgagtccggctccgagactcctggaacaagcgagagcgctacacctgagggcagccctaagagaaaggtgtccagcgccgagggcgctgccaaggaagagcctaaacggagaagcgccagactgagcgccaagccccccgccaaggtggaagccaagcctaagaaggccgccgctaaggacaagagcagcgataagaaagtccagaccaagggcaagcggggcgccaaaggcaaacaggccgaggtggccaaccaggagacaaaggaagatctgcctgctgagaacggcgaaaccaagaccgaggaatctccagcttctgacgaggccggagagaaggaggccaaaagcgacagcggctctgagacacctggaacaagcgagagcgccaccccggaatcctatgaacaacttgcaccacaaccgtgtgtgggagaaactttacattctagcctcccacgagacagtgaactgtttgtgcctgaagaggggagcagcgagaaggagagcgaggacgcgccaaaaacatctcctccgacgcctgggaaacatggtttggaacagactggggaggaaaaagtgatggtgactgttcctgacaaaaatccaccttgtccttgctgtggtacccgggtaaactctgtgttgaatctgattgaacatctgaaagtgtcacacgggaaaaggggggtttgttttcggtgtgcaaaatgtggaaaggaaaatagtaactatcacagtgttgtttgtcattttaagaaatgcaggggtccagagacggagaaagccccagctggggagtggatttgtgaggtatgcaacagagattttacaaccaaaattggcctgggacaacacaagagattggcacacccagcagtgagaaatcaggaaaggatcgttgcttcccaaccgaaagaaacatcaaatagaggtgctcacaaaaggtgctggacaaaggaggaggaagaattactaataagactggaggctcagttcgagggaaacaaaaatattaataagcttattgcagaacacataaccaccaaaacagctaagcagatcagtgacaaaaggcgattgctgtccagaaagccagcagaggagccacgtgaggagcctggaacgtgtcatcacaccaggagagcagctgcgagcctgagaacggagcctgagatgagtcatcacgcccaggcagaggacagagataatggacctgggagacgccctctgccaggcagggcagctgccggagggagaacaatggacgagataagacgccaccctgataagggcaacggacagcagagacccaccaagcaaaaatcagaagaacagctgcaggcttactataaaaagacactagaggaacgactttcagctggggcacttaacaccttcccccgagcattcaagcaggtaatggaaggccgggatataaagctagtaatcaatcagacagcgcaggactgcttcggatgcctggaatccataagccaaataagaacggcaacccgagataaaaaggacacggtgacccgggagaaacacccaaagaaaccttttcagaagtggatgaagaagagagcaatcaaaaaaggtaattatcttcggttccagcgtttattttatcttgatagagggaaactggctaaaatcattttagatgatattgaatgcttgtcttgtgacataccactcagtgaaatttattcggtttttaaaacaagatgggaaacaactggtagctttaaaagccttggggactttaaaacttacgggaaggctgacaacactgccttcagagaattaattacggctaaagaaattgagaaaaatgtgcaggaaatgagcaaaggctcggctcccggtccagacgggattactcttggggacgtcgtaaagatggatcccgagttttcccggaccatggagattttcaatttatggttaacaactggtaaaatcccggacatggtgagggggtgcagaaccgttttgattccaaaatcatcaaagccggatcgtttgaaagacattaataactggagacctatcacgatcggttccatcttgctgagactgttctccaggattgtaacagctaggctgagcaaagcgtgccccctgaacccaaggcaaagaggctttatcagagcggcgggatgctctgaaaacttaaaactcctgcaaactataatttggtcggccaaaagagaacacagaccactgggtgttgtattcgtggacatcgccaaggcttttgacaccgtaagccaccagcacatcattcatgctttgcagcaaagagaggtggatccccacatcgtcggtctggtgagcaatatgtacgagaacatcagtacgtatatcaccacaaagaggaacacacacacagacaaaatccagatccgggttggagtaaagcagggtgacccgatgtcgccccttttatttaacctggcaatggaccctctattatgcaagctggaagagagtggcaaaggataccaccgaggacagagcagcatcacagcgatggcatttgcagacgatctggttttgctgagcgactcctgggaaaatatgaatacaaatattagcatactggagaccttctgcaatctgaccggactcaaaacacaggggcaaaagtgccacggcttttacatcaagccgacaaagaagtcttacaccatcaatgactgcgctgcctggactatcaacggcacacccctgaacatgatcgaccccggcgaatctgagaaatacctcggcctgcagtttgacccgtggattggaatagcaaggtccggtctctccacaaaactagatttttggcttcagcggatcgatcaagcaccacttaaacctctgcagaaaactgatattctcaaaacatacaccatccctcggctgatctacatagctgaccactcagaagtgaaaagcgcactactcgaaacccttgaccagaagatccggacagcggtcaaggaatggcttcacctacctccgtgcacctgcgatgccatcctgtactcgagcacgagagacggcggtttgggcatcaccaaattggcaggactgatccccagcgtgcaggcccgtagactgcatcggatcgcacagtcatctgacgatacgatgaaatgcttcatggaaaaagagaaaatggaacagctgcataagaaattgtggattcaagctggaggggacagagagaacataccctcgatttgggaagcaccaccgtcgagtgaaccaccaaacaacgtgagcacaaattcggaatgggaagcaccgacccagaaagataaatttccaaagccttgcaattggaggaaaaacgaattcaaaaaatggaccaaattggcatcccaaggccgcggaattgtaaattttgaaagagacaaaattagtaaccattggatccaatactacagacgcatacctcacaggaaactcctcactgcactacaactcagggccaacgtttaccccacgagagaatttctagccaggggtagacaagaccaatacatcaaggcgtgtaggcactgcgatgcggacaacgaatcctgcgcccacatcatcggcaactgcccagtgacacaggacgcccgaatcaagaggcacaattacatctgcgaactgcttctcgaggaggcgaagaagaaggactgggtagtgttcaaggaaccgcacataagggattccaacaaggaactgtacaaacctgacctgatatttgtgaaggatgggcgtgcacttgtcgtggccgtgacagtacggtatgaagcagccaaatcatcgctggaggaagccgctgcagagaaagtgagaaagtacaaacacctggaaacggaagtaagacatctcacgaatgcaaaggacgttacttttgtgggctttcccctaggagcgcgggggaaatggcaccaagataactttaaacttttgactgagcttggcctctccaaatcgaggcaagtgaaaatggcagagactttttccacagtagcgctcttttcatctgtggacattgtacatatgtttgccagtagggccagaaaatctatggttatgtgataataggctgccttctgcggggcttgccttctggccatgcccttcttctctcccttgcacctgtacctcttggtctttgaataaagcctgagtaggaaggaccggtaaaaaaaaaaaaaaaaaaaaaaaaaaaaaaacgttgactaaaaaaaaaaaaaaaaaaaaaaaaaaaaaaaaaaaaaaaaaaaaaaaaaaaaaaaaaaaaaaaaaaaaaa

SEQ ID NO: 11104 - DNA, 5264 bp, synthetic construct
  source 1..5264: mol_type = other DNA
gaaataagagagaaaagaagagtaagaagaaatataagagaattcgccaccatggcccctaagaaaaagcggaaggtgaatatcagcggctctagctgcggcagccccaacagcgccgacaccagcagcgacttcaaggacctgtggaccaagctgaaggaatgccacgaccgggaagtgcagggactccaggtgaaggtcaccaaactcaagcaagaaagaatcctggacgcccagagactggaagaattcttcaccaagaaccagcagctgagagagcagcagaaagtgctgcacgagacaatcaaggttctggaagatagactgcgggccggcctgtgcgacagatgcgccgtgaccgaggaacacatgcgcaaaaagcagcaggagttcgagaacattagacagcaaaatctgaaattgatcacagagctgatgaacgagagaaacacactgcaggaggagaacaagaagctgagcgagcagctgcaacagaagatcgagaatgatcagcaacaccaggccgctgagctggaatgtgaagaggacgtgatccccgacagcccaatcacagctttcagcttttctggcgtgaacagactgaggcggaaggaaaacccccacgtgcggtacatcgagcagacccataccaagctggaacacagcgtgtgtgccaacgagatgagaaaggtgtccaagtcctccacccatccccagcacaaccctaacgaaaatgagatcctggtggctgatacctacgaccagtctcagagccctatggccaaggcccacggcaccagctcttatacccctgataagagctccttcaacctggccaccgtggtggccgagacactgggcctgggcgtgcaggaggaaagcgagacacagggcccaatgagccctctgggagatgagctgtaccactgcctggaaggcaaccacaagaaacagccttttgagtccggctccgagactcctggaacaagcgagagcgctacacctgagggcagccctaagagaaaggtgtccagcgccgagggcgctgccaaggaagagcctaaacggagaagcgccagactgagcgccaagccccccgccaaggtggaagccaagcctaagaaggccgccgctaaggacaagagcagcgataagaaagtccagaccaagggcaagcggggcgccaaaggcaaacaggccgaggtggccaaccaggagacaaaggaagatctgcctgctgagaacggcgaaaccaagaccgaggaatctccagcttctgacgaggccggagagaaggaggccaaaagcgacagcggctctgagacacctggaacaagcgagagcgccaccccggaatcctatgaacaacttgcaccacaaccgtgtgtgggagaaactttacattctagcctcccacgagacagtgaactgtttgtgcctgaagaggggagcagcgagaaggagagcgaggacgcgccaaaaacatctcctccgacgcctgggaaacatggtttggaacagactggggaggaaaaagtgatggtgactgttcctgacaaaaatccaccttgtccttgctgtggtacccgggtaaactctgtgttgaatctgattgaacatctgaaagtgtcacacgggaaaaggggggtttgttttcggtgtgcaaaatgtggaaaggaaaatagtaactatcacagtgttgtttgtcattttaagaaatgcaggggtccagagacggagaaagccccagctggggagtggatttgtgaggtatgcaacagagattttacaaccaaaattggcctgggacaacacaagagattggcacacccagcagtgagaaatcaggaaaggatcgttgcttcccaaccgaaagaaacatcaaatagaggtgctcacaaaaggtgctggacaaaggaggaggaagaattactaataagactggaggctcagttcgagggaaacaaaaatattaataagcttattgcagaacacataaccaccaaaacagctaagcagatcagtgacaaaaggcgattgctgtccagaaagccagcagaggagccacgtgaggagcctggaacgtgtcatcacaccaggagagcagctgcgagcctgagaacggagcctgagatgagtcatcacgcccaggcagaggacagagataatggacctgggagacgccctctgccaggcagggcagctgccggagggagaacaatggacgagataagacgccaccctgataagggcaacggacagcagagacccaccaagcaaaaatcagaagaacagctgcaggcttactataaaaagacactagaggaacgactttcagctggggcacttaacaccttcccccgagcattcaagcaggtaatggaaggccgggatataaagctagtaatcaatcagacagcgcaggactgcttcggatgcctggaatccataagccaaataagaacggcaacccgagataaaaaggacacggtgacccgggagaaacacccaaagaaaccttttcagaagtggatgaagaagagagcaatcaaaaaaggtaattatcttcggttccagcgtttattttatcttagaagagggaaactggctaaaatcattttagatgatattgaatgcttgtcttgtgacataccactcagtgaaatttattcggtttttaaaacaagatgggaaacaactggtagctttaaaagccttggggactttaaaacttacgggaaggctgacaacactgccttcagagaattaattacggctaaagaaattgagaaaaatgtgcaggaaatgagcaaaggctcggctcccggtccagacgggattactcttggggacgtcgtaaagatggatcccgagttttcccggaccatggagattttcaatttatggttaacaactggtaaaatcccggacatggtgagggggtgcagaaccgttttgattccaaaatcatcaaagccggatcgtttgaaagacattaataactggagacctatcacgatcggttccatcttgctgagactgttctccaggattgtaacagctaggctgagcaaagcgtgccccctgaacccaaggcaaagaggctttatcagagcggcgggatgctctgaaaacttaaaactcctgcaaactataatttggtcggccaaaagagaacacagaccactgggtgttgtattcgtggacatcgccaaggcttttgacaccgtaagccaccagcacatcattcatgctttgcagcaaagagaggtggatccccacatcgtcggtctggtgagcaatatgtacgagaacatcagtacgtatatcaccacaaagaggaacacacacacagacaaaatccagatccgggttggagtaaagcagggtgacccgatgtcgccccttttatttaacctggcaatggaccctctattatgcaagctggaagagagtggcaaaggataccaccgaggacagagcagcatcacagcgatggcatttgcagacgatctggttttgctgagcgactcctgggaaaatatgaatacaaatattagcatactggagaccttctgcaatctgaccggactcaaaacacaggggcaaaagtgccacggcttttacatcaagccgacaaagaagtcttacaccatcaatgactgcgctgcctggactatcaacggcacacccctgaacatgatcgaccccggcgaatctgagaaatacctcggcctgcagtttgacccgtggattggaatagcaaggtccggtctctccacaaaactagatttttggcttcagcggatcgatcaagcaccacttaaacctctgcagaaaactgatattctcaaaacatacaccatccctcggctgatctacatagctgaccactcagaagtgaaaagcgcactactcgaaacccttgaccagaagatccggacagcggtcaaggaatggcttcacctacctccgtgcacctgcgatgccatcctgtactcgagcacgagagacggcggtttgggcatcaccaaattggcaggactgatccccagcgtgcaggcccgtagactgcatcggatcgcacagtcatctgacgatacgatgaaatgcttcatggaaaaagagaaaatggaacagctgcataagaaattgtggattcaagctggaggggacagagagaacataccctcgatttgggaagcaccaccgtcgagtgaaccaccaaacaacgtgagcacaaattcggaatgggaagcaccgacccagaaagataaatttccaaagccttgcaattggaggaaaaacgaattcaaaaaatggaccaaattggcatcccaaggccgcggaattgtaaattttgaaagagacaaaattagtaaccattggatccaatactacagacgcatacctcacaggaaactcctcactgcactacaactcagggccaacgtttaccccacgagagaatttctagccaggggtagacaagaccaatacatcaaggcgtgtaggcactgcgatgcggacaacgaatcctgcgcccacatcatcggcaactgcccagtgacacaggacgcccgaatcaagaggcacaattacatctgcgaactgcttctcgaggaggcgaagaagaaggactgggtagtgttcaaggaaccgcacataagggattccaacaaggaactgtacaaacctgacctgatatttgtgaaggatgggcgtgcacttgtcgtggatgtgacagtacggtatgaagcagccaaatcatcgctggaggaagccgctgcagagaaagtgagaaagtacaaacacctggaaacggaagtaagacatctcacgaatgcaaaggacgttacttttgtgggctttcccctaggagcgcgggggaaatggcaccaagataactttaaacttttgactgagcttggcctctccaaatcgaggcaagtgaaaatggcagagactttttccacagtagcgctcttttcatctgtggacattgtacatatgtttgccagtagggccagaaaatctatggttatgtgataataggctgccttctgcggggcttgccttctggccatgcccttcttctctcccttgcacctgtacctcttggtctttgaataaagcctgagtaggaaggaccggtaaaaaaaaaaaaaaaaaaaaaaaaaaaaaaacgttgactaaaaaaaaaaaaaaaaaaaaaaaaaaaaaaaaaaaaaaaaaaaaaaaaaaaaaaaaaaaaaaaaaaaaaa

SEQ ID NO: 11105 - DNA, 5264 bp, synthetic construct
  source 1..5264: mol_type = other DNA
gaaataagagagaaaagaagagtaagaagaaatataagagaattcgccaccatggcccctaagaaaaagcggaaggtgaatatcagcggctctagctgcggcagccccaacagcgccgacaccagcagcgacttcaaggacctgtggaccaagctgaaggaatgccacgaccgggaagtgcagggactccaggtgaaggtcaccaaactcaagcaagaaagaatcctggacgcccagagactggaagaattcttcaccaagaaccagcagctgagagagcagcagaaagtgctgcacgagacaatcaaggttctggaagatagactgcgggccggcctgtgcgacagatgcgccgtgaccgaggaacacatgcgcaaaaagcagcaggagttcgagaacattagacagcaaaatctgaaattgatcacagagctgatgaacgagagaaacacactgcaggaggagaacaagaagctgagcgagcagctgcaacagaagatcgagaatgatcagcaacaccaggccgctgagctggaatgtgaagaggacgtgatccccgacagcccaatcacagctttcagcttttctggcgtgaacagactgaggcggaaggaaaacccccacgtgcggtacatcgagcagacccataccaagctggaacacagcgtgtgtgccaacgagatgagaaaggtgtccaagtcctccacccatccccagcacaaccctaacgaaaatgagatcctggtggctgatacctacgaccagtctcagagccctatggccaaggcccacggcaccagctcttatacccctgataagagctccttcaacctggccaccgtggtggccgagacactgggcctgggcgtgcaggaggaaagcgagacacagggcccaatgagccctctgggagatgagctgtaccactgcctggaaggcaaccacaagaaacagccttttgagtccggctccgagactcctggaacaagcgagagcgctacacctgagggcagccctaagagaaaggtgtccagcgccgagggcgctgccaaggaagagcctaaacggagaagcgccagactgagcgccaagccccccgccaaggtggaagccaagcctaagaaggccgccgctaaggacaagagcagcgataagaaagtccagaccaagggcaagcggggcgccaaaggcaaacaggccgaggtggccaaccaggagacaaaggaagatctgcctgctgagaacggcgaaaccaagaccgaggaatctccagcttctgacgaggccggagagaaggaggccaaaagcgacagcggctctgagacacctggaacaagcgagagcgccaccccggaatcctatgaacaacttgcaccacaaccgtgtgtgggagaaactttacattctagcctcccacgagacagtgaactgtttgtgcctgaagaggggagcagcgagaaggagagcgaggacgcgccaaaaacatctcctccgacgcctgggaaacatggtttggaacagactggggaggaaaaagtgatggtgactgttcctgacaaaaatccaccttgtccttgctgtggtacccgggtaaactctgtgttgaatctgattgaacatctgaaagtgtcacacgggaaaaggggggtttgttttcggtgtgcaaaatgtggaaaggaaaatagtaactatcacagtgttgtttgtcattttaagaaatgcaggggtccagagacggagaaagccccagctggggagtggatttgtgaggtatgcaacagagattttacaaccaaaattggcctgggacaacacaagagattggcacacccagcagtgagaaatcaggaaaggatcgttgcttcccaaccgaaagaaacatcaaatagaggtgctcacaaaaggtgctggacaaaggaggaggaagaattactaataagactggaggctcagttcgagggaaacaaaaatattaataagcttattgcagaacacataaccaccaaaacagctaagcagatcagtgacaaaaggcgattgctgtccagaaagccagcagaggagccacgtgaggagcctggaacgtgtcatcacaccaggagagcagctgcgagcctgagaacggagcctgagatgagtcatcacgcccaggcagaggacagagataatggacctgggagacgccctctgccaggcagggcagctgccggagggagaacaatggacgagataagacgccaccctgataagggcaacggacagcagagacccaccaagcaaaaatcagaagaacagctgcaggcttactataaaaagacactagaggaacgactttcagctggggcacttaacaccttcccccgagcattcaagcaggtaatggaaggccgggatataaagctagtaatcaatcagacagcgcaggactgcttcggatgcctggaatccataagccaaataagaacggcaacccgagataaaaaggacacggtgacccgggagaaacacccaaagaaaccttttcagaagtggatgaagaagagagcaatcaaaaaaggtaattatcttcggttccagcgtttattttatcttgatagagggaaactggctaaaatcattttagatgatattgaatgcttgtcttgtgacataccactcagtgaaatttattcggtttttaaaacaagatgggaaacaactggtagctttaaaagccttggggactttaaaacttacgggaaggctgacaacactgccttcagagaattaattacggctaaagaaattgagaaaaatgtgcaggaaatgagcaaaggctcggctcccggtccagacgggattactcttggggacgtcgtaaagatggatcccgagttttcccggaccatggagattttcaatttatggttaacaactggtaaaatcccggacatggtgagggggtgcagaaccgttttgattccaaaatcatcaaagccggatcgtttgaaagacattaataactggagacctatcacgatcggttccatcttgctgagactgttctccaggattgtaacagctaggctgagcaaagcgtgccccctgaacccaaggcaaagaggctttatcagagcggcgggatgctctgaaaacttaaaactcctgcaaactataatttggtcggccaaaagagaacacagaccactgggtgttgtattcgtggacatcgccaaggcttttgacaccgtaagccaccagcacatcattcatgctttgcagcaaagagaggtggatccccacatcgtcggtctggtgagcaatatgtacgagaacatcagtacgtatatcaccacaaagaggaacacacacacagacaaaatccagatccgggttggagtaaagcagggtgacccgatgtcgccccttttatttaacctggcaatggaccctctattatgcaagctggaagagagtggcaaaggataccaccgaggacagagcagcatcacagcgatggcatttgcagacgatctggttttgctgagcgactcctgggaaaatatgaatacaaatattagcatactggagaccttctgcaatctgaccggactcaaaacacaggggcaaaagtgccacggcttttacatcaagccgacaaagaagtcttacaccatcaatgactgcgctgcctggactatcaacggcacacccctgaacatgatcgaccccggcgaatctgagaaatacctcggcctgcagtttgacccgtggattggaatagcaaggtccggtctctccacaaaactagatttttggcttcagcggatcgatcaagcaccacttaaacctctgcagaaaactgatattctcaaaagatacaccatccctcggctgatctacatagctgaccactcagaagtgaaaagcgcactactcgaaacccttgaccagaagatccggacagcggtcaaggaatggcttcacctacctccgtgcacctgcgatgccatcctgtactcgagcacgagagacggcggtttgggcatcaccaaattggcaggactgatccccagcgtgcaggcccgtagactgcatcggatcgcacagtcatctgacgatacgatgaaatgcttcatggaaaaagagaaaatggaacagctgcataagaaattgtggattcaagctggaggggacagagagaacataccctcgatttgggaagcaccaccgtcgagtgaaccaccaaacaacgtgagcacaaattcggaatgggaagcaccgacccagaaagataaatttccaaagccttgcaattggaggaaaaacgaattcaaaaaatggaccaaattggcatcccaaggccgcggaattgtaaattttgaaagagacaaaattagtaaccattggatccaatactacagacgcatacctcacaggaaactcctcactgcactacaactcagggccaacgtttaccccacgagagaatttctagccaggggtagacaagaccaatacatcaaggcgtgtaggcactgcgatgcggacaacgaatcctgcgcccacatcatcggcaactgcccagtgacacaggacgcccgaatcaagaggcacaattacatctgcgaactgcttctcgaggaggcgaagaagaaggactgggtagtgttcaaggaaccgcacataagggattccaacaaggaactgtacaaacctgacctgatatttgtgaaggatgggcgtgcacttgtcgtggatgtgacagtacggtatgaagcagccaaatcatcgctggaggaagccgctgcagagaaagtgagaaagtacaaacacctggaaacggaagtaagacatctcacgaatgcaaaggacgttacttttgtgggctttcccctaggagcgcgggggaaatggcaccaagataactttaaacttttgactgagcttggcctctccaaatcgaggcaagtgaaaatggcagagactttttccacagtagcgctcttttcatctgtggacattgtacatatgtttgccagtagggccagaaaatctatggttatgtgataataggctgccttctgcggggcttgccttctggccatgcccttcttctctcccttgcacctgtacctcttggtctttgaataaagcctgagtaggaaggaccggtaaaaaaaaaaaaaaaaaaaaaaaaaaaaaaacgttgactaaaaaaaaaaaaaaaaaaaaaaaaaaaaaaaaaaaaaaaaaaaaaaaaaaaaaaaaaaaaaaaaaaaaaa

SEQ ID NO: 11106 - DNA, 5264 bp, synthetic construct
  source 1..5264: mol_type = other DNA
gaaataagagagaaaagaagagtaagaagaaatataagagaattcgccaccatggcccctaagaaaaagcggaaggtgaatatcagcggctctagctgcggcagccccaacagcgccgacaccagcagcgacttcaaggacctgtggaccaagctgaaggaatgccacgaccgggaagtgcagggactccaggtgaaggtcaccaaactcaagcaagaaagaatcctggacgcccagagactggaagaattcttcaccaagaaccagcagctgagagagcagcagaaagtgctgcacgagacaatcaaggttctggaagatagactgcgggccggcctgtgcgacagatgcgccgtgaccgaggaacacatgcgcaaaaagcagcaggagttcgagaacattagacagcaaaatctgaaattgatcacagagctgatgaacgagagaaacacactgcaggaggagaacaagaagctgagcgagcagctgcaacagaagatcgagaatgatcagcaacaccaggccgctgagctggaatgtgaagaggacgtgatccccgacagcccaatcacagctttcagcttttctggcgtgaacagactgaggcggaaggaaaacccccacgtgcggtacatcgagcagacccataccaagctggaacacagcgtgtgtgccaacgagatgagaaaggtgtccaagtcctccacccatccccagcacaaccctaacgaaaatgagatcctggtggctgatacctacgaccagtctcagagccctatggccaaggcccacggcaccagctcttatacccctgataagagctccttcaacctggccaccgtggtggccgagacactgggcctgggcgtgcaggaggaaagcgagacacagggcccaatgagccctctgggagatgagctgtaccactgcctggaaggcaaccacaagaaacagccttttgagtccggctccgagactcctggaacaagcgagagcgctacacctgagggcagccctaagagaaaggtgtccagcgccgagggcgctgccaaggaagagcctaaacggagaagcgccagactgagcgccaagccccccgccaaggtggaagccaagcctaagaaggccgccgctaaggacaagagcagcgataagaaagtccagaccaagggcaagcggggcgccaaaggcaaacaggccgaggtggccaaccaggagacaaaggaagatctgcctgctgagaacggcgaaaccaagaccgaggaatctccagcttctgacgaggccggagagaaggaggccaaaagcgacagcggctctgagacacctggaacaagcgagagcgccaccccggaatcctatgaacaacttgcaccacaaccgtgtgtgggagaaactttacattctagcctcccacgagacagtgaactgtttgtgcctgaagaggggagcagcgagaaggagagcgaggacgcgccaaaaacatctcctccgacgcctgggaaacatggtttggaacagactggggaggaaaaagtgatggtgactgttcctgacaaaaatccaccttgtccttgctgtggtacccgggtaaactctgtgttgaatctgattgaacatctgaaagtgtcacacgggaaaaggggggtttgttttcggtgtgcaaaatgtggaaaggaaaatagtaactatcacagtgttgtttgtcattttaagaaatgcaggggtccagagacggagaaagccccagctggggagtggatttgtgaggtatgcaacagagattttacaaccaaaattggcctgggacaacacaagagattggcacacccagcagtgagaaatcaggaaaggatcgttgcttcccaaccgaaagaaacatcaaatagaggtgctcacaaaaggtgctggacaaaggaggaggaagaattactaataagactggaggctcagttcgagggaaacaaaaatattaataagcttattgcagaacacataaccaccaaaacagctaagcagatcagtgacaaaaggcgattgctgtccagaaagccagcagaggagccacgtgaggagcctggaacgtgtcatcacaccaggagagcagctgcgagcctgagaacggagcctgagatgagtcatcacgcccaggcagaggacagagataatggacctgggagacgccctctgccaggcagggcagctgccggagggagaacaatggacgagataagacgccaccctgataagggcaacggacagcagagacccaccaagcaaaaatcagaagaacagctgcaggcttactataaaaagacactagaggaacgactttcagctggggcacttaacaccttcccccgagcattcaagcaggtaatggaaggccgggatataaagctagtaatcaatcagacagcgcaggactgcttcggatgcctggaatccataaagcaaataagaacggcaacccgagataaaaaggacacggtgacccgggagaaacacccaaagaaaccttttcagaagtggatgaagaagagagcaatcaaaaaaggtaattatcttcggttccagcgtttattttatcttgatagagggaaactggctaaaatcattttagatgatattgaatgcttgtcttgtgacataccactcagtgaaatttattcggtttttaaaacaagatgggaaacaactggtagctttaaaagccttggggactttaaaacttacgggaaggctgacaacactgccttcagagaattaattacggctaaagaaattgagaaaaatgtgcaggaaatgagcaaaggctcggctcccggtccagacgggattactcttggggacgtcgtaaagatggatcccgagttttcccggaccatggagattttcaatttatggttaacaactggtaaaatcccggacatggtgagggggtgcagaaccgttttgattccaaaatcatcaaagccggatcgtttgaaagacattaataactggagacctatcacgatcggttccatcttgctgagactgttctccaggattgtaacagctaggctgagcaaagcgtgccccctgaacccaaggcaaagaggctttatcagagcggcgggatgctctgaaaacttaaaactcctgcaaactataatttggtcggccaaaagagaacacagaccactgggtgttgtattcgtggacatcgccaaggcttttgacaccgtaagccaccagcacatcattcatgctttgcagcaaagagaggtggatccccacatcgtcggtctggtgagcaatatgtacgagaacatcagtacgtatatcaccacaaagaggaacacacacacagacaaaatccagatccgggttggagtaaagcagggtgacccgatgtcgccccttttatttaacctggcaatggaccctctattatgcaagctggaagagagtggcaaaggataccaccgaggacagagcagcatcacagcgatggcatttgcagacgatctggttttgctgagcgactcctgggaaaatatgaatacaaatattagcatactggagaccttctgcaatctgaccggactcaaaacacaggggcaaaagtgccacggcttttacatcaagccgacaaagaagtcttacaccatcaatgactgcgctgcctggactatcaacggcacacccctgaacatgatcgaccccggcgaatctgagaaatacctcggcctgcagtttgacccgtggattggaatagcaaggtccggtctctccacaaaactagatttttggcttcagcggatcgatcaagcaccacttaaacctctgcagaaaactgatattctcaaaacatacaccatccctcggctgatctacatagctgaccactcagaagtgaaaagcgcactactcgaaacccttgaccagaagatccggacagcggtcaaggaatggcttcacctacctccgtgcacctgcgatgccatcctgtactcgagcacgagagacggcggtttgggcatcaccaaattggcaggactgatccccagcgtgcaggcccgtagactgcatcggatcgcacagtcatctgacgatacgatgaaatgcttcatggaaaaagagaaaatggaacagctgcataagaaattgtggattcaagctggaggggacagagagaacataccctcgatttgggaagcaccaccgtcgagtgaaccaccaaacaacgtgagcacaaattcggaatgggaagcaccgacccagaaagataaatttccaaagccttgcaattggaggaaaaacgaattcaaaaaatggaccaaattggcatcccaaggccgcggaattgtaaattttgaaagagacaaaattagtaaccattggatccaatactacagacgcatacctcacaggaaactcctcactgcactacaactcagggccaacgtttaccccacgagagaatttctagccaggggtagacaagaccaatacatcaaggcgtgtaggcactgcgatgcggacaacgaatcctgcgcccacatcatcggcaactgcccagtgacacaggacgcccgaatcaagaggcacaattacatctgcgaactgcttctcgaggaggcgaagaagaaggactgggtagtgttcaaggaaccgcacataagggattccaacaaggaactgtacaaacctgacctgatatttgtgaaggatgggcgtgcacttgtcgtggatgtgacagtacggtatgaagcagccaaatcatcgctggaggaagccgctgcagagaaagtgagaaagtacaaacacctggaaacggaagtaagacatctcacgaatgcaaaggacgttacttttgtgggctttcccctaggagcgcgggggaaatggcaccaagataactttaaacttttgactgagcttggcctctccaaatcgaggcaagtgaaaatggcagagactttttccacagtagcgctcttttcatctgtggacattgtacatatgtttgccagtagggccagaaaatctatggttatgtgataataggctgccttctgcggggcttgccttctggccatgcccttcttctctcccttgcacctgtacctcttggtctttgaataaagcctgagtaggaaggaccggtaaaaaaaaaaaaaaaaaaaaaaaaaaaaaaacgttgactaaaaaaaaaaaaaaaaaaaaaaaaaaaaaaaaaaaaaaaaaaaaaaaaaaaaaaaaaaaaaaaaaaaaaa

SEQ ID NO: 11107 - DNA, 5264 bp, synthetic construct
  source 1..5264: mol_type = other DNA
gaaataagagagaaaagaagagtaagaagaaatataagagaattcgccaccatggcccctaagaaaaagcggaaggtgaatatcagcggctctagctgcggcagccccaacagcgccgacaccagcagcgacttcaaggacctgtggaccaagctgaaggaatgccacgaccgggaagtgcagggactccaggtgaaggtcaccaaactcaagcaagaaagaatcctggacgcccagagactggaagaattcttcaccaagaaccagcagctgagagagcagcagaaagtgctgcacgagacaatcaaggttctggaagatagactgcgggccggcctgtgcgacagatgcgccgtgaccgaggaacacatgcgcaaaaagcagcaggagttcgagaacattagacagcaaaatctgaaattgatcacagagctgatgaacgagagaaacacactgcaggaggagaacaagaagctgagcgagcagctgcaacagaagatcgagaatgatcagcaacaccaggccgctgagctggaatgtgaagaggacgtgatccccgacagcccaatcacagctttcagcttttctggcgtgaacagactgaggcggaaggaaaacccccacgtgcggtacatcgagcagacccataccaagctggaacacagcgtgtgtgccaacgagatgagaaaggtgtccaagtcctccacccatccccagcacaaccctaacgaaaatgagatcctggtggctgatacctacgaccagtctcagagccctatggccaaggcccacggcaccagctcttatacccctgataagagctccttcaacctggccaccgtggtggccgagacactgggcctgggcgtgcaggaggaaagcgagacacagggcccaatgagccctctgggagatgagctgtaccactgcctggaaggcaaccacaagaaacagccttttgagtccggctccgagactcctggaacaagcgagagcgctacacctgagggcagccctaagagaaaggtgtccagcgccgagggcgctgccaaggaagagcctaaacggagaagcgccagactgagcgccaagccccccgccaaggtggaagccaagcctaagaaggccgccgctaaggacaagagcagcgataagaaagtccagaccaagggcaagcggggcgccaaaggcaaacaggccgaggtggccaaccaggagacaaaggaagatctgcctgctgagaacggcgaaaccaagaccgaggaatctccagcttctgacgaggccggagagaaggaggccaaaagcgacagcggctctgagacacctggaacaagcgagagcgccaccccggaatcctatgaacaacttgcaccacaaccgtgtgtgggagaaactttacattctagcctcccacgagacagtgaactgtttgtgcctgaagaggggagcagcgagaaggagagcgaggacgcgccaaaaacatctcctccgacgcctgggaaacatggtttggaacagactggggaggaaaaagtgatggtgactgttcctgacaaaaatccaccttgtccttgctgtggtacccgggtaaactctgtgttgaatctgattgaacatctgaaagtgtcacacgggaaaaggggggtttgttttcggtgtgcaaaatgtggaaaggaaaatagtaactatcacagtgttgtttgtcattttaagaaatgcaggggtccagagacggagaaagccccagctggggagtggatttgtgaggtatgcaacagagattttacaaccaaaattggcctgggacaacacaagagattggcacacccagcagtgagaaatcaggaaaggatcgttgcttcccaaccgaaagaaacatcaaatagaggtgctcacaaaaggtgctggacaaaggaggaggaagaattactaataagactggaggctcagttcgagggaaacaaaaatattaataagcttattgcagaacacataaccaccaaaacagctaagcagatcagtgacaaaaggcgattgctgtccagaaagccagcagaggagccacgtgaggagcctggaacgtgtcatcacaccaggagagcagctgcgagcctgagaacggagcctgagatgagtcatcacgcccaggcagaggacagagataatggacctgggagacgccctctgccaggcagggcagctgccggagggagaacaatggacgagataagacgccaccctgataagggcaacggacagcagagacccaccaagcaaaaatcagaagaacagctgcaggcttactataaaaagacactagaggaacgactttcagctggggcacttaacaccttcccccgagcattcaagcaggtaatggaaggccgggatataaagctagtaatcaatcagacagcgcaggactgcttcggatgcctggaatccataagccaaataagaacggcaacccgagataaaaaggacacggtgacccgggagaaacacccaaagaaaccttttcagaagtggatgaagaagagagcaatcaaaaaaggtaattatcttcggttccagcgtttattttatcttgatagagggaaactggctaaaatcattttagatgatattgaatgcttgtcttgtgacataccactcagtgaaatttattcggtttttaaaacaagatgggaaacaactggtagctttaaaagccttggggactttaaaacttacgggaaggctgacaacactgccttcagagaattaattacggctaaagaaattgagaaaaatgtgcaggaaatgagcaaaggctcggctcccggtccagacgggattactcttggggacgtcgtaaagatggatcccgagttttcccggaccatggagattttcaatttatggttaacaactggtaaaatcccggacatggtgagggggtgcagaaccgttttgattccaaaatcatcaaagccggatcgtttgaaagacattaataactggagacctatcacgatcggttccatcttgctgagactgttctccaggattgtaacagctaggctgagcaaagcgtgccccctgaacccaaggcaaagaggctttatcagagcggcgggatgctctgaaaacttaaaactcctgcaaactataatttggtcggccaaaagagaacacagaccactgggtgttgtattcgtggacatcgccaaggcttttgacaccatcagccaccagcacatcattcatgctttgcagcaaagagaggtggatccccacatcgtcggtctggtgagcaatatgtacgagaacatcagtacgtatatcaccacaaagaggaacacacacacagacaaaatccagatccgggttggagtaaagcagggtgacccgatgtcgccccttttatttaacctggcaatggaccctctattatgcaagctggaagagagtggcaaaggataccaccgaggacagagcagcatcacagcgatggcatttgcagacgatctggttttgctgagcgactcctgggaaaatatgaatacaaatattagcatactggagaccttctgcaatctgaccggactcaaaacacaggggcaaaagtgccacggcttttacatcaagccgacaaagaagtcttacaccatcaatgactgcgctgcctggactatcaacggcacacccctgaacatgatcgaccccggcgaatctgagaaatacctcggcctgcagtttgacccgtggattggaatagcaaggtccggtctctccacaaaactagatttttggcttcagcggatcgatcaagcaccacttaaacctctgcagaaaactgatattctcaaaacatacaccatccctcggctgatctacatagctgaccactcagaagtgaaaagcgcactactcgaaacccttgaccagaagatccggacagcggtcaaggaatggcttcacctacctccgtgcacctgcgatgccatcctgtactcgagcacgagagacggcggtttgggcatcaccaaattggcaggactgatccccagcgtgcaggcccgtagactgcatcggatcgcacagtcatctgacgatacgatgaaatgcttcatggaaaaagagaaaatggaacagctgcataagaaattgtggattcaagctggaggggacagagagaacataccctcgatttgggaagcaccaccgtcgagtgaaccaccaaacaacgtgagcacaaattcggaatgggaagcaccgacccagaaagataaatttccaaagccttgcaattggaggaaaaacgaattcaaaaaatggaccaaattggcatcccaaggccgcggaattgtaaattttgaaagagacaaaattagtaaccattggatccaatactacagacgcatacctcacaggaaactcctcactgcactacaactcagggccaacgtttaccccacgagagaatttctagccaggggtagacaagaccaatacatcaaggcgtgtaggcactgcgatgcggacaacgaatcctgcgcccacatcatcggcaactgcccagtgacacaggacgcccgaatcaagaggcacaattacatctgcgaactgcttctcgaggaggcgaagaagaaggactgggtagtgttcaaggaaccgcacataagggattccaacaaggaactgtacaaacctgacctgatatttgtgaaggatgggcgtgcacttgtcgtggatgtgacagtacggtatgaagcagccaaatcatcgctggaggaagccgctgcagagaaagtgagaaagtacaaacacctggaaacggaagtaagacatctcacgaatgcaaaggacgttacttttgtgggctttcccctaggagcgcgggggaaatggcaccaagataactttaaacttttgactgagcttggcctctccaaatcgaggcaagtgaaaatggcagagactttttccacagtagcgctcttttcatctgtggacattgtacatatgtttgccagtagggccagaaaatctatggttatgtgataataggctgccttctgcggggcttgccttctggccatgcccttcttctctcccttgcacctgtacctcttggtctttgaataaagcctgagtaggaaggaccggtaaaaaaaaaaaaaaaaaaaaaaaaaaaaaaacgttgactaaaaaaaaaaaaaaaaaaaaaaaaaaaaaaaaaaaaaaaaaaaaaaaaaaaaaaaaaaaaaaaaaaaaaa

SEQ ID NO: 11108 - DNA, 5264 bp, synthetic construct
  source 1..5264: mol_type = other DNA
gaaataagagagaaaagaagagtaagaagaaatataagagaattcgccaccatggcccctaagaaaaagcggaaggtgaatatcagcggctctagctgcggcagccccaacagcgccgacaccagcagcgacttcaaggacctgtggaccaagctgaaggaatgccacgaccgggaagtgcagggactccaggtgaaggtcaccaaactcaagcaagaaagaatcctggacgcccagagactggaagaattcttcaccaagaaccagcagctgagagagcagcagaaagtgctgcacgagacaatcaaggttctggaagatagactgcgggccggcctgtgcgacagatgcgccgtgaccgaggaacacatgcgcaaaaagcagcaggagttcgagaacattagacagcaaaatctgaaattgatcacagagctgatgaacgagagaaacacactgcaggaggagaacaagaagctgagcgagcagctgcaacagaagatcgagaatgatcagcaacaccaggccgctgagctggaatgtgaagaggacgtgatccccgacagcccaatcacagctttcagcttttctggcgtgaacagactgaggcggaaggaaaacccccacgtgcggtacatcgagcagacccataccaagctggaacacagcgtgtgtgccaacgagatgagaaaggtgtccaagtcctccacccatccccagcacaaccctaacgaaaatgagatcctggtggctgatacctacgaccagtctcagagccctatggccaaggcccacggcaccagctcttatacccctgataagagctccttcaacctggccaccgtggtggccgagacactgggcctgggcgtgcaggaggaaagcgagacacagggcccaatgagccctctgggagatgagctgtaccactgcctggaaggcaaccacaagaaacagccttttgagtccggctccgagactcctggaacaagcgagagcgctacacctgagggcagccctaagagaaaggtgtccagcgccgagggcgctgccaaggaagagcctaaacggagaagcgccagactgagcgccaagccccccgccaaggtggaagccaagcctaagaaggccgccgctaaggacaagagcagcgataagaaagtccagaccaagggcaagcggggcgccaaaggcaaacaggccgaggtggccaaccaggagacaaaggaagatctgcctgctgagaacggcgaaaccaagaccgaggaatctccagcttctgacgaggccggagagaaggaggccaaaagcgacagcggctctgagacacctggaacaagcgagagcgccaccccggaatcctatgaacaacttgcaccacaaccgtgtgtgggagaaactttacattctagcctcccacgagacagtgaactgtttgtgcctgaagaggggagcagcgagaaggagagcgaggacgcgccaaaaacatctcctccgacgcctgggaaacatggtttggaacagactggggaggaaaaagtgatggtgactgttcctgacaaaaatccaccttgtccttgctgtggtacccgggtaaactctgtgttgaatctgattgaacatctgaaagtgtcacacgggaaaaggggggtttgttttcggtgtgcaaaatgtggaaaggaaaatagtaactatcacagtgttgtttgtcattttaagaaatgcaggggtccagagacggagaaagccccagctggggagtggatttgtgaggtatgcaacagagattttacaaccaaaattggcctgggacaacacaagagattggcacacccagcagtgagaaatcaggaaaggatcgttgcttcccaaccgaaagaaacatcaaatagaggtgctcacaaaaggtgctggacaaaggaggaggaagaattactaataagactggaggctcagttcgagggaaacaaaaatattaataagcttattgcagaacacataaccaccaaaacagctaagcagatcagtgacaaaaggcgattgctgtccagaaagccagcagaggagccacgtgaggagcctggaacgtgtcatcacaccaggagagcagctgcgagcctgagaacggagcctgagatgagtcatcacgcccaggcagaggacagagataatggacctgggagacgccctctgccaggcagggcagctgccggagggagaacaatggacgagataagacgccaccctgataagggcaacggacagcagagacccaccaagcaaaaatcagaagaacagctgcaggcttactataaaaagacactagaggaacgactttcagctggggcacttaacaccttcccccgagcattcaagcaggtaatggaaggccgggatataaagctagtaatcaatcagacagcgcaggactgcttcggatgcctggaatccataagccaaataagaacggcaacccgagataaaaaggacacggtgacccgggagaaacacccaaagaaaccttttcagaagtggatgaagaagagagcaatcaaaaaaggtaattatcttcggttccagcgtttattttatcttgatagagggaaactggctaaaatcattttagatgatattgaatgcttgtcttgtgacataccactcagtgaaatttattcggtttttaaaacaagatgggaaacaactggtagctttaaaagccttggggactttaaaacttacgggaaggctgacaacactgccttcagagaattaattacggctaaagaaattgagaaaaatgtgcaggaaatgagcaaaggctcggctcccggtccagacgggattactcttggggacgtcgtaaagatggatcccgagttttcccggaccatggagattttcaatttatggttaacaactggtaaaatcccggacatggtgagggggtgcagaaccgttttgattccaaaatcatcaaagccggatcgtttgaaagacattaataactggagacctatcacgatcggttccatcttgctgagactgttctccaggattgtaacagctaggctgagcaaagcgtgccccctgaacccaaggcaaagaggctttatcagagcggcgggatgctctgaaaacttaaaactcctgcaaactataatttggtcggccaaaagagaacacagaccactgggtgttgtattcgtggacatcgccaaggcttttgacaccgtaagccaccagcacatcattcatgctttgcagcaaagagaggtggatccccacatcgtcggtctggtgagcaatatgtacgagaacatcagtacgtatatcaccacaaagaggaacacacacacagacaaaatccagatccgggttggagtaaagcagggtgacccgatgtcgccccttttatttaacctggcaatggaccctctattatgcaagctggaagagagtggcaaaggataccaccgaggacagagcagcatcacagcgatggcatttgcagacgatctggttttgctgagcgactcctgggaaaatatgaatacaaatattagcatactggagaccttctgcaatctgaccggactcaaaacacaggggcaaaagtgccacggcttttacatcaagccgacaaagaagtcttacaccatcaatgactgcgctgcctggactatcaacggcacacccctgaacatgatcgaccccggcgaatctgagaaatacctcggcctgcagtttgacccgtggattggaatagcaaggtccggtctctccacaaaactagatttttggcttcagcggatcgatcaagcaccacttaaacctctgcagaaaactgatattctcaaaacatacaccatccctcggctgatctacatagctgaccactcagaagtgaaaagcgcactactcgaaacccttgaccagaagatccggacagcggtcaaggaatggcttcacctacctccgtgcacctgcgatgccatcctgtactcgagcacgagagacggcggtttgggcatcaccaaattggcaggactgatccccagcgtgcaggcccgtagactgcatcggatcgcacagtcatctgacgatacgatgaaatgcttcatggaaaaagagaaaatggaacagctgcataagaaattgtggattcaagctggaggggacagagagaacataccctcgatttgggaagcaccaccgtcgagtgaaccaccaaacaacgtgagcacaaattcggaatgggaagcaccgacccagaaagataaatttccaaagccttgcaattggaggaaaaacgaattcaaaaaatggaccaaattggcatcccaaggccgcggaattgtaaattttgaaagagacaaaattagtaaccattggatccaatactacagacgcatacctcacaggaaactcctcactgcactacaactcagggccaacgtttaccccacgagagaatttctagccaggggtagacaagaccaatacatcaaggcgtgtaggcactgcgatgcggacaacgaatcctgcgcccacatcatcggcaactgcccagtgacacaggacgcccgaatcaagaggcacaattacatctgcgaactgcttctcgaggaggcgaagaagaaggactgggtagtgttcaaggaaccgcacataagggattccaacaaggaactgtacaaacctgacctgatactggtgaaggatgggcgtgcacttgtcgtggatgtgacagtacggtatgaagcagccaaatcatcgctggaggaagccgctgcagagaaagtgagaaagtacaaacacctggaaacggaagtaagacatctcacgaatgcaaaggacgttacttttgtgggctttcccctaggagcgcgggggaaatggcaccaagataactttaaacttttgactgagcttggcctctccaaatcgaggcaagtgaaaatggcagagactttttccacagtagcgctcttttcatctgtggacattgtacatatgtttgccagtagggccagaaaatctatggttatgtgataataggctgccttctgcggggcttgccttctggccatgcccttcttctctcccttgcacctgtacctcttggtctttgaataaagcctgagtaggaaggaccggtaaaaaaaaaaaaaaaaaaaaaaaaaaaaaaacgttgactaaaaaaaaaaaaaaaaaaaaaaaaaaaaaaaaaaaaaaaaaaaaaaaaaaaaaaaaaaaaaaaaaaaaaa

SEQ ID NO: 11109 - DNA, 5264 bp, synthetic construct
  source 1..5264: mol_type = other DNA
gaaataagagagaaaagaagagtaagaagaaatataagagaattcgccaccatggcccctaagaaaaagcggaaggtgaatatcagcggctctagctgcggcagccccaacagcgccgacaccagcagcgacttcaaggacctgtggaccaagctgaaggaatgccacgaccgggaagtgcagggactccaggtgaaggtcaccaaactcaagcaagaaagaatcctggacgcccagagactggaagaattcttcaccaagaaccagcagctgagagagcagcagaaagtgctgcacgagacaatcaaggttctggaagatagactgcgggccggcctgtgcgacagatgcgccgtgaccgaggaacacatgcgcaaaaagcagcaggagttcgagaacattagacagcaaaatctgaaattgatcacagagctgatgaacgagagaaacacactgcaggaggagaacaagaagctgagcgagcagctgcaacagaagatcgagaatgatcagcaacaccaggccgctgagctggaatgtgaagaggacgtgatccccgacagcccaatcacagctttcagcttttctggcgtgaacagactgaggcggaaggaaaacccccacgtgcggtacatcgagcagacccataccaagctggaacacagcgtgtgtgccaacgagatgagaaaggtgtccaagtcctccacccatccccagcacaaccctaacgaaaatgagatcctggtggctgatacctacgaccagtctcagagccctatggccaaggcccacggcaccagctcttatacccctgataagagctccttcaacctggccaccgtggtggccgagacactgggcctgggcgtgcaggaggaaagcgagacacagggcccaatgagccctctgggagatgagctgtaccactgcctggaaggcaaccacaagaaacagccttttgagtccggctccgagactcctggaacaagcgagagcgctacacctgagggcagccctaagagaaaggtgtccagcgccgagggcgctgccaaggaagagcctaaacggagaagcgccagactgagcgccaagccccccgccaaggtggaagccaagcctaagaaggccgccgctaaggacaagagcagcgataagaaagtccagaccaagggcaagcggggcgccaaaggcaaacaggccgaggtggccaaccaggagacaaaggaagatctgcctgctgagaacggcgaaaccaagaccgaggaatctccagcttctgacgaggccggagagaaggaggccaaaagcgacagcggctctgagacacctggaacaagcgagagcgccaccccggaatcctatgaacaacttgcaccacaaccgtgtgtgggagaaacttcccattctagcctcccacgagacagtgaactgtttgtgcctgaagaggggagcagcgagaaggagagcgaggacgcgccaaaaacatctcctccgacgcctgggaaacatggtttggaacagactggggaggaaaaagtgatggtgactgttcctgacaaaaatccaccttgtccttgctgtggtacccgggtaaactctgtgttgaatctgattgaacatctgaaagtgtcacacgggaaaaggggggtttgttttcggtgtgcaaaatgtggaaaggaaaatagtaactatcacagtgttgtttgtcattttaagaaatgcaggggtccagagacggagaaagccccagctggggagtggatttgtgaggtatgcaacagagattttacaaccaaaattggcctgggacaacacaagagattggcacacccagcagtgagaaatcaggaaaggatcgttgcttcccaaccgaaagaaacatcaaatagaggtgctcacaaaaggtgctggacaaaggaggaggaagaattactaataagactggaggctcagttcgagggaaacaaaaatattaataagcttattgcagaacacataaccaccaaaacagctaagcagatcagtgacaaaaggcgattgctgtccagaaagccagcagaggagccacgtgaggagcctggaacgtgtcatcacaccaggagagcagctgcgagcctgagaacggagcctgagatgagtcatcacgcccaggcagaggacagagataatggacctgggagacgccctctgccaggcagggcagctgccggagggagaacaatggacgagataagacgccaccctgataagggcaacggacagcagagacccaccaagcaaaaatcagaagaacagctgcaggcttactataaaaagacactagaggaacgactttcagctggggcacttaacaccttcccccgagcattcaagcaggtaatggaaggccgggatataaagctagtaatcaatcagacagcgcaggactgcttcggatgcctggaatccataagccaaataagaacggcaacccgagataaaaaggacacggtgacccgggagaaacacccaaagaaaccttttcagaagtggatgaagaagagagcaatcaaaaaaggtaattatcttcggttccagcgtttattttatcttgatagagggaaactggctaaaatcattttagatgatattgaatgcttgtcttgtgacataccactcagtgaaatttattcggtttttaaaacaagatgggaaacaactggtagctttaaaagccttggggactttaaaacttacgggaaggctgacaacactgccttcagagaattaattacggctaaagaaattgagaaaaatgtgcaggaaatgagcaaaggctcggctcccggtccagacgggattactcttggggacgtcgtaaagatggatcccgagttttcccggaccatggagattttcaatttatggttaacaactggtaaaatcccggacatggtgagggggtgcagaaccgttttgattccaaaatcatcaaagccggatcgtttgaaagacattaataactggagacctatcacgatcggttccatcttgctgagactgttctccaggattgtaacagctaggctgagcaaagcgtgccccctgaacccaaggcaaagaggctttatcagagcggcgggatgctctgaaaacttaaaactcctgcaaactataatttggtcggccaaaagagaacacagaccactgggtgttgtattcgtggacatcgccaaggcttttgacaccgtaagccaccagcacatcattcatgctttgcagcaaagagaggtggatccccacatcgtcggtctggtgagcaatatgtacgagaacatcagtacgtatatcaccacaaagaggaacacacacacagacaaaatccagatccgggttggagtaaagcagggtgacccgatgtcgccccttttatttaacctggcaatggaccctctattatgcaagctggaagagagtggcaaaggataccaccgaggacagagcagcatcacagcgatggcatttgcagacgatctggttttgctgagcgactcctgggaaaatatgaatacaaatattagcatactggagaccttctgcaatctgaccggactcaaaacacaggggcaaaagtgccacggcttttacatcaagccgacaaaggactcttacaccatcaatgactgcgctgcctggactatcaacggcacacccctgaacatgatcgaccccggcgaatctgagaaatacctcggcctgcagtttgacccgtggattggaatagcaaggtccggtctctccacaaaactagatttttggcttcagcggatcgatcaagcaccacttaaacctctgcagaaaactgatattctcaaaacatacaccatccctcggctgatctacatagctgaccactcagaagtgaaaagcgcactactcgaaacccttgaccagaagatccggacagcggtcaaggaatggcttcacctacctccgtgcacctgcgatgccatcctgtactcgagcacgagagacggcggtttgggcatcaccaaattggcaggactgatccccagcgtgcaggcccgtagactgcatcggatcgcacagtcatctgacgatacgatgaaatgcttcatggaaaaagagaaaatggaacagctgcataagaaattgtggattcaagctggaggggacagagagaacataccctcgatttgggaagcaccaccgtcgagtgaaccaccaaacaacgtgagcacaaattcggaatgggaagcaccgacccagaaagataaatttccaaagccttgcaattggaggaaaaacgaattcaaaaaatggaccaaattggcatcccaaggccgcggaattgtaaattttgaaagagacaaaattagtaaccattggatccaatactacagacgcatacctcacaggaaactcctcactgcactacaactcagggccaacgtttaccccacgagagaatttctagccaggggtagacaagaccaatacatcaaggcgtgtaggcactgcgatgcggacaacgaatcctgcgcccacatcatcggcaactgcccagtgacacaggacgcccgaatcaagaggcacaattacatctgcgaactgcttctcgaggaggcgaagaagaaggactgggtagtgttcaaggaaccgcacataagggattccaacaaggaactgtacaaacctgacctgatatttgtgaaggatgggcgtgcacttgtcgtggatgtgacagtacggtatgaagcagccaaatcatcgctggaggaagccgctgcagagaaagtgagaaagtacaaacacctggaaacggaagtaagacatctcacgaatgcaaaggacgttacttttgtgggctttcccctaggagcgcgggggaaatggcaccaagataactttaaacttttgactgagcttggcctctccaaatcgaggcaagtgaaaatggcagagactttttccacagtagcgctcttttcatctgtggacattgtacatatgtttgccagtagggccagaaaatctatggttatgtgataataggctgccttctgcggggcttgccttctggccatgcccttcttctctcccttgcacctgtacctcttggtctttgaataaagcctgagtaggaaggaccggtaaaaaaaaaaaaaaaaaaaaaaaaaaaaaaacgttgactaaaaaaaaaaaaaaaaaaaaaaaaaaaaaaaaaaaaaaaaaaaaaaaaaaaaaaaaaaaaaaaaaaaaaa

SEQ ID NO: 11110 - DNA, 5264 bp, synthetic construct
  source 1..5264: mol_type = other DNA
gaaataagagagaaaagaagagtaagaagaaatataagagaattcgccaccatggcccctaagaaaaagcggaaggtgaatatcagcggctctagctgcggcagccccaacagcgccgacaccagcagcgacttcaaggacctgtggaccaagctgaaggaatgccacgaccgggaagtgcagggactccaggtgaaggtcaccaaactcaagcaagaaagaatcctggacgcccagagactggaagaattcttcaccaagaaccagcagctgagagagcagcagaaagtgctgcacgagacaatcaaggttctggaagatagactgcgggccggcctgtgcgacagatgcgccgtgaccgaggaacacatgcgcaaaaagcagcaggagttcgagaacattagacagcaaaatctgaaattgatcacagagctgatgaacgagagaaacacactgcaggaggagaacaagaagctgagcgagcagctgcaacagaagatcgagaatgatcagcaacaccaggccgctgagctggaatgtgaagaggacgtgatccccgacagcccaatcacagctttcagcttttctggcgtgaacagactgaggcggaaggaaaacccccacgtgcggtacatcgagcagacccataccaagctggaacacagcgtgtgtgccaacgagatgagaaaggtgtccaagtcctccacccatccccagcacaaccctaacgaaaatgagatcctggtggctgatacctacgaccagtctcagagccctatggccaaggcccacggcaccagctcttatacccctgataagagctccttcaacctggccaccgtggtggccgagacactgggcctgggcgtgcaggaggaaagcgagacacagggcccaatgagccctctgggagatgagctgtaccactgcctggaaggcaaccacaagaaacagccttttgagtccggctccgagactcctggaacaagcgagagcgctacacctgagggcagccctaagagaaaggtgtccagcgccgagggcgctgccaaggaagagcctaaacggagaagcgccagactgagcgccaagccccccgccaaggtggaagccaagcctaagaaggccgccgctaaggacaagagcagcgataagaaagtccagaccaagggcaagcggggcgccaaaggcaaacaggccgaggtggccaaccaggagacaaaggaagatctgcctgctgagaacggcgaaaccaagaccgaggaatctccagcttctgacgaggccggagagaaggaggccaaaagcgacagcggctctgagacacctggaacaagcgagagcgccaccccggaatcctatgaacaacttgcaccacaaccgtgtgtgggagaaactttacattctagcctcccacgagacagtgaactgtttgtgcctgaagaggggagcagcgagaaggagagcgagtccgcgccaaaaacatctcctccgacgcctgggaaacatggtttggaacagactggggaggaaaaagtgatggtgactgttcctgacaaaaatccaccttgtccttgctgtggtacccgggtaaactctgtgttgaatctgattgaacatctgaaagtgtcacacgggaaaaggggggtttgttttcggtgtgcaaaatgtggaaaggaaaatagtaactatcacagtgttgtttgtcattttaagaaatgcaggggtccagagacggagaaagccccagctggggagtggatttgtgaggtatgcaacagagattttacaaccaaaattggcctgggacaacacaagagattggcacacccagcagtgagaaatcaggaaaggatcgttgcttcccaaccgaaagaaacatcaaatagaggtgctcacaaaaggtgctggacaaaggaggaggaagaattactaataagactggaggctcagttcgagggaaacaaaaatattaataagcttattgcagaacacataaccaccaaaacagctaagcagatcagtgacaaaaggcgattgctgtccagaaagccagcagaggagccacgtgaggagcctggaacgtgtcatcacaccaggagagcagctgcgagcctgagaacggagcctgagatgagtcatcacgcccaggcagaggacagagataatggacctgggagacgccctctgccaggcagggcagctgccggagggagaacaatggacgagataagacgccaccctgataagggcaacggacagcagagacccaccaagcaaaaatcagaagaacagctgcaggcttactataaaaagacactagaggaacgactttcagctggggcacttaacaccttcccccgagcattcaagcaggtaatggaaggccgggatataaagctagtaatcaatcagacagcgcaggactgcttcggatgcctggaatccataagccaaataagaacggcaacccgagataaaaaggacacggtgacccgggagaaacacccaaagaaaccttttcagaagtggatgaagaagagagcaatcaaaaaaggtaattatcttcggttccagcgtttattttatcttgatagagggaaactggctaaaatcattttagatgatattgaatgcttgtcttgtgacataccactcagtgaaatttattcggtttttaaaacaagatgggaaacaactggtagctttaaaagccttggggactttaaaacttacgggaaggctgacaacactgccttcagagaattaattacggctaaagaaattgagaaaaatgtgcaggaaatgagcaaaggctcggctcccggtccagacgggattactcttggggacgtcgtaaagatggatcccgagttttcccggaccatggagattttcaatttatggttaacaactggtaaaatcccggacatggtgagggggtgcagaaccgttttgattccaaaatcatcaaagccggatcgtttgaaagacattaataactggagacctatcacgatcggttccatcttgctgagactgttctccaggattgtaacagctaggctgagcaaagcgtgccccctgaacccaaggcaaagaggctttatcagagcggcgggatgctctgaaaacttaaaactcctgcaaactataatttggtcggccaaaagagaacacagaccactgggtgttgtattcgtggacatcgccaaggcttttgacaccgtaagccaccagcacatcattcatgctttgcagcaaagagaggtggatccccacatcgtcggtctggtgagcaatatgtacgagaacatcagtacgtatatcaccacaaagaggaacacacacacagacaaaatccagatccgggttggagtaaagcagggtgacccgatgtcgccccttttatttaacctggcaatggaccctctattatgcaagctggaagagagtggcaaaggataccaccgaggacagagcagcatcacagcgatggcatttgcagacgatctggttttgctgagcgactcctgggaaaatatgaatacaaatattagcatactggagaccttctgcaatctgaccggactcaaaacacaggggcaaaagtgccacggcttttacatcaagccgacaaaggactcttacaccatcaatgactgcgctgcctggactatcaacggcacacccctgaacatgatcgaccccggcgaatctgagaaatacctcggcctgcagtttgacccgtggattggaatagcaaggtccggtctctccacaaaactagatttttggcttcagcggatcgatcaagcaccacttaaacctctgcagaaaactgatattctcaaaacatacaccatccctcggctgatctacatagctgaccactcagaagtgaaaagcgcactactcgaaacccttgaccagaagatccggacagcggtcaaggaatggcttcacctacctccgtgcacctgcgatgccatcctgtactcgagcacgagagacggcggtttgggcatcaccaaattggcaggactgatccccagcgtgcaggcccgtagactgcatcggatcgcacagtcatctgacgatacgatgaaatgcttcatggaaaaagagaaaatggaacagctgcataagaaattgtggattcaagctggaggggacagagagaacataccctcgatttgggaagcaccaccgtcgagtgaaccaccaaacaacgtgagcacaaattcggaatgggaagcaccgacccagaaagataaatttccaaagccttgcaattggaggaaaaacgaattcaaaaaatggaccaaattggcatcccaaggccgcggaattgtaaattttgaaagagacaaaattagtaaccattggatccaatactacagacgcatacctcacaggaaactcctcactgcactacaactcagggccaacgtttaccccacgagagaatttctagccaggggtagacaagaccaatacatcaaggcgtgtaggcactgcgatgcggacaacgaatcctgcgcccacatcatcggcaactgcccagtgacacaggacgcccgaatcaagaggcacaattacatctgcgaactgcttctcgaggaggcgaagaagaaggactgggtagtgttcaaggaaccgcacataagggattccaacaaggaactgtacaaacctgacctgatatttgtgaaggatgggcgtgcacttgtcgtggatgtgacagtacggtatgaagcagccaaatcatcgctggaggaagccgctgcagagaaagtgagaaagtacaaacacctggaaacggaagtaagacatctcacgaatgcaaaggacgttacttttgtgggctttcccctaggagcgcgggggaaatggcaccaagataactttaaacttttgactgagcttggcctctccaaatcgaggcaagtgaaaatggcagagactttttccacagtagcgctcttttcatctgtggacattgtacatatgtttgccagtagggccagaaaatctatggttatgtgataataggctgccttctgcggggcttgccttctggccatgcccttcttctctcccttgcacctgtacctcttggtctttgaataaagcctgagtaggaaggaccggtaaaaaaaaaaaaaaaaaaaaaaaaaaaaaaacgttgactaaaaaaaaaaaaaaaaaaaaaaaaaaaaaaaaaaaaaaaaaaaaaaaaaaaaaaaaaaaaaaaaaaaaaa

SEQ ID NO: 11111 - DNA, 5264 bp, synthetic construct
  source 1..5264: mol_type = other DNA
gaaataagagagaaaagaagagtaagaagaaatataagagaattcgccaccatggcccctaagaaaaagcggaaggtgaatatcagcggctctagctgcggcagccccaacagcgccgacaccagcagcgacttcaaggacctgtggaccaagctgaaggaatgccacgaccgggaagtgcagggactccaggtgaaggtcaccaaactcaagcaagaaagaatcctggacgcccagagactggaagaattcttcaccaagaaccagcagctgagagagcagcagaaagtgctgcacgagacaatcaaggttctggaagatagactgcgggccggcctgtgcgacagatgcgccgtgaccgaggaacacatgcgcaaaaagcagcaggagttcgagaacattagacagcaaaatctgaaattgatcacagagctgatgaacgagagaaacacactgcaggaggagaacaagaagctgagcgagcagctgcaacagaagatcgagaatgatcagcaacaccaggccgctgagctggaatgtgaagaggacgtgatccccgacagcccaatcacagctttcagcttttctggcgtgaacagactgaggcggaaggaaaacccccacgtgcggtacatcgagcagacccataccaagctggaacacagcgtgtgtgccaacgagatgagaaaggtgtccaagtcctccacccatccccagcacaaccctaacgaaaatgagatcctggtggctgatacctacgaccagtctcagagccctatggccaaggcccacggcaccagctcttatacccctgataagagctccttcaacctggccaccgtggtggccgagacactgggcctgggcgtgcaggaggaaagcgagacacagggcccaatgagccctctgggagatgagctgtaccactgcctggaaggcaaccacaagaaacagccttttgagtccggctccgagactcctggaacaagcgagagcgctacacctgagggcagccctaagagaaaggtgtccagcgccgagggcgctgccaaggaagagcctaaacggagaagcgccagactgagcgccaagccccccgccaaggtggaagccaagcctaagaaggccgccgctaaggacaagagcagcgataagaaagtccagaccaagggcaagcggggcgccaaaggcaaacaggccgaggtggccaaccaggagacaaaggaagatctgcctgctgagaacggcgaaaccaagaccgaggaatctccagcttctgacgaggccggagagaaggaggccaaaagcgacagcggctctgagacacctggaacaagcgagagcgccaccccggaatcctatgaacaacttgcaccacaaccgtgtgtgggagaaactttacattctagcctcccacgagacagtgaactgtttgtgcctgaagaggggagcagcgagaaggagagcgaggacgcgccaaaaacatctcctccgacgcctgggaaacatggtttggaacagactggggaggaaaaagtgatggtgactgttcctgacaaaaatccaccttgtccttgctgtggtacccggatgaactctgtgttgaatctgattgaacatctgaaagtgtcacacgggaaaaggggggtttgttttcggtgtgcaaaatgtggaaaggaaaatagtaactatcacagtgttgtttgtcattttaagaaatgcaggggtccagagacggagaaagccccagctggggagtggatttgtgaggtatgcaacagagattttacaaccaaaattggcctgggacaacacaagagattggcacacccagcagtgagaaatcaggaaaggatcgttgcttcccaaccgaaagaaacatcaaatagaggtgctcacaaaaggtgctggacaaaggaggaggaagaattactaataagactggaggctcagttcgagggaaacaaaaatattaataagcttattgcagaacacataaccaccaaaacagctaagcagatcagtgacaaaaggcgattgctgtccagaaagccagcagaggagccacgtgaggagcctggaacgtgtcatcacaccaggagagcagctgcgagcctgagaacggagcctgagatgagtcatcacgcccaggcagaggacagagataatggacctgggagacgccctctgccaggcagggcagctgccggagggagaacaatggacgagataagacgccaccctgataagggcaacggacagcagagacccaccaagcaaaaatcagaagaacagctgcaggcttactataaaaagacactagaggaacgactttcagctggggcacttaacaccttcccccgagcattcaagcaggtaatggaaggccgggatataaagctagtaatcaatcagacagcgcaggactgcttcggatgcctggaatccataagccaaataagaacggcaacccgagataaaaaggacacggtgacccgggagaaacacccaaagaaaccttttcagaagtggatgaagaagagagcaatcaaaaaaggtaattatcttcggttccagcgtttattttatcttgatagagggaaactggctaaaatcattttagatgatattgaatgcttgtcttgtgacataccactcagtgaaatttattcggtttttaaaacaagatgggaaacaactggtagctttaaaagccttggggactttaaaacttacgggaaggctgacaacactgccttcagagaattaattacggctaaagaaattgagaaaaatgtgcaggaaatgagcaaaggctcggctcccggtccagacgggattactcttggggacgtcgtaaagatggatcccgagttttcccggaccatggagattttcaatttatggttaacaactggtaaaatcccggacatggtgagggggtgcagaaccgttttgattccaaaatcatcaaagccggatcgtttgaaagacattaataactggagacctatcacgatcggttccatcttgctgagactgttctccaggattgtaacagctaggctgagcaaagcgtgccccctgaacccaaggcaaagaggctttatcagagcggcgggatgctctgaaaacttaaaactcctgcaaactataatttggtcggccaaaagagaacacagaccactgggtgttgtattcgtggacatcgccaaggcttttgacaccgtaagccaccagcacatcattcatgctttgcagcaaagagaggtggatccccacatcgtcggtctggtgagcaatatgtacgagaacatcagtacgtatatcaccacaaagaggaacacacacacagacaaaatccagatccgggttggagtaaagcagggtgacccgatgtcgccccttttatttaacctggcaatggaccctctattatgcaagctggaagagagtggcaaaggataccaccgaggacagagcagcatcacagcgatggcatttgcagacgatctggttttgctgagcgactcctgggaaaatatgaatacaaatattagcatactggagaccttctgcaatctgaccggactcaaaacacaggggcaaaagtgccacggcttttacatcaagccgacaaaggactcttacaccatcaatgactgcgctgcctggactatcaacggcacacccctgaacatgatcgaccccggcgaatctgagaaatacctcggcctgcagtttgacccgtggattggaatagcaaggtccggtctctccacaaaactagatttttggcttcagcggatcgatcaagcaccacttaaacctctgcagaaaactgatattctcaaaacatacaccatccctcggctgatctacatagctgaccactcagaagtgaaaagcgcactactcgaaacccttgaccagaagatccggacagcggtcaaggaatggcttcacctacctccgtgcacctgcgatgccatcctgtactcgagcacgagagacggcggtttgggcatcaccaaattggcaggactgatccccagcgtgcaggcccgtagactgcatcggatcgcacagtcatctgacgatacgatgaaatgcttcatggaaaaagagaaaatggaacagctgcataagaaattgtggattcaagctggaggggacagagagaacataccctcgatttgggaagcaccaccgtcgagtgaaccaccaaacaacgtgagcacaaattcggaatgggaagcaccgacccagaaagataaatttccaaagccttgcaattggaggaaaaacgaattcaaaaaatggaccaaattggcatcccaaggccgcggaattgtaaattttgaaagagacaaaattagtaaccattggatccaatactacagacgcatacctcacaggaaactcctcactgcactacaactcagggccaacgtttaccccacgagagaatttctagccaggggtagacaagaccaatacatcaaggcgtgtaggcactgcgatgcggacaacgaatcctgcgcccacatcatcggcaactgcccagtgacacaggacgcccgaatcaagaggcacaattacatctgcgaactgcttctcgaggaggcgaagaagaaggactgggtagtgttcaaggaaccgcacataagggattccaacaaggaactgtacaaacctgacctgatatttgtgaaggatgggcgtgcacttgtcgtggatgtgacagtacggtatgaagcagccaaatcatcgctggaggaagccgctgcagagaaagtgagaaagtacaaacacctggaaacggaagtaagacatctcacgaatgcaaaggacgttacttttgtgggctttcccctaggagcgcgggggaaatggcaccaagataactttaaacttttgactgagcttggcctctccaaatcgaggcaagtgaaaatggcagagactttttccacagtagcgctcttttcatctgtggacattgtacatatgtttgccagtagggccagaaaatctatggttatgtgataataggctgccttctgcggggcttgccttctggccatgcccttcttctctcccttgcacctgtacctcttggtctttgaataaagcctgagtaggaaggaccggtaaaaaaaaaaaaaaaaaaaaaaaaaaaaaaacgttgactaaaaaaaaaaaaaaaaaaaaaaaaaaaaaaaaaaaaaaaaaaaaaaaaaaaaaaaaaaaaaaaaaaaaaa

SEQ ID NO: 11112 - DNA, 5264 bp, synthetic construct
  source 1..5264: mol_type = other DNA
gaaataagagagaaaagaagagtaagaagaaatataagagaattcgccaccatggcccctaagaaaaagcggaaggtgaatatcagcggctctagctgcggcagccccaacagcgccgacaccagcagcgacttcaaggacctgtggaccaagctgaaggaatgccacgaccgggaagtgcagggactccaggtgaaggtcaccaaactcaagcaagaaagaatcctggacgcccagagactggaagaattcttcaccaagaaccagcagctgagagagcagcagaaagtgctgcacgagacaatcaaggttctggaagatagactgcgggccggcctgtgcgacagatgcgccgtgaccgaggaacacatgcgcaaaaagcagcaggagttcgagaacattagacagcaaaatctgaaattgatcacagagctgatgaacgagagaaacacactgcaggaggagaacaagaagctgagcgagcagctgcaacagaagatcgagaatgatcagcaacaccaggccgctgagctggaatgtgaagaggacgtgatccccgacagcccaatcacagctttcagcttttctggcgtgaacagactgaggcggaaggaaaacccccacgtgcggtacatcgagcagacccataccaagctggaacacagcgtgtgtgccaacgagatgagaaaggtgtccaagtcctccacccatccccagcacaaccctaacgaaaatgagatcctggtggctgatacctacgaccagtctcagagccctatggccaaggcccacggcaccagctcttatacccctgataagagctccttcaacctggccaccgtggtggccgagacactgggcctgggcgtgcaggaggaaagcgagacacagggcccaatgagccctctgggagatgagctgtaccactgcctggaaggcaaccacaagaaacagccttttgagtccggctccgagactcctggaacaagcgagagcgctacacctgagggcagccctaagagaaaggtgtccagcgccgagggcgctgccaaggaagagcctaaacggagaagcgccagactgagcgccaagccccccgccaaggtggaagccaagcctaagaaggccgccgctaaggacaagagcagcgataagaaagtccagaccaagggcaagcggggcgccaaaggcaaacaggccgaggtggccaaccaggagacaaaggaagatctgcctgctgagaacggcgaaaccaagaccgaggaatctccagcttctgacgaggccggagagaaggaggccaaaagcgacagcggctctgagacacctggaacaagcgagagcgccaccccggaatcctatgaacaacttgcaccacaaccgtgtgtgggagaaactttacattctagcctcccacgagacagtgaactgtttgtgcctgaagaggggagcagcgagaaggagagcgaggacgcgccaaaaacatctcctccgacgcctgggaaacatggtttggaacagactggggaggaaaaagtgatggtgactgttcctgacaaaaatccaccttgtccttgctgtggtacccgggtaaactctgtgttgaatctgattgaacatctgaaagtgtcacacgggaaaaggggggtttgttttcggtgtgcaaaatgtggaaaggaaaatagtaactatcacagtgttgtttgtcattttaagaaatgcaggggtccagagacggagaaagccccagctggggagtggatttgtgaggaatgcaacagagattttacaaccaaaattggcctgggacaacacaagagattggcacacccagcagtgagaaatcaggaaaggatcgttgcttcccaaccgaaagaaacatcaaatagaggtgctcacaaaaggtgctggacaaaggaggaggaagaattactaataagactggaggctcagttcgagggaaacaaaaatattaataagcttattgcagaacacataaccaccaaaacagctaagcagatcagtgacaaaaggcgattgctgtccagaaagccagcagaggagccacgtgaggagcctggaacgtgtcatcacaccaggagagcagctgcgagcctgagaacggagcctgagatgagtcatcacgcccaggcagaggacagagataatggacctgggagacgccctctgccaggcagggcagctgccggagggagaacaatggacgagataagacgccaccctgataagggcaacggacagcagagacccaccaagcaaaaatcagaagaacagctgcaggcttactataaaaagacactagaggaacgactttcagctggggcacttaacaccttcccccgagcattcaagcaggtaatggaaggccgggatataaagctagtaatcaatcagacagcgcaggactgcttcggatgcctggaatccataagccaaataagaacggcaacccgagataaaaaggacacggtgacccgggagaaacacccaaagaaaccttttcagaagtggatgaagaagagagcaatcaaaaaaggtaattatcttcggttccagcgtttattttatcttgatagagggaaactggctaaaatcattttagatgatattgaatgcttgtcttgtgacataccactcagtgaaatttattcggtttttaaaacaagatgggaaacaactggtagctttaaaagccttggggactttaaaacttacgggaaggctgacaacactgccttcagagaattaattacggctaaagaaattgagaaaaatgtgcaggaaatgagcaaaggctcggctcccggtccagacgggattactcttggggacgtcgtaaagatggatcccgagttttcccggaccatggagattttcaatttatggttaacaactggtaaaatcccggacatggtgagggggtgcagaaccgttttgattccaaaatcatcaaagccggatcgtttgaaagacattaataactggagacctatcacgatcggttccatcttgctgagactgttctccaggattgtaacagctaggctgagcaaagcgtgccccctgaacccaaggcaaagaggctttatcagagcggcgggatgctctgaaaacttaaaactcctgcaaactataatttggtcggccaaaagagaacacagaccactgggtgttgtattcgtggacatcgccaaggcttttgacaccgtaagccaccagcacatcattcatgctttgcagcaaagagaggtggatccccacatcgtcggtctggtgagcaatatgtacgagaacatcagtacgtatatcaccacaaagaggaacacacacacagacaaaatccagatccgggttggagtaaagcagggtgacccgatgtcgccccttttatttaacctggcaatggaccctctattatgcaagctggaagagagtggcaaaggataccaccgaggacagagcagcatcacagcgatggcatttgcagacgatctggttttgctgagcgactcctgggaaaatatgaatacaaatattagcatactggagaccttctgcaatctgaccggactcaaaacacaggggcaaaagtgccacggcttttacatcaagccgacaaaggactcttacaccatcaatgactgcgctgcctggactatcaacggcacacccctgaacatgatcgaccccggcgaatctgagaaatacctcggcctgcagtttgacccgtggattggaatagcaaggtccggtctctccacaaaactagatttttggcttcagcggatcgatcaagcaccacttaaacctctgcagaaaactgatattctcaaaacatacaccatccctcggctgatctacatagctgaccactcagaagtgaaaagcgcactactcgaaacccttgaccagaagatccggacagcggtcaaggaatggcttcacctacctccgtgcacctgcgatgccatcctgtactcgagcacgagagacggcggtttgggcatcaccaaattggcaggactgatccccagcgtgcaggcccgtagactgcatcggatcgcacagtcatctgacgatacgatgaaatgcttcatggaaaaagagaaaatggaacagctgcataagaaattgtggattcaagctggaggggacagagagaacataccctcgatttgggaagcaccaccgtcgagtgaaccaccaaacaacgtgagcacaaattcggaatgggaagcaccgacccagaaagataaatttccaaagccttgcaattggaggaaaaacgaattcaaaaaatggaccaaattggcatcccaaggccgcggaattgtaaattttgaaagagacaaaattagtaaccattggatccaatactacagacgcatacctcacaggaaactcctcactgcactacaactcagggccaacgtttaccccacgagagaatttctagccaggggtagacaagaccaatacatcaaggcgtgtaggcactgcgatgcggacaacgaatcctgcgcccacatcatcggcaactgcccagtgacacaggacgcccgaatcaagaggcacaattacatctgcgaactgcttctcgaggaggcgaagaagaaggactgggtagtgttcaaggaaccgcacataagggattccaacaaggaactgtacaaacctgacctgatatttgtgaaggatgggcgtgcacttgtcgtggatgtgacagtacggtatgaagcagccaaatcatcgctggaggaagccgctgcagagaaagtgagaaagtacaaacacctggaaacggaagtaagacatctcacgaatgcaaaggacgttacttttgtgggctttcccctaggagcgcgggggaaatggcaccaagataactttaaacttttgactgagcttggcctctccaaatcgaggcaagtgaaaatggcagagactttttccacagtagcgctcttttcatctgtggacattgtacatatgtttgccagtagggccagaaaatctatggttatgtgataataggctgccttctgcggggcttgccttctggccatgcccttcttctctcccttgcacctgtacctcttggtctttgaataaagcctgagtaggaaggaccggtaaaaaaaaaaaaaaaaaaaaaaaaaaaaaaacgttgactaaaaaaaaaaaaaaaaaaaaaaaaaaaaaaaaaaaaaaaaaaaaaaaaaaaaaaaaaaaaaaaaaaaaaa

SEQ ID NO: 11113 - DNA, 5264 bp, synthetic construct
  source 1..5264: mol_type = other DNA
gaaataagagagaaaagaagagtaagaagaaatataagagaattcgccaccatggcccctaagaaaaagcggaaggtgaatatcagcggctctagctgcggcagccccaacagcgccgacaccagcagcgacttcaaggacctgtggaccaagctgaaggaatgccacgaccgggaagtgcagggactccaggtgaaggtcaccaaactcaagcaagaaagaatcctggacgcccagagactggaagaattcttcaccaagaaccagcagctgagagagcagcagaaagtgctgcacgagacaatcaaggttctggaagatagactgcgggccggcctgtgcgacagatgcgccgtgaccgaggaacacatgcgcaaaaagcagcaggagttcgagaacattagacagcaaaatctgaaattgatcacagagctgatgaacgagagaaacacactgcaggaggagaacaagaagctgagcgagcagctgcaacagaagatcgagaatgatcagcaacaccaggccgctgagctggaatgtgaagaggacgtgatccccgacagcccaatcacagctttcagcttttctggcgtgaacagactgaggcggaaggaaaacccccacgtgcggtacatcgagcagacccataccaagctggaacacagcgtgtgtgccaacgagatgagaaaggtgtccaagtcctccacccatccccagcacaaccctaacgaaaatgagatcctggtggctgatacctacgaccagtctcagagccctatggccaaggcccacggcaccagctcttatacccctgataagagctccttcaacctggccaccgtggtggccgagacactgggcctgggcgtgcaggaggaaagcgagacacagggcccaatgagccctctgggagatgagctgtaccactgcctggaaggcaaccacaagaaacagccttttgagtccggctccgagactcctggaacaagcgagagcgctacacctgagggcagccctaagagaaaggtgtccagcgccgagggcgctgccaaggaagagcctaaacggagaagcgccagactgagcgccaagccccccgccaaggtggaagccaagcctaagaaggccgccgctaaggacaagagcagcgataagaaagtccagaccaagggcaagcggggcgccaaaggcaaacaggccgaggtggccaaccaggagacaaaggaagatctgcctgctgagaacggcgaaaccaagaccgaggaatctccagcttctgacgaggccggagagaaggaggccaaaagcgacagcggctctgagacacctggaacaagcgagagcgccaccccggaatcctatgaacaacttgcaccacaaccgtgtgtgggagaaactttacattctagcctcccacgagacagtgaactgtttgtgcctgaagaggggagcagcgagaaggagagcgaggacgcgccaaaaacatctcctccgacgcctgggaaacatggtttggaacagactggggaggaaaaagtgatggtgactgttcctgacaaaaatccaccttgtccttgctgtggtacccgggtaaactctgtgttgaatctgattgaacatctgaaagtgtcacacgggaaaaggggggtttgttttcggtgtgcaaaatgtggaaaggaaaatagtaactatcacagtgttgtttgtcattttaagaaatgcaggggtccagagacggagaaagccccagctggggagtggatttgtgaggtatgcaacagagattttacaaccaaaattggcctgggacaacacaagagattggcacacccagcagtgagaaatcaggaaaggatcgttgcttcccaaccgaaagccacatcaaatagaggtgctcacaaaaggtgctggacaaaggaggaggaagaattactaataagactggaggctcagttcgagggaaacaaaaatattaataagcttattgcagaacacataaccaccaaaacagctaagcagatcagtgacaaaaggcgattgctgtccagaaagccagcagaggagccacgtgaggagcctggaacgtgtcatcacaccaggagagcagctgcgagcctgagaacggagcctgagatgagtcatcacgcccaggcagaggacagagataatggacctgggagacgccctctgccaggcagggcagctgccggagggagaacaatggacgagataagacgccaccctgataagggcaacggacagcagagacccaccaagcaaaaatcagaagaacagctgcaggcttactataaaaagacactagaggaacgactttcagctggggcacttaacaccttcccccgagcattcaagcaggtaatggaaggccgggatataaagctagtaatcaatcagacagcgcaggactgcttcggatgcctggaatccataagccaaataagaacggcaacccgagataaaaaggacacggtgacccgggagaaacacccaaagaaaccttttcagaagtggatgaagaagagagcaatcaaaaaaggtaattatcttcggttccagcgtttattttatcttgatagagggaaactggctaaaatcattttagatgatattgaatgcttgtcttgtgacataccactcagtgaaatttattcggtttttaaaacaagatgggaaacaactggtagctttaaaagccttggggactttaaaacttacgggaaggctgacaacactgccttcagagaattaattacggctaaagaaattgagaaaaatgtgcaggaaatgagcaaaggctcggctcccggtccagacgggattactcttggggacgtcgtaaagatggatcccgagttttcccggaccatggagattttcaatttatggttaacaactggtaaaatcccggacatggtgagggggtgcagaaccgttttgattccaaaatcatcaaagccggatcgtttgaaagacattaataactggagacctatcacgatcggttccatcttgctgagactgttctccaggattgtaacagctaggctgagcaaagcgtgccccctgaacccaaggcaaagaggctttatcagagcggcgggatgctctgaaaacttaaaactcctgcaaactataatttggtcggccaaaagagaacacagaccactgggtgttgtattcgtggacatcgccaaggcttttgacaccgtaagccaccagcacatcattcatgctttgcagcaaagagaggtggatccccacatcgtcggtctggtgagcaatatgtacgagaacatcagtacgtatatcaccacaaagaggaacacacacacagacaaaatccagatccgggttggagtaaagcagggtgacccgatgtcgccccttttatttaacctggcaatggaccctctattatgcaagctggaagagagtggcaaaggataccaccgaggacagagcagcatcacagcgatggcatttgcagacgatctggttttgctgagcgactcctgggaaaatatgaatacaaatattagcatactggagaccttctgcaatctgaccggactcaaaacacaggggcaaaagtgccacggcttttacatcaagccgacaaaggactcttacaccatcaatgactgcgctgcctggactatcaacggcacacccctgaacatgatcgaccccggcgaatctgagaaatacctcggcctgcagtttgacccgtggattggaatagcaaggtccggtctctccacaaaactagatttttggcttcagcggatcgatcaagcaccacttaaacctctgcagaaaactgatattctcaaaacatacaccatccctcggctgatctacatagctgaccactcagaagtgaaaagcgcactactcgaaacccttgaccagaagatccggacagcggtcaaggaatggcttcacctacctccgtgcacctgcgatgccatcctgtactcgagcacgagagacggcggtttgggcatcaccaaattggcaggactgatccccagcgtgcaggcccgtagactgcatcggatcgcacagtcatctgacgatacgatgaaatgcttcatggaaaaagagaaaatggaacagctgcataagaaattgtggattcaagctggaggggacagagagaacataccctcgatttgggaagcaccaccgtcgagtgaaccaccaaacaacgtgagcacaaattcggaatgggaagcaccgacccagaaagataaatttccaaagccttgcaattggaggaaaaacgaattcaaaaaatggaccaaattggcatcccaaggccgcggaattgtaaattttgaaagagacaaaattagtaaccattggatccaatactacagacgcatacctcacaggaaactcctcactgcactacaactcagggccaacgtttaccccacgagagaatttctagccaggggtagacaagaccaatacatcaaggcgtgtaggcactgcgatgcggacaacgaatcctgcgcccacatcatcggcaactgcccagtgacacaggacgcccgaatcaagaggcacaattacatctgcgaactgcttctcgaggaggcgaagaagaaggactgggtagtgttcaaggaaccgcacataagggattccaacaaggaactgtacaaacctgacctgatatttgtgaaggatgggcgtgcacttgtcgtggatgtgacagtacggtatgaagcagccaaatcatcgctggaggaagccgctgcagagaaagtgagaaagtacaaacacctggaaacggaagtaagacatctcacgaatgcaaaggacgttacttttgtgggctttcccctaggagcgcgggggaaatggcaccaagataactttaaacttttgactgagcttggcctctccaaatcgaggcaagtgaaaatggcagagactttttccacagtagcgctcttttcatctgtggacattgtacatatgtttgccagtagggccagaaaatctatggttatgtgataataggctgccttctgcggggcttgccttctggccatgcccttcttctctcccttgcacctgtacctcttggtctttgaataaagcctgagtaggaaggaccggtaaaaaaaaaaaaaaaaaaaaaaaaaaaaaaacgttgactaaaaaaaaaaaaaaaaaaaaaaaaaaaaaaaaaaaaaaaaaaaaaaaaaaaaaaaaaaaaaaaaaaaaaa

SEQ ID NO: 11114 - DNA, 5264 bp, synthetic construct
  source 1..5264: mol_type = other DNA
gaaataagagagaaaagaagagtaagaagaaatataagagaattcgccaccatggcccctaagaaaaagcggaaggtgaatatcagcggctctagctgcggcagccccaacagcgccgacaccagcagcgacttcaaggacctgtggaccaagctgaaggaatgccacgaccgggaagtgcagggactccaggtgaaggtcaccaaactcaagcaagaaagaatcctggacgcccagagactggaagaattcttcaccaagaaccagcagctgagagagcagcagaaagtgctgcacgagacaatcaaggttctggaagatagactgcgggccggcctgtgcgacagatgcgccgtgaccgaggaacacatgcgcaaaaagcagcaggagttcgagaacattagacagcaaaatctgaaattgatcacagagctgatgaacgagagaaacacactgcaggaggagaacaagaagctgagcgagcagctgcaacagaagatcgagaatgatcagcaacaccaggccgctgagctggaatgtgaagaggacgtgatccccgacagcccaatcacagctttcagcttttctggcgtgaacagactgaggcggaaggaaaacccccacgtgcggtacatcgagcagacccataccaagctggaacacagcgtgtgtgccaacgagatgagaaaggtgtccaagtcctccacccatccccagcacaaccctaacgaaaatgagatcctggtggctgatacctacgaccagtctcagagccctatggccaaggcccacggcaccagctcttatacccctgataagagctccttcaacctggccaccgtggtggccgagacactgggcctgggcgtgcaggaggaaagcgagacacagggcccaatgagccctctgggagatgagctgtaccactgcctggaaggcaaccacaagaaacagccttttgagtccggctccgagactcctggaacaagcgagagcgctacacctgagggcagccctaagagaaaggtgtccagcgccgagggcgctgccaaggaagagcctaaacggagaagcgccagactgagcgccaagccccccgccaaggtggaagccaagcctaagaaggccgccgctaaggacaagagcagcgataagaaagtccagaccaagggcaagcggggcgccaaaggcaaacaggccgaggtggccaaccaggagacaaaggaagatctgcctgctgagaacggcgaaaccaagaccgaggaatctccagcttctgacgaggccggagagaaggaggccaaaagcgacagcggctctgagacacctggaacaagcgagagcgccaccccggaatcctatgaacaacttgcaccacaaccgtgtgtgggagaaactttacattctagcctcccacgagacagtgaactgtttgtgcctgaagaggggagcagcgagaaggagagcgaggacgcgccaaaaacatctcctccgacgcctgggaaacatggtttggaacagactggggaggaaaaagtgatggtgactgttcctgacaaaaatccaccttgtccttgctgtggtacccgggtaaactctgtgttgaatctgattgaacatctgaaagtgtcacacgggaaaaggggggtttgttttcggtgtgcaaaatgtggaaaggaaaatagtaactatcacagtgttgtttgtcattttaagaaatgcaggggtccagagacggagaaagccccagctggggagtggatttgtgaggtatgcaacagagattttacaaccaaaattggcctgggacaacacaagagattggcacacccagcagtgagaaatcaggaaaggatcgttgcttcccaaccgaaagaaacatcaaatagaggtgctcacaaaaggtgctggacaaaggaggaggaagaattactaataagactggaggctcagttcgagggaaacaaaaatattaataagcttattgcagaacacataaccaccaaaacagctaagcagatcagtgacaaaaggcgattgctgtccagaaagccagcagaggagccacgtgaggagcctggaacgtgtcatcacaccaggagagcagctgcgagcctgagaacggagcctgagatgagtcatcacgcccaggcagaggacagagataatggacctgggagacgccctctgccaggcagggcagctgccggagggagaacaatggacgagataagacgccaccctgataagggcaacggacagcagagacccaccaagcaaaaatcagaagaacagctgcaggcttactataaaaagacactagaggaacgactttcagctggggcacttaacaccttcccccgagcattcaagcaggtaatggaaggccgggatataaagctagtaatcaatcagacagcgcaggactgcttcgcctgcctggaatccataagccaaataagaacggcaacccgagataaaaaggacacggtgacccgggagaaacacccaaagaaaccttttcagaagtggatgaagaagagagcaatcaaaaaaggtaattatcttcggttccagcgtttattttatcttgatagagggaaactggctaaaatcattttagatgatattgaatgcttgtcttgtgacataccactcagtgaaatttattcggtttttaaaacaagatgggaaacaactggtagctttaaaagccttggggactttaaaacttacgggaaggctgacaacactgccttcagagaattaattacggctaaagaaattgagaaaaatgtgcaggaaatgagcaaaggctcggctcccggtccagacgggattactcttggggacgtcgtaaagatggatcccgagttttcccggaccatggagattttcaatttatggttaacaactggtaaaatcccggacatggtgagggggtgcagaaccgttttgattccaaaatcatcaaagccggatcgtttgaaagacattaataactggagacctatcacgatcggttccatcttgctgagactgttctccaggattgtaacagctaggctgagcaaagcgtgccccctgaacccaaggcaaagaggctttatcagagcggcgggatgctctgaaaacttaaaactcctgcaaactataatttggtcggccaaaagagaacacagaccactgggtgttgtattcgtggacatcgccaaggcttttgacaccgtaagccaccagcacatcattcatgctttgcagcaaagagaggtggatccccacatcgtcggtctggtgagcaatatgtacgagaacatcagtacgtatatcaccacaaagaggaacacacacacagacaaaatccagatccgggttggagtaaagcagggtgacccgatgtcgccccttttatttaacctggcaatggaccctctattatgcaagctggaagagagtggcaaaggataccaccgaggacagagcagcatcacagcgatggcatttgcagacgatctggttttgctgagcgactcctgggaaaatatgaatacaaatattagcatactggagaccttctgcaatctgaccggactcaaaacacaggggcaaaagtgccacggcttttacatcaagccgacaaaggactcttacaccatcaatgactgcgctgcctggactatcaacggcacacccctgaacatgatcgaccccggcgaatctgagaaatacctcggcctgcagtttgacccgtggattggaatagcaaggtccggtctctccacaaaactagatttttggcttcagcggatcgatcaagcaccacttaaacctctgcagaaaactgatattctcaaaacatacaccatccctcggctgatctacatagctgaccactcagaagtgaaaagcgcactactcgaaacccttgaccagaagatccggacagcggtcaaggaatggcttcacctacctccgtgcacctgcgatgccatcctgtactcgagcacgagagacggcggtttgggcatcaccaaattggcaggactgatccccagcgtgcaggcccgtagactgcatcggatcgcacagtcatctgacgatacgatgaaatgcttcatggaaaaagagaaaatggaacagctgcataagaaattgtggattcaagctggaggggacagagagaacataccctcgatttgggaagcaccaccgtcgagtgaaccaccaaacaacgtgagcacaaattcggaatgggaagcaccgacccagaaagataaatttccaaagccttgcaattggaggaaaaacgaattcaaaaaatggaccaaattggcatcccaaggccgcggaattgtaaattttgaaagagacaaaattagtaaccattggatccaatactacagacgcatacctcacaggaaactcctcactgcactacaactcagggccaacgtttaccccacgagagaatttctagccaggggtagacaagaccaatacatcaaggcgtgtaggcactgcgatgcggacaacgaatcctgcgcccacatcatcggcaactgcccagtgacacaggacgcccgaatcaagaggcacaattacatctgcgaactgcttctcgaggaggcgaagaagaaggactgggtagtgttcaaggaaccgcacataagggattccaacaaggaactgtacaaacctgacctgatatttgtgaaggatgggcgtgcacttgtcgtggatgtgacagtacggtatgaagcagccaaatcatcgctggaggaagccgctgcagagaaagtgagaaagtacaaacacctggaaacggaagtaagacatctcacgaatgcaaaggacgttacttttgtgggctttcccctaggagcgcgggggaaatggcaccaagataactttaaacttttgactgagcttggcctctccaaatcgaggcaagtgaaaatggcagagactttttccacagtagcgctcttttcatctgtggacattgtacatatgtttgccagtagggccagaaaatctatggttatgtgataataggctgccttctgcggggcttgccttctggccatgcccttcttctctcccttgcacctgtacctcttggtctttgaataaagcctgagtaggaaggaccggtaaaaaaaaaaaaaaaaaaaaaaaaaaaaaaacgttgactaaaaaaaaaaaaaaaaaaaaaaaaaaaaaaaaaaaaaaaaaaaaaaaaaaaaaaaaaaaaaaaaaaaaaa

SEQ ID NO: 11115 - DNA, 5264 bp, synthetic construct
  source 1..5264: mol_type = other DNA
gaaataagagagaaaagaagagtaagaagaaatataagagaattcgccaccatggcccctaagaaaaagcggaaggtgaatatcagcggctctagctgcggcagccccaacagcgccgacaccagcagcgacttcaaggacctgtggaccaagctgaaggaatgccacgaccgggaagtgcagggactccaggtgaaggtcaccaaactcaagcaagaaagaatcctggacgcccagagactggaagaattcttcaccaagaaccagcagctgagagagcagcagaaagtgctgcacgagacaatcaaggttctggaagatagactgcgggccggcctgtgcgacagatgcgccgtgaccgaggaacacatgcgcaaaaagcagcaggagttcgagaacattagacagcaaaatctgaaattgatcacagagctgatgaacgagagaaacacactgcaggaggagaacaagaagctgagcgagcagctgcaacagaagatcgagaatgatcagcaacaccaggccgctgagctggaatgtgaagaggacgtgatccccgacagcccaatcacagctttcagcttttctggcgtgaacagactgaggcggaaggaaaacccccacgtgcggtacatcgagcagacccataccaagctggaacacagcgtgtgtgccaacgagatgagaaaggtgtccaagtcctccacccatccccagcacaaccctaacgaaaatgagatcctggtggctgatacctacgaccagtctcagagccctatggccaaggcccacggcaccagctcttatacccctgataagagctccttcaacctggccaccgtggtggccgagacactgggcctgggcgtgcaggaggaaagcgagacacagggcccaatgagccctctgggagatgagctgtaccactgcctggaaggcaaccacaagaaacagccttttgagtccggctccgagactcctggaacaagcgagagcgctacacctgagggcagccctaagagaaaggtgtccagcgccgagggcgctgccaaggaagagcctaaacggagaagcgccagactgagcgccaagccccccgccaaggtggaagccaagcctaagaaggccgccgctaaggacaagagcagcgataagaaagtccagaccaagggcaagcggggcgccaaaggcaaacaggccgaggtggccaaccaggagacaaaggaagatctgcctgctgagaacggcgaaaccaagaccgaggaatctccagcttctgacgaggccggagagaaggaggccaaaagcgacagcggctctgagacacctggaacaagcgagagcgccaccccggaatcctatgaacaacttgcaccacaaccgtgtgtgggagaaactttacattctagcctcccacgagacagtgaactgtttgtgcctgaagaggggagcagcgagaaggagagcgaggacgcgccaaaaacatctcctccgacgcctgggaaacatggtttggaacagactggggaggaaaaagtgatggtgactgttcctgacaaaaatccaccttgtccttgctgtggtacccgggtaaactctgtgttgaatctgattgaacatctgaaagtgtcacacgggaaaaggggggtttgttttcggtgtgcaaaatgtggaaaggaaaatagtaactatcacagtgttgtttgtcattttaagaaatgcaggggtccagagacggagaaagccccagctggggagtggatttgtgaggtatgcaacagagattttacaaccaaaattggcctgggacaacacaagagattggcacacccagcagtgagaaatcaggaaaggatcgttgcttcccaaccgaaagaaacatcaaatagaggtgctcacaaaaggtgctggacaaaggaggaggaagaattactaataagactggaggctcagttcgagggaaacaaaaatattaataagcttattgcagaacacataaccaccaaaacagctaagcagatcagtgacaaaaggcgattgctgtccagaaagccagcagaggagccacgtgaggagcctggaacgtgtcatcacaccaggagagcagctgcgagcctgagaacggagcctgagatgagtcatcacgcccaggcagaggacagagataatggacctgggagacgccctctgccaggcagggcagctgccggagggagaacaatggacgagataagacgccaccctgataagggcaacggacagcagagacccaccaagcaaaaatcagaagaacagctgcaggcttactataaaaagacactagaggaacgactttcagctggggcacttaacaccttcccccgagcattcaagcaggtaatggaaggccgggatataaagctagtaatcaatcagacagcgcaggactgcttcggatgcctggaatccataagccaaataagaacggcaggccgagataaaaaggacacggtgacccgggagaaacacccaaagaaaccttttcagaagtggatgaagaagagagcaatcaaaaaaggtaattatcttcggttccagcgtttattttatcttgatagagggaaactggctaaaatcattttagatgatattgaatgcttgtcttgtgacataccactcagtgaaatttattcggtttttaaaacaagatgggaaacaactggtagctttaaaagccttggggactttaaaacttacgggaaggctgacaacactgccttcagagaattaattacggctaaagaaattgagaaaaatgtgcaggaaatgagcaaaggctcggctcccggtccagacgggattactcttggggacgtcgtaaagatggatcccgagttttcccggaccatggagattttcaatttatggttaacaactggtaaaatcccggacatggtgagggggtgcagaaccgttttgattccaaaatcatcaaagccggatcgtttgaaagacattaataactggagacctatcacgatcggttccatcttgctgagactgttctccaggattgtaacagctaggctgagcaaagcgtgccccctgaacccaaggcaaagaggctttatcagagcggcgggatgctctgaaaacttaaaactcctgcaaactataatttggtcggccaaaagagaacacagaccactgggtgttgtattcgtggacatcgccaaggcttttgacaccgtaagccaccagcacatcattcatgctttgcagcaaagagaggtggatccccacatcgtcggtctggtgagcaatatgtacgagaacatcagtacgtatatcaccacaaagaggaacacacacacagacaaaatccagatccgggttggagtaaagcagggtgacccgatgtcgccccttttatttaacctggcaatggaccctctattatgcaagctggaagagagtggcaaaggataccaccgaggacagagcagcatcacagcgatggcatttgcagacgatctggttttgctgagcgactcctgggaaaatatgaatacaaatattagcatactggagaccttctgcaatctgaccggactcaaaacacaggggcaaaagtgccacggcttttacatcaagccgacaaaggactcttacaccatcaatgactgcgctgcctggactatcaacggcacacccctgaacatgatcgaccccggcgaatctgagaaatacctcggcctgcagtttgacccgtggattggaatagcaaggtccggtctctccacaaaactagatttttggcttcagcggatcgatcaagcaccacttaaacctctgcagaaaactgatattctcaaaacatacaccatccctcggctgatctacatagctgaccactcagaagtgaaaagcgcactactcgaaacccttgaccagaagatccggacagcggtcaaggaatggcttcacctacctccgtgcacctgcgatgccatcctgtactcgagcacgagagacggcggtttgggcatcaccaaattggcaggactgatccccagcgtgcaggcccgtagactgcatcggatcgcacagtcatctgacgatacgatgaaatgcttcatggaaaaagagaaaatggaacagctgcataagaaattgtggattcaagctggaggggacagagagaacataccctcgatttgggaagcaccaccgtcgagtgaaccaccaaacaacgtgagcacaaattcggaatgggaagcaccgacccagaaagataaatttccaaagccttgcaattggaggaaaaacgaattcaaaaaatggaccaaattggcatcccaaggccgcggaattgtaaattttgaaagagacaaaattagtaaccattggatccaatactacagacgcatacctcacaggaaactcctcactgcactacaactcagggccaacgtttaccccacgagagaatttctagccaggggtagacaagaccaatacatcaaggcgtgtaggcactgcgatgcggacaacgaatcctgcgcccacatcatcggcaactgcccagtgacacaggacgcccgaatcaagaggcacaattacatctgcgaactgcttctcgaggaggcgaagaagaaggactgggtagtgttcaaggaaccgcacataagggattccaacaaggaactgtacaaacctgacctgatatttgtgaaggatgggcgtgcacttgtcgtggatgtgacagtacggtatgaagcagccaaatcatcgctggaggaagccgctgcagagaaagtgagaaagtacaaacacctggaaacggaagtaagacatctcacgaatgcaaaggacgttacttttgtgggctttcccctaggagcgcgggggaaatggcaccaagataactttaaacttttgactgagcttggcctctccaaatcgaggcaagtgaaaatggcagagactttttccacagtagcgctcttttcatctgtggacattgtacatatgtttgccagtagggccagaaaatctatggttatgtgataataggctgccttctgcggggcttgccttctggccatgcccttcttctctcccttgcacctgtacctcttggtctttgaataaagcctgagtaggaaggaccggtaaaaaaaaaaaaaaaaaaaaaaaaaaaaaaacgttgactaaaaaaaaaaaaaaaaaaaaaaaaaaaaaaaaaaaaaaaaaaaaaaaaaaaaaaaaaaaaaaaaaaaaaa

SEQ ID NO: 11116 - DNA, 5264 bp, synthetic construct
  source 1..5264: mol_type = other DNA
gaaataagagagaaaagaagagtaagaagaaatataagagaattcgccaccatggcccctaagaaaaagcggaaggtgaatatcagcggctctagctgcggcagccccaacagcgccgacaccagcagcgacttcaaggacctgtggaccaagctgaaggaatgccacgaccgggaagtgcagggactccaggtgaaggtcaccaaactcaagcaagaaagaatcctggacgcccagagactggaagaattcttcaccaagaaccagcagctgagagagcagcagaaagtgctgcacgagacaatcaaggttctggaagatagactgcgggccggcctgtgcgacagatgcgccgtgaccgaggaacacatgcgcaaaaagcagcaggagttcgagaacattagacagcaaaatctgaaattgatcacagagctgatgaacgagagaaacacactgcaggaggagaacaagaagctgagcgagcagctgcaacagaagatcgagaatgatcagcaacaccaggccgctgagctggaatgtgaagaggacgtgatccccgacagcccaatcacagctttcagcttttctggcgtgaacagactgaggcggaaggaaaacccccacgtgcggtacatcgagcagacccataccaagctggaacacagcgtgtgtgccaacgagatgagaaaggtgtccaagtcctccacccatccccagcacaaccctaacgaaaatgagatcctggtggctgatacctacgaccagtctcagagccctatggccaaggcccacggcaccagctcttatacccctgataagagctccttcaacctggccaccgtggtggccgagacactgggcctgggcgtgcaggaggaaagcgagacacagggcccaatgagccctctgggagatgagctgtaccactgcctggaaggcaaccacaagaaacagccttttgagtccggctccgagactcctggaacaagcgagagcgctacacctgagggcagccctaagagaaaggtgtccagcgccgagggcgctgccaaggaagagcctaaacggagaagcgccagactgagcgccaagccccccgccaaggtggaagccaagcctaagaaggccgccgctaaggacaagagcagcgataagaaagtccagaccaagggcaagcggggcgccaaaggcaaacaggccgaggtggccaaccaggagacaaaggaagatctgcctgctgagaacggcgaaaccaagaccgaggaatctccagcttctgacgaggccggagagaaggaggccaaaagcgacagcggctctgagacacctggaacaagcgagagcgccaccccggaatcctatgaacaacttgcaccacaaccgtgtgtgggagaaactttacattctagcctcccacgagacagtgaactgtttgtgcctgaagaggggagcagcgagaaggagagcgaggacgcgccaaaaacatctcctccgacgcctgggaaacatggtttggaacagactggggaggaaaaagtgatggtgactgttcctgacaaaaatccaccttgtccttgctgtggtacccgggtaaactctgtgttgaatctgattgaacatctgaaagtgtcacacgggaaaaggggggtttgttttcggtgtgcaaaatgtggaaaggaaaatagtaactatcacagtgttgtttgtcattttaagaaatgcaggggtccagagacggagaaagccccagctggggagtggatttgtgaggtatgcaacagagattttacaaccaaaattggcctgggacaacacaagagattggcacacccagcagtgagaaatcaggaaaggatcgttgcttcccaaccgaaagaaacatcaaatagaggtgctcacaaaaggtgctggacaaaggaggaggaagaattactaataagactggaggctcagttcgagggaaacaaaaatattaataagcttattgcagaacacataaccaccaaaacagctaagcagatcagtgacaaaaggcgattgctgtccagaaagccagcagaggagccacgtgaggagcctggaacgtgtcatcacaccaggagagcagctgcgagcctgagaacggagcctgagatgagtcatcacgcccaggcagaggacagagataatggacctgggagacgccctctgccaggcagggcagctgccggagggagaacaatggacgagataagacgccaccctgataagggcaacggacagcagagacccaccaagcaaaaatcagaagaacagctgcaggcttactataaaaagacactagaggaacgactttcagctggggcacttaacaccttcccccgagcattcaagcaggtaatggaaggccgggatataaagctagtaatcaatcagacagcgcaggactgcttcggatgcctggaatccataagccaaataagaacggcaacccgagataaaaaggacacggtgacccgggagaaacacccaaagaaaccttttcagaagtggatgaagaagagagcaatcaaaaaaggtaattatcttcggttccagcgtttattttatcttgatagagggaaactggctaaaatcattttagatgatattgaatgcttgtcttgtggcataccactcagtgaaatttattcggtttttaaaacaagatgggaaacaactggtagctttaaaagccttggggactttaaaacttacgggaaggctgacaacactgccttcagagaattaattacggctaaagaaattgagaaaaatgtgcaggaaatgagcaaaggctcggctcccggtccagacgggattactcttggggacgtcgtaaagatggatcccgagttttcccggaccatggagattttcaatttatggttaacaactggtaaaatcccggacatggtgagggggtgcagaaccgttttgattccaaaatcatcaaagccggatcgtttgaaagacattaataactggagacctatcacgatcggttccatcttgctgagactgttctccaggattgtaacagctaggctgagcaaagcgtgccccctgaacccaaggcaaagaggctttatcagagcggcgggatgctctgaaaacttaaaactcctgcaaactataatttggtcggccaaaagagaacacagaccactgggtgttgtattcgtggacatcgccaaggcttttgacaccgtaagccaccagcacatcattcatgctttgcagcaaagagaggtggatccccacatcgtcggtctggtgagcaatatgtacgagaacatcagtacgtatatcaccacaaagaggaacacacacacagacaaaatccagatccgggttggagtaaagcagggtgacccgatgtcgccccttttatttaacctggcaatggaccctctattatgcaagctggaagagagtggcaaaggataccaccgaggacagagcagcatcacagcgatggcatttgcagacgatctggttttgctgagcgactcctgggaaaatatgaatacaaatattagcatactggagaccttctgcaatctgaccggactcaaaacacaggggcaaaagtgccacggcttttacatcaagccgacaaaggactcttacaccatcaatgactgcgctgcctggactatcaacggcacacccctgaacatgatcgaccccggcgaatctgagaaatacctcggcctgcagtttgacccgtggattggaatagcaaggtccggtctctccacaaaactagatttttggcttcagcggatcgatcaagcaccacttaaacctctgcagaaaactgatattctcaaaacatacaccatccctcggctgatctacatagctgaccactcagaagtgaaaagcgcactactcgaaacccttgaccagaagatccggacagcggtcaaggaatggcttcacctacctccgtgcacctgcgatgccatcctgtactcgagcacgagagacggcggtttgggcatcaccaaattggcaggactgatccccagcgtgcaggcccgtagactgcatcggatcgcacagtcatctgacgatacgatgaaatgcttcatggaaaaagagaaaatggaacagctgcataagaaattgtggattcaagctggaggggacagagagaacataccctcgatttgggaagcaccaccgtcgagtgaaccaccaaacaacgtgagcacaaattcggaatgggaagcaccgacccagaaagataaatttccaaagccttgcaattggaggaaaaacgaattcaaaaaatggaccaaattggcatcccaaggccgcggaattgtaaattttgaaagagacaaaattagtaaccattggatccaatactacagacgcatacctcacaggaaactcctcactgcactacaactcagggccaacgtttaccccacgagagaatttctagccaggggtagacaagaccaatacatcaaggcgtgtaggcactgcgatgcggacaacgaatcctgcgcccacatcatcggcaactgcccagtgacacaggacgcccgaatcaagaggcacaattacatctgcgaactgcttctcgaggaggcgaagaagaaggactgggtagtgttcaaggaaccgcacataagggattccaacaaggaactgtacaaacctgacctgatatttgtgaaggatgggcgtgcacttgtcgtggatgtgacagtacggtatgaagcagccaaatcatcgctggaggaagccgctgcagagaaagtgagaaagtacaaacacctggaaacggaagtaagacatctcacgaatgcaaaggacgttacttttgtgggctttcccctaggagcgcgggggaaatggcaccaagataactttaaacttttgactgagcttggcctctccaaatcgaggcaagtgaaaatggcagagactttttccacagtagcgctcttttcatctgtggacattgtacatatgtttgccagtagggccagaaaatctatggttatgtgataataggctgccttctgcggggcttgccttctggccatgcccttcttctctcccttgcacctgtacctcttggtctttgaataaagcctgagtaggaaggaccggtaaaaaaaaaaaaaaaaaaaaaaaaaaaaaaacgttgactaaaaaaaaaaaaaaaaaaaaaaaaaaaaaaaaaaaaaaaaaaaaaaaaaaaaaaaaaaaaaaaaaaaaaa

SEQ ID NO: 11117 - DNA, 5264 bp, synthetic construct
  source 1..5264: mol_type = other DNA
gaaataagagagaaaagaagagtaagaagaaatataagagaattcgccaccatggcccctaagaaaaagcggaaggtgaatatcagcggctctagctgcggcagccccaacagcgccgacaccagcagcgacttcaaggacctgtggaccaagctgaaggaatgccacgaccgggaagtgcagggactccaggtgaaggtcaccaaactcaagcaagaaagaatcctggacgcccagagactggaagaattcttcaccaagaaccagcagctgagagagcagcagaaagtgctgcacgagacaatcaaggttctggaagatagactgcgggccggcctgtgcgacagatgcgccgtgaccgaggaacacatgcgcaaaaagcagcaggagttcgagaacattagacagcaaaatctgaaattgatcacagagctgatgaacgagagaaacacactgcaggaggagaacaagaagctgagcgagcagctgcaacagaagatcgagaatgatcagcaacaccaggccgctgagctggaatgtgaagaggacgtgatccccgacagcccaatcacagctttcagcttttctggcgtgaacagactgaggcggaaggaaaacccccacgtgcggtacatcgagcagacccataccaagctggaacacagcgtgtgtgccaacgagatgagaaaggtgtccaagtcctccacccatccccagcacaaccctaacgaaaatgagatcctggtggctgatacctacgaccagtctcagagccctatggccaaggcccacggcaccagctcttatacccctgataagagctccttcaacctggccaccgtggtggccgagacactgggcctgggcgtgcaggaggaaagcgagacacagggcccaatgagccctctgggagatgagctgtaccactgcctggaaggcaaccacaagaaacagccttttgagtccggctccgagactcctggaacaagcgagagcgctacacctgagggcagccctaagagaaaggtgtccagcgccgagggcgctgccaaggaagagcctaaacggagaagcgccagactgagcgccaagccccccgccaaggtggaagccaagcctaagaaggccgccgctaaggacaagagcagcgataagaaagtccagaccaagggcaagcggggcgccaaaggcaaacaggccgaggtggccaaccaggagacaaaggaagatctgcctgctgagaacggcgaaaccaagaccgaggaatctccagcttctgacgaggccggagagaaggaggccaaaagcgacagcggctctgagacacctggaacaagcgagagcgccaccccggaatcctatgaacaacttgcaccacaaccgtgtgtgggagaaactttacattctagcctcccacgagacagtgaactgtttgtgcctgaagaggggagcagcgagaaggagagcgaggacgcgccaaaaacatctcctccgacgcctgggaaacatggtttggaacagactggggaggaaaaagtgatggtgactgttcctgacaaaaatccaccttgtccttgctgtggtacccgggtaaactctgtgttgaatctgattgaacatctgaaagtgtcacacgggaaaaggggggtttgttttcggtgtgcaaaatgtggaaaggaaaatagtaactatcacagtgttgtttgtcattttaagaaatgcaggggtccagagacggagaaagccccagctggggagtggatttgtgaggtatgcaacagagattttacaaccaaaattggcctgggacaacacaagagattggcacacccagcagtgagaaatcaggaaaggatcgttgcttcccaaccgaaagaaacatcaaatagaggtgctcacaaaaggtgctggacaaaggaggaggaagaattactaataagactggaggctcagttcgagggaaacaaaaatattaataagcttattgcagaacacataaccaccaaaacagctaagcagatcagtgacaaaaggcgattgctgtccagaaagccagcagaggagccacgtgaggagcctggaacgtgtcatcacaccaggagagcagctgcgagcctgagaacggagcctgagatgagtcatcacgcccaggcagaggacagagataatggacctgggagacgccctctgccaggcagggcagctgccggagggagaacaatggacgagataagacgccaccctgataagggcaacggacagcagagacccaccaagcaaaaatcagaagaacagctgcaggcttactataaaaagacactagaggaacgactttcagctggggcacttaacaccttcccccgagcattcaagcaggtaatggaaggccgggatataaagctagtaatcaatcagacagcgcaggactgcttcggatgcctggaatccataagccaaataagaacggcaacccgagataaaaaggacacggtgacccgggagaaacacccaaagaaaccttttcagaagtggatgaagaagagagcaatcaaaaaaggtaattatcttcggttccagcgtttattttatcttgatagagggaaactggctaaaatcattttagatgatattgaatgcttgtcttgtgacataccactcagtgaaatttatgacgtttttaaaacaagatgggaaacaactggtagctttaaaagccttggggactttaaaacttacgggaaggctgacaacactgccttcagagaattaattacggctaaagaaattgagaaaaatgtgcaggaaatgagcaaaggctcggctcccggtccagacgggattactcttggggacgtcgtaaagatggatcccgagttttcccggaccatggagattttcaatttatggttaacaactggtaaaatcccggacatggtgagggggtgcagaaccgttttgattccaaaatcatcaaagccggatcgtttgaaagacattaataactggagacctatcacgatcggttccatcttgctgagactgttctccaggattgtaacagctaggctgagcaaagcgtgccccctgaacccaaggcaaagaggctttatcagagcggcgggatgctctgaaaacttaaaactcctgcaaactataatttggtcggccaaaagagaacacagaccactgggtgttgtattcgtggacatcgccaaggcttttgacaccgtaagccaccagcacatcattcatgctttgcagcaaagagaggtggatccccacatcgtcggtctggtgagcaatatgtacgagaacatcagtacgtatatcaccacaaagaggaacacacacacagacaaaatccagatccgggttggagtaaagcagggtgacccgatgtcgccccttttatttaacctggcaatggaccctctattatgcaagctggaagagagtggcaaaggataccaccgaggacagagcagcatcacagcgatggcatttgcagacgatctggttttgctgagcgactcctgggaaaatatgaatacaaatattagcatactggagaccttctgcaatctgaccggactcaaaacacaggggcaaaagtgccacggcttttacatcaagccgacaaaggactcttacaccatcaatgactgcgctgcctggactatcaacggcacacccctgaacatgatcgaccccggcgaatctgagaaatacctcggcctgcagtttgacccgtggattggaatagcaaggtccggtctctccacaaaactagatttttggcttcagcggatcgatcaagcaccacttaaacctctgcagaaaactgatattctcaaaacatacaccatccctcggctgatctacatagctgaccactcagaagtgaaaagcgcactactcgaaacccttgaccagaagatccggacagcggtcaaggaatggcttcacctacctccgtgcacctgcgatgccatcctgtactcgagcacgagagacggcggtttgggcatcaccaaattggcaggactgatccccagcgtgcaggcccgtagactgcatcggatcgcacagtcatctgacgatacgatgaaatgcttcatggaaaaagagaaaatggaacagctgcataagaaattgtggattcaagctggaggggacagagagaacataccctcgatttgggaagcaccaccgtcgagtgaaccaccaaacaacgtgagcacaaattcggaatgggaagcaccgacccagaaagataaatttccaaagccttgcaattggaggaaaaacgaattcaaaaaatggaccaaattggcatcccaaggccgcggaattgtaaattttgaaagagacaaaattagtaaccattggatccaatactacagacgcatacctcacaggaaactcctcactgcactacaactcagggccaacgtttaccccacgagagaatttctagccaggggtagacaagaccaatacatcaaggcgtgtaggcactgcgatgcggacaacgaatcctgcgcccacatcatcggcaactgcccagtgacacaggacgcccgaatcaagaggcacaattacatctgcgaactgcttctcgaggaggcgaagaagaaggactgggtagtgttcaaggaaccgcacataagggattccaacaaggaactgtacaaacctgacctgatatttgtgaaggatgggcgtgcacttgtcgtggatgtgacagtacggtatgaagcagccaaatcatcgctggaggaagccgctgcagagaaagtgagaaagtacaaacacctggaaacggaagtaagacatctcacgaatgcaaaggacgttacttttgtgggctttcccctaggagcgcgggggaaatggcaccaagataactttaaacttttgactgagcttggcctctccaaatcgaggcaagtgaaaatggcagagactttttccacagtagcgctcttttcatctgtggacattgtacatatgtttgccagtagggccagaaaatctatggttatgtgataataggctgccttctgcggggcttgccttctggccatgcccttcttctctcccttgcacctgtacctcttggtctttgaataaagcctgagtaggaaggaccggtaaaaaaaaaaaaaaaaaaaaaaaaaaaaaaacgttgactaaaaaaaaaaaaaaaaaaaaaaaaaaaaaaaaaaaaaaaaaaaaaaaaaaaaaaaaaaaaaaaaaaaaaa

SEQ ID NO: 11118 - DNA, 5264 bp, synthetic construct
  source 1..5264: mol_type = other DNA
gaaataagagagaaaagaagagtaagaagaaatataagagaattcgccaccatggcccctaagaaaaagcggaaggtgaatatcagcggctctagctgcggcagccccaacagcgccgacaccagcagcgacttcaaggacctgtggaccaagctgaaggaatgccacgaccgggaagtgcagggactccaggtgaaggtcaccaaactcaagcaagaaagaatcctggacgcccagagactggaagaattcttcaccaagaaccagcagctgagagagcagcagaaagtgctgcacgagacaatcaaggttctggaagatagactgcgggccggcctgtgcgacagatgcgccgtgaccgaggaacacatgcgcaaaaagcagcaggagttcgagaacattagacagcaaaatctgaaattgatcacagagctgatgaacgagagaaacacactgcaggaggagaacaagaagctgagcgagcagctgcaacagaagatcgagaatgatcagcaacaccaggccgctgagctggaatgtgaagaggacgtgatccccgacagcccaatcacagctttcagcttttctggcgtgaacagactgaggcggaaggaaaacccccacgtgcggtacatcgagcagacccataccaagctggaacacagcgtgtgtgccaacgagatgagaaaggtgtccaagtcctccacccatccccagcacaaccctaacgaaaatgagatcctggtggctgatacctacgaccagtctcagagccctatggccaaggcccacggcaccagctcttatacccctgataagagctccttcaacctggccaccgtggtggccgagacactgggcctgggcgtgcaggaggaaagcgagacacagggcccaatgagccctctgggagatgagctgtaccactgcctggaaggcaaccacaagaaacagccttttgagtccggctccgagactcctggaacaagcgagagcgctacacctgagggcagccctaagagaaaggtgtccagcgccgagggcgctgccaaggaagagcctaaacggagaagcgccagactgagcgccaagccccccgccaaggtggaagccaagcctaagaaggccgccgctaaggacaagagcagcgataagaaagtccagaccaagggcaagcggggcgccaaaggcaaacaggccgaggtggccaaccaggagacaaaggaagatctgcctgctgagaacggcgaaaccaagaccgaggaatctccagcttctgacgaggccggagagaaggaggccaaaagcgacagcggctctgagacacctggaacaagcgagagcgccaccccggaatcctatgaacaacttgcaccacaaccgtgtgtgggagaaactttacattctagcctcccacgagacagtgaactgtttgtgcctgaagaggggagcagcgagaaggagagcgaggacgcgccaaaaacatctcctccgacgcctgggaaacatggtttggaacagactggggaggaaaaagtgatggtgactgttcctgacaaaaatccaccttgtccttgctgtggtacccgggtaaactctgtgttgaatctgattgaacatctgaaagtgtcacacgggaaaaggggggtttgttttcggtgtgcaaaatgtggaaaggaaaatagtaactatcacagtgttgtttgtcattttaagaaatgcaggggtccagagacggagaaagccccagctggggagtggatttgtgaggtatgcaacagagattttacaaccaaaattggcctgggacaacacaagagattggcacacccagcagtgagaaatcaggaaaggatcgttgcttcccaaccgaaagaaacatcaaatagaggtgctcacaaaaggtgctggacaaaggaggaggaagaattactaataagactggaggctcagttcgagggaaacaaaaatattaataagcttattgcagaacacataaccaccaaaacagctaagcagatcagtgacaaaaggcgattgctgtccagaaagccagcagaggagccacgtgaggagcctggaacgtgtcatcacaccaggagagcagctgcgagcctgagaacggagcctgagatgagtcatcacgcccaggcagaggacagagataatggacctgggagacgccctctgccaggcagggcagctgccggagggagaacaatggacgagataagacgccaccctgataagggcaacggacagcagagacccaccaagcaaaaatcagaagaacagctgcaggcttactataaaaagacactagaggaacgactttcagctggggcacttaacaccttcccccgagcattcaagcaggtaatggaaggccgggatataaagctagtaatcaatcagacagcgcaggactgcttcggatgcctggaatccataagccaaataagaacggcaacccgagataaaaaggacacggtgacccgggagaaacacccaaagaaaccttttcagaagtggatgaagaagagagcaatcaaaaaaggtaattatcttcggttccagcgtttattttatcttgatagagggaaactggctaaaatcattttagatgatattgaatgcttgtcttgtgacataccactcagtgaaatttattcggtttttaaaacaagatgggaaacaactggtagctttaaaagccttggggactttaaaacttacgggcaggctgacaacactgccttcagagaattaattacggctaaagaaattgagaaaaatgtgcaggaaatgagcaaaggctcggctcccggtccagacgggattactcttggggacgtcgtaaagatggatcccgagttttcccggaccatggagattttcaatttatggttaacaactggtaaaatcccggacatggtgagggggtgcagaaccgttttgattccaaaatcatcaaagccggatcgtttgaaagacattaataactggagacctatcacgatcggttccatcttgctgagactgttctccaggattgtaacagctaggctgagcaaagcgtgccccctgaacccaaggcaaagaggctttatcagagcggcgggatgctctgaaaacttaaaactcctgcaaactataatttggtcggccaaaagagaacacagaccactgggtgttgtattcgtggacatcgccaaggcttttgacaccgtaagccaccagcacatcattcatgctttgcagcaaagagaggtggatccccacatcgtcggtctggtgagcaatatgtacgagaacatcagtacgtatatcaccacaaagaggaacacacacacagacaaaatccagatccgggttggagtaaagcagggtgacccgatgtcgccccttttatttaacctggcaatggaccctctattatgcaagctggaagagagtggcaaaggataccaccgaggacagagcagcatcacagcgatggcatttgcagacgatctggttttgctgagcgactcctgggaaaatatgaatacaaatattagcatactggagaccttctgcaatctgaccggactcaaaacacaggggcaaaagtgccacggcttttacatcaagccgacaaaggactcttacaccatcaatgactgcgctgcctggactatcaacggcacacccctgaacatgatcgaccccggcgaatctgagaaatacctcggcctgcagtttgacccgtggattggaatagcaaggtccggtctctccacaaaactagatttttggcttcagcggatcgatcaagcaccacttaaacctctgcagaaaactgatattctcaaaacatacaccatccctcggctgatctacatagctgaccactcagaagtgaaaagcgcactactcgaaacccttgaccagaagatccggacagcggtcaaggaatggcttcacctacctccgtgcacctgcgatgccatcctgtactcgagcacgagagacggcggtttgggcatcaccaaattggcaggactgatccccagcgtgcaggcccgtagactgcatcggatcgcacagtcatctgacgatacgatgaaatgcttcatggaaaaagagaaaatggaacagctgcataagaaattgtggattcaagctggaggggacagagagaacataccctcgatttgggaagcaccaccgtcgagtgaaccaccaaacaacgtgagcacaaattcggaatgggaagcaccgacccagaaagataaatttccaaagccttgcaattggaggaaaaacgaattcaaaaaatggaccaaattggcatcccaaggccgcggaattgtaaattttgaaagagacaaaattagtaaccattggatccaatactacagacgcatacctcacaggaaactcctcactgcactacaactcagggccaacgtttaccccacgagagaatttctagccaggggtagacaagaccaatacatcaaggcgtgtaggcactgcgatgcggacaacgaatcctgcgcccacatcatcggcaactgcccagtgacacaggacgcccgaatcaagaggcacaattacatctgcgaactgcttctcgaggaggcgaagaagaaggactgggtagtgttcaaggaaccgcacataagggattccaacaaggaactgtacaaacctgacctgatatttgtgaaggatgggcgtgcacttgtcgtggatgtgacagtacggtatgaagcagccaaatcatcgctggaggaagccgctgcagagaaagtgagaaagtacaaacacctggaaacggaagtaagacatctcacgaatgcaaaggacgttacttttgtgggctttcccctaggagcgcgggggaaatggcaccaagataactttaaacttttgactgagcttggcctctccaaatcgaggcaagtgaaaatggcagagactttttccacagtagcgctcttttcatctgtggacattgtacatatgtttgccagtagggccagaaaatctatggttatgtgataataggctgccttctgcggggcttgccttctggccatgcccttcttctctcccttgcacctgtacctcttggtctttgaataaagcctgagtaggaaggaccggtaaaaaaaaaaaaaaaaaaaaaaaaaaaaaaacgttgactaaaaaaaaaaaaaaaaaaaaaaaaaaaaaaaaaaaaaaaaaaaaaaaaaaaaaaaaaaaaaaaaaaaaaa

SEQ ID NO: 11119 - DNA, 5264 bp, synthetic construct
  source 1..5264: mol_type = other DNA
gaaataagagagaaaagaagagtaagaagaaatataagagaattcgccaccatggcccctaagaaaaagcggaaggtgaatatcagcggctctagctgcggcagccccaacagcgccgacaccagcagcgacttcaaggacctgtggaccaagctgaaggaatgccacgaccgggaagtgcagggactccaggtgaaggtcaccaaactcaagcaagaaagaatcctggacgcccagagactggaagaattcttcaccaagaaccagcagctgagagagcagcagaaagtgctgcacgagacaatcaaggttctggaagatagactgcgggccggcctgtgcgacagatgcgccgtgaccgaggaacacatgcgcaaaaagcagcaggagttcgagaacattagacagcaaaatctgaaattgatcacagagctgatgaacgagagaaacacactgcaggaggagaacaagaagctgagcgagcagctgcaacagaagatcgagaatgatcagcaacaccaggccgctgagctggaatgtgaagaggacgtgatccccgacagcccaatcacagctttcagcttttctggcgtgaacagactgaggcggaaggaaaacccccacgtgcggtacatcgagcagacccataccaagctggaacacagcgtgtgtgccaacgagatgagaaaggtgtccaagtcctccacccatccccagcacaaccctaacgaaaatgagatcctggtggctgatacctacgaccagtctcagagccctatggccaaggcccacggcaccagctcttatacccctgataagagctccttcaacctggccaccgtggtggccgagacactgggcctgggcgtgcaggaggaaagcgagacacagggcccaatgagccctctgggagatgagctgtaccactgcctggaaggcaaccacaagaaacagccttttgagtccggctccgagactcctggaacaagcgagagcgctacacctgagggcagccctaagagaaaggtgtccagcgccgagggcgctgccaaggaagagcctaaacggagaagcgccagactgagcgccaagccccccgccaaggtggaagccaagcctaagaaggccgccgctaaggacaagagcagcgataagaaagtccagaccaagggcaagcggggcgccaaaggcaaacaggccgaggtggccaaccaggagacaaaggaagatctgcctgctgagaacggcgaaaccaagaccgaggaatctccagcttctgacgaggccggagagaaggaggccaaaagcgacagcggctctgagacacctggaacaagcgagagcgccaccccggaatcctatgaacaacttgcaccacaaccgtgtgtgggagaaactttacattctagcctcccacgagacagtgaactgtttgtgcctgaagaggggagcagcgagaaggagagcgaggacgcgccaaaaacatctcctccgacgcctgggaaacatggtttggaacagactggggaggaaaaagtgatggtgactgttcctgacaaaaatccaccttgtccttgctgtggtacccgggtaaactctgtgttgaatctgattgaacatctgaaagtgtcacacgggaaaaggggggtttgttttcggtgtgcaaaatgtggaaaggaaaatagtaactatcacagtgttgtttgtcattttaagaaatgcaggggtccagagacggagaaagccccagctggggagtggatttgtgaggtatgcaacagagattttacaaccaaaattggcctgggacaacacaagagattggcacacccagcagtgagaaatcaggaaaggatcgttgcttcccaaccgaaagaaacatcaaatagaggtgctcacaaaaggtgctggacaaaggaggaggaagaattactaataagactggaggctcagttcgagggaaacaaaaatattaataagcttattgcagaacacataaccaccaaaacagctaagcagatcagtgacaaaaggcgattgctgtccagaaagccagcagaggagccacgtgaggagcctggaacgtgtcatcacaccaggagagcagctgcgagcctgagaacggagcctgagatgagtcatcacgcccaggcagaggacagagataatggacctgggagacgccctctgccaggcagggcagctgccggagggagaacaatggacgagataagacgccaccctgataagggcaacggacagcagagacccaccaagcaaaaatcagaagaacagctgcaggcttactataaaaagacactagaggaacgactttcagctggggcacttaacaccttcccccgagcattcaagcaggtaatggaaggccgggatataaagctagtaatcaatcagacagcgcaggactgcttcggatgcctggaatccataagccaaataagaacggcaacccgagataaaaaggacacggtgacccgggagaaacacccaaagaaaccttttcagaagtggatgaagaagagagcaatcaaaaaaggtaattatcttcggttccagcgtttattttatcttgatagagggaaactggctaaaatcattttagatgatattgaatgcttgtcttgtgacataccactcagtgaaatttattcggtttttaaaacaagatgggaaacaactggtagctttaaaagccttggggactttaaaacttacgggaaggctgacaacactgccttcagagaattaattacggctaaagaaattgagaaaaatgtgcaggaaatgagcaaaggctcggctcccggtccagacgggattactcttggggacgtcgtaaagatggatcccgagttttcccggaccatggagattttcaatttatggttaacaactggtaaaatcccggacatggtgagggggtgcagaaccgttttgattccaaaatcatcaaagccggatcgtttgaaagacattaataactggagacctatcacgatcggttccatcttgctgagactgttctccaggattgtaacagctaggctgagcaaagcgtgccccctgaacccaaggcaaagaggctttatcagagcggcgggatgctctgaaaacttaaaactcctgcaaactataatttggtcggccaaaagagaacacagaccactgggtgttgtattcgtggacatcgccaaggcttttgacaccgtaagccaccagcacatcattcatgctttgcagcaaagagaggtggatccccacatcgtcggtctggtgagcaatatgtacgagaacatcagtacgtatatcaccacaaagaggaacacacacacagacaaaatccagatccgggttggagtaaagcagggtgacccgatgtcgccccttttatttaacctggcaatggaccctctattatgcaagctggaagagagtggcaaaggataccaccgaggacagagcagcatcacagcgatggcatttgcagacgatctggttttgctgagcgactcctgggaaaatatgaatacaaatattagcatactggagaccttctgcaatctgaccggactcaaaacacaggggcaaaagtgccacggcttttacatcaagccgacaaaggactcttacaccatcaatgactgcgctgcctggactatcaacggcacacccctgaacatgatcgaccccggcgaatctgagaaatacctcggcctgcagtttgacccgtggattggaatagcaaggtccggtctctccacaaaactagatttttggcttcagcggatcgatcaagcaccacttaaacctctgcagaaaactgatattctcaaaacatacaccatccctcggctgatctacatagctgaccactcagaagtgaaaagcgcactactcgaaacccttgaccagaagatccggacagcggtcaaggaatggcttcacctacctccgtgcacctgcgatgccatcctgtactcgagcacgagagacggcggtttgggcatcaccaaattggcaggactgatccccagcgtgcaggcccgtagactgcatcggatcgcacagtcatctgacgatacgatgaaatgcttcatggaaaaagagaaaatggaacagctgcataagaaattgtggattcaagctggaggggacagagagaacataccctcgatttgggaagcaccaccgtcgagtgaaccaccaaacaacgtgagcctgaattcggaatgggaagcaccgacccagaaagataaatttccaaagccttgcaattggaggaaaaacgaattcaaaaaatggaccaaattggcatcccaaggccgcggaattgtaaattttgaaagagacaaaattagtaaccattggatccaatactacagacgcatacctcacaggaaactcctcactgcactacaactcagggccaacgtttaccccacgagagaatttctagccaggggtagacaagaccaatacatcaaggcgtgtaggcactgcgatgcggacaacgaatcctgcgcccacatcatcggcaactgcccagtgacacaggacgcccgaatcaagaggcacaattacatctgcgaactgcttctcgaggaggcgaagaagaaggactgggtagtgttcaaggaaccgcacataagggattccaacaaggaactgtacaaacctgacctgatatttgtgaaggatgggcgtgcacttgtcgtggatgtgacagtacggtatgaagcagccaaatcatcgctggaggaagccgctgcagagaaagtgagaaagtacaaacacctggaaacggaagtaagacatctcacgaatgcaaaggacgttacttttgtgggctttcccctaggagcgcgggggaaatggcaccaagataactttaaacttttgactgagcttggcctctccaaatcgaggcaagtgaaaatggcagagactttttccacagtagcgctcttttcatctgtggacattgtacatatgtttgccagtagggccagaaaatctatggttatgtgataataggctgccttctgcggggcttgccttctggccatgcccttcttctctcccttgcacctgtacctcttggtctttgaataaagcctgagtaggaaggaccggtaaaaaaaaaaaaaaaaaaaaaaaaaaaaaaacgttgactaaaaaaaaaaaaaaaaaaaaaaaaaaaaaaaaaaaaaaaaaaaaaaaaaaaaaaaaaaaaaaaaaaaaaa

SEQ ID NO: 11120 - DNA, 5264 bp, synthetic construct
  source 1..5264: mol_type = other DNA
gaaataagagagaaaagaagagtaagaagaaatataagagaattcgccaccatggcccctaagaaaaagcggaaggtgaatatcagcggctctagctgcggcagccccaacagcgccgacaccagcagcgacttcaaggacctgtggaccaagctgaaggaatgccacgaccgggaagtgcagggactccaggtgaaggtcaccaaactcaagcaagaaagaatcctggacgcccagagactggaagaattcttcaccaagaaccagcagctgagagagcagcagaaagtgctgcacgagacaatcaaggttctggaagatagactgcgggccggcctgtgcgacagatgcgccgtgaccgaggaacacatgcgcaaaaagcagcaggagttcgagaacattagacagcaaaatctgaaattgatcacagagctgatgaacgagagaaacacactgcaggaggagaacaagaagctgagcgagcagctgcaacagaagatcgagaatgatcagcaacaccaggccgctgagctggaatgtgaagaggacgtgatccccgacagcccaatcacagctttcagcttttctggcgtgaacagactgaggcggaaggaaaacccccacgtgcggtacatcgagcagacccataccaagctggaacacagcgtgtgtgccaacgagatgagaaaggtgtccaagtcctccacccatccccagcacaaccctaacgaaaatgagatcctggtggctgatacctacgaccagtctcagagccctatggccaaggcccacggcaccagctcttatacccctgataagagctccttcaacctggccaccgtggtggccgagacactgggcctgggcgtgcaggaggaaagcgagacacagggcccaatgagccctctgggagatgagctgtaccactgcctggaaggcaaccacaagaaacagccttttgagtccggctccgagactcctggaacaagcgagagcgctacacctgagggcagccctaagagaaaggtgtccagcgccgagggcgctgccaaggaagagcctaaacggagaagcgccagactgagcgccaagccccccgccaaggtggaagccaagcctaagaaggccgccgctaaggacaagagcagcgataagaaagtccagaccaagggcaagcggggcgccaaaggcaaacaggccgaggtggccaaccaggagacaaaggaagatctgcctgctgagaacggcgaaaccaagaccgaggaatctccagcttctgacgaggccggagagaaggaggccaaaagcgacagcggctctgagacacctggaacaagcgagagcgccaccccggaatcctatgaacaacttgcaccacaaccgtgtgtgggagaaactttacattctagcctcccacgagacagtgaactgtttgtgcctgaagaggggagcagcgagaaggagagcgaggacgcgccaaaaacatctcctccgacgcctgggaaacatggtttggaacagactggggaggaaaaagtgatggtgactgttcctgacaaaaatccaccttgtccttgctgtggtacccgggtaaactctgtgttgaatctgattgaacatctgaaagtgtcacacgggaaaaggggggtttgttttcggtgtgcaaaatgtggaaaggaaaatagtaactatcacagtgttgtttgtcattttaagaaatgcaggggtccagagacggagaaagccccagctggggagtggatttgtgaggtatgcaacagagattttacaaccaaaattggcctgggacaacacaagagattggcacacccagcagtgagaaatcaggaaaggatcgttgcttcccaaccgaaagaaacatcaaatagaggtgctcacaaaaggtgctggacaaaggaggaggaagaattactaataagactggaggctcagttcgagggaaacaaaaatattaataagcttattgcagaacacataaccaccaaaacagctaagcagatcagtgacaaaaggcgattgctgtccagaaagccagcagaggagccacgtgaggagcctggaacgtgtcatcacaccaggagagcagctgcgagcctgagaacggagcctgagatgagtcatcacgcccaggcagaggacagagataatggacctgggagacgccctctgccaggcagggcagctgccggagggagaacaatggacgagataagacgccaccctgataagggcaacggacagcagagacccaccaagcaaaaatcagaagaacagctgcaggcttactataaaaagacactagaggaacgactttcagctggggcacttaacaccttcccccgagcattcaagcaggtaatggaaggccgggatataaagctagtaatcaatcagacagcgcaggactgcttcggatgcctggaatccataagccaaataagaacggcaacccgagataaaaaggacacggtgacccgggagaaacacccaaagaaaccttttcagaagtggatgaagaagagagcaatcaaaaaaggtaattatcttcggttccagcgtttattttatcttgatagagggaaactggctaaaatcattttagatgatattgaatgcttgtcttgtgacataccactcagtgaaatttattcggtttttaaaacaagatgggaaacaactggtagctttaaaagccttggggactttaaaacttacgggaaggctgacaacactgccttcagagaattaattacggctaaagaaattgagaaaaatgtgcaggaaatgagcaaaggctcggctcccggtccagacgggattactcttggggacgtcgtaaagatggatcccgagttttcccggaccatggagattttcaatttatggttaacaactggtaaaatcccggacatggtgagggggtgcagaaccgttttgattccaaaatcatcaaagccggatcgtttgaaagacattaataactggagacctatcacgatcggttccatcttgctgagactgttctccaggattgtaacagctaggctgagcaaagcgtgccccctgaacccaaggcaaagaggctttatcagagcggcgggatgctctgaaaacttaaaactcctgcaaactataatttggtcggccaaaagagaacacagaccactgggtgttgtattcgtggacatcgccaaggcttttgacaccgtaagccaccagcacatcattcatgctttgcagcaaagagaggtggatccccacatcgtcggtctggtgagcaatatgtacgagaacatcagtacgtatatcaccacaaagaggaacacacacacagacaaaatccagatccgggttggagtaaagcagggtgacccgatgtcgccccttttatttaacctggcaatggaccctctattatgcaagctggaagagagtggcaaaggataccaccgaggacagagcagcatcacagcgatggcatttgcagacgatctggttttgctgagcgactcctgggaaaatatgaatacaaatattagcatactggagaccttctgcaatctgaccggactcaaaacacaggggcaaaagtgccacggcttttacatcaagccgacaaaggactcttacaccatcaatgactgcgctgcctggactatcaacggcacacccctgaacatgatcgaccccggcgaatctgagaaatacctcggcctgcagtttgacccgtggattggaatagcaaggtccggtctctccacaaaactagatttttggcttcagcggatcgatcaagcaccacttaaacctctgcagaaaactgatattctcaaaacatacaccatccctcggctgatctacatagctgaccactcagaagtgaaaagcgcactactcgaaacccttgaccagaagatccggacagcggtcaaggaatggcttcacctacctccgtgcacctgcgatgccatcctgtactcgagcacgagagacggcggtttgggcatcaccaaattggcaggactgatccccagcgtgcaggcccgtagactgcatcggatcgcacagtcatctgacgatacgatgaaatgcttcatggaaaaagagaaaatggaacagctgcataagaaattgtggattcaagctggaggggacagagagaacataccctcgatttgggaagcaccaccgtcgagtgaaccaccaaacaacgtgagcacaaattcggaatgggaagcaccgacccagaaagataaatttccaaagccttgcaattggaggaaaaacgaattcaaaaaatggaccaaattggcatcccaaggccgcggaattgtaaattttgaaagagacaaaattagtaaccattggatccaatactacagacgcatacctcacaggaaactcctcactgcactacaactcagggccaacgtttaccccacgagagaatttctagccaggggtagacaagaccaatacatcaaggcgtgtaggcactgcgatgcggacaacgaatcctgcgcccacatcatcggcaactgcccagtgacacaggacgcccgaatcaagaggcacaattacatctgcgaactgcttctcgaggaggcgaagaagaaggactgggtagtgttcaaggaaccgcacataagggattccaacaaggaactgtacaaacctgacctgatatttgtgaaggatgggcgtgcaattgtcgtggatgtgacagtacggtatgaagcagccaaatcatcgctggaggaagccgctgcagagaaagtgagaaagtacaaacacctggaaacggaagtaagacatctcacgaatgcaaaggacgttacttttgtgggctttcccctaggagcgcgggggaaatggcaccaagataactttaaacttttgactgagcttggcctctccaaatcgaggcaagtgaaaatggcagagactttttccacagtagcgctcttttcatctgtggacattgtacatatgtttgccagtagggccagaaaatctatggttatgtgataataggctgccttctgcggggcttgccttctggccatgcccttcttctctcccttgcacctgtacctcttggtctttgaataaagcctgagtaggaaggaccggtaaaaaaaaaaaaaaaaaaaaaaaaaaaaaaacgttgactaaaaaaaaaaaaaaaaaaaaaaaaaaaaaaaaaaaaaaaaaaaaaaaaaaaaaaaaaaaaaaaaaaaaaa

SEQ ID NO: 11121 - DNA, 5264 bp, synthetic construct
  source 1..5264: mol_type = other DNA
gaaataagagagaaaagaagagtaagaagaaatataagagaattcgccaccatggcccctaagaaaaagcggaaggtgaatatcagcggctctagctgcggcagccccaacagcgccgacaccagcagcgacttcaaggacctgtggaccaagctgaaggaatgccacgaccgggaagtgcagggactccaggtgaaggtcaccaaactcaagcaagaaagaatcctggacgcccagagactggaagaattcttcaccaagaaccagcagctgagagagcagcagaaagtgctgcacgagacaatcaaggttctggaagatagactgcgggccggcctgtgcgacagatgcgccgtgaccgaggaacacatgcgcaaaaagcagcaggagttcgagaacattagacagcaaaatctgaaattgatcacagagctgatgaacgagagaaacacactgcaggaggagaacaagaagctgagcgagcagctgcaacagaagatcgagaatgatcagcaacaccaggccgctgagctggaatgtgaagaggacgtgatccccgacagcccaatcacagctttcagcttttctggcgtgaacagactgaggcggaaggaaaacccccacgtgcggtacatcgagcagacccataccaagctggaacacagcgtgtgtgccaacgagatgagaaaggtgtccaagtcctccacccatccccagcacaaccctaacgaaaatgagatcctggtggctgatacctacgaccagtctcagagccctatggccaaggcccacggcaccagctcttatacccctgataagagctccttcaacctggccaccgtggtggccgagacactgggcctgggcgtgcaggaggaaagcgagacacagggcccaatgagccctctgggagatgagctgtaccactgcctggaaggcaaccacaagaaacagccttttgagtccggctccgagactcctggaacaagcgagagcgctacacctgagggcagccctaagagaaaggtgtccagcgccgagggcgctgccaaggaagagcctaaacggagaagcgccagactgagcgccaagccccccgccaaggtggaagccaagcctaagaaggccgccgctaaggacaagagcagcgataagaaagtccagaccaagggcaagcggggcgccaaaggcaaacaggccgaggtggccaaccaggagacaaaggaagatctgcctgctgagaacggcgaaaccaagaccgaggaatctccagcttctgacgaggccggagagaaggaggccaaaagcgacagcggctctgagacacctggaacaagcgagagcgccaccccggaatcctatgaacaacttgcaccacaaccgtgtgtgggagaaactttacattctagcctcccacgagacagtgaactgtttgtgcctgaagaggggagcagcgagaaggagagcgaggacgcgccaaaaacatctcctccgacgcctgggaaacatggtttggaacagactggggaggaaaaagtgatggtgactgttcctgacaaaaatccaccttgtccttgctgtggtacccgggtaaactctgtgttgaatctgattgaacatctgaaagtgtcacacgggaaaaggggggtttgttttcggtgtgcaaaatgtggaaaggaaaatagtaactatcacagtgttgtttgtcattttaagaaatgcaggggtccagagacggagaaagccccagctggggagtggatttgtgaggtatgcaacagagattttacaaccaaaattggcctgggacaacacaagagattggcacacccagcagtgagaaatcaggaaaggatcgttgcttcccaaccgaaagaaacatcaaatagaggtgctcacaaaaggtgctggacaaaggaggaggaagaattactaataagactggaggctcagttcgagggaaacaaaaatattaataagcttattgcagaacacataaccaccaaaacagctaagcagatcagtgacaaaaggcgattgctgtccagaaagccagcagaggagccacgtgaggagcctggaacgtgtcatcacaccaggagagcagctgcgagcctgagaacggagcctgagatgagtcatcacgcccaggcagaggacagagataatggacctgggagacgccctctgccaggcagggcagctgccggagggagaacaatggacgagataagacgccaccctgataagggcaacggacagcagagacccaccaagcaaaaatcagaagaacagctgcaggcttactataaaaagacactagaggaacgactttcagctggggcacttaacaccttcccccgagcattcaagcaggtaatggaaggccgggatataaagctagtaatcaatcagacagcgcaggactgcttcggatgcctggaatccataagccaaataagaacggcaacccgagataaaaaggacacggtgacccgggagaaacacccaaagaaaccttttcagaagtggatgaagaagagagcaatcaaaaaaggtaattatcttcggttccagcgtttattttatcttgatagagggaaactggctaaaatcattttagatgatattgaatgcttgtcttgtgacataccactcagtgaaatttattcggtttttaaaacaagatgggaaacaactggtagctttaaaagccttggggactttaaaacttacgggaaggctgacaacactgccttcagagaattaattacggctaaagaaattgagaaaaatgtgcaggaaatgagcaaaggctcggctcccggtccagacgggattactcttggggacgtcgtaaagatggatcccgagttttcccggaccatggagattttcaatttatggttaacaactggtaaaatcccggacatggtgagggggtgcagaaccgttttgattccaaaatcatcaaagccggatcgtttgaaagacattaataactggagacctatcacgatcggttccatcttgctgagactgttctccaggattgtaacagctaggctgagcaaagcgtgccccctgaacccaaggcaaagaggctttatcagagcggcgggatgctctgaaaacttaaaactcctgcaaactataatttggtcggccaaaagagaacacagaccactgggtgttgtattcgtggacatcgccaaggcttttgacaccgtaagccaccagcacatcattcatgctttgcagcaaagagaggtggatccccacatcgtcggtctggtgagcaatatgtacgagaacatcagtacgtatatcaccacaaagaggaacacacacacagacaaaatccagatccgggttggagtaaagcagggtgacccgatgtcgccccttttatttaacctggcaatggaccctctattatgcaagctggaagagagtggcaaaggataccaccgaggacagagcagcatcacagcgatggcatttgcagacgatctggttttgctgagcgactcctgggaaaatatgaatacaaatattagcatactggagaccttctgcaatctgaccggactcaaaacacaggggcaaaagtgccacggcttttacatcaagccgacaaaggactcttacaccatcaatgactgcgctgcctggactatcaacggcacacccctgaacatgatcgaccccggcgaatctgagaaatacctcggcctgcagtttgacccgtggattggaatagcaaggtccggtctctccacaaaactagatttttggcttcagcggatcgatcaagcaccacttaaacctctgcagaaaactgatattctcaaaacatacaccatccctcggctgatctacctggctgaccactcagaagtgaaaagcgcactactcgaaacccttgaccagaagatccggacagcggtcaaggaatggcttcacctacctccgtgcacctgcgatgccatcctgtactcgagcacgagagacggcggtttgggcatcaccaaattggcaggactgatccccagcgtgcaggcccgtagactgcatcggatcgcacagtcatctgacgatacgatgaaatgcttcatggaaaaagagaaaatggaacagctgcataagaaattgtggattcaagctggaggggacagagagaacataccctcgatttgggaagcaccaccgtcgagtgaaccaccaaacaacgtgagcacaaattcggaatgggaagcaccgacccagaaagataaatttccaaagccttgcaattggaggaaaaacgaattcaaaaaatggaccaaattggcatcccaaggccgcggaattgtaaattttgaaagagacaaaattagtaaccattggatccaatactacagacgcatacctcacaggaaactcctcactgcactacaactcagggccaacgtttaccccacgagagaatttctagccaggggtagacaagaccaatacatcaaggcgtgtaggcactgcgatgcggacaacgaatcctgcgcccacatcatcggcaactgcccagtgacacaggacgcccgaatcaagaggcacaattacatctgcgaactgcttctcgaggaggcgaagaagaaggactgggtagtgttcaaggaaccgcacataagggattccaacaaggaactgtacaaacctgacctgatatttgtgaaggatgggcgtgcacttgtcgtggatgtgacagtacggtatgaagcagccaaatcatcgctggaggaagccgctgcagagaaagtgagaaagtacaaacacctggaaacggaagtaagacatctcacgaatgcaaaggacgttacttttgtgggctttcccctaggagcgcgggggaaatggcaccaagataactttaaacttttgactgagcttggcctctccaaatcgaggcaagtgaaaatggcagagactttttccacagtagcgctcttttcatctgtggacattgtacatatgtttgccagtagggccagaaaatctatggttatgtgataataggctgccttctgcggggcttgccttctggccatgcccttcttctctcccttgcacctgtacctcttggtctttgaataaagcctgagtaggaaggaccggtaaaaaaaaaaaaaaaaaaaaaaaaaaaaaaacgttgactaaaaaaaaaaaaaaaaaaaaaaaaaaaaaaaaaaaaaaaaaaaaaaaaaaaaaaaaaaaaaaaaaaaaaa

SEQ ID NO: 11122 - DNA, 5264 bp, synthetic construct
  source 1..5264: mol_type = other DNA
gaaataagagagaaaagaagagtaagaagaaatataagagaattcgccaccatggcccctaagaaaaagcggaaggtgaatatcagcggctctagctgcggcagccccaacagcgccgacaccagcagcgacttcaaggacctgtggaccaagctgaaggaatgccacgaccgggaagtgcagggactccaggtgaaggtcaccaaactcaagcaagaaagaatcctggacgcccagagactggaagaattcttcaccaagaaccagcagctgagagagcagcagaaagtgctgcacgagacaatcaaggttctggaagatagactgcgggccggcctgtgcgacagatgcgccgtgaccgaggaacacatgcgcaaaaagcagcaggagttcgagaacattagacagcaaaatctgaaattgatcacagagctgatgaacgagagaaacacactgcaggaggagaacaagaagctgagcgagcagctgcaacagaagatcgagaatgatcagcaacaccaggccgctgagctggaatgtgaagaggacgtgatccccgacagcccaatcacagctttcagcttttctggcgtgaacagactgaggcggaaggaaaacccccacgtgcggtacatcgagcagacccataccaagctggaacacagcgtgtgtgccaacgagatgagaaaggtgtccaagtcctccacccatccccagcacaaccctaacgaaaatgagatcctggtggctgatacctacgaccagtctcagagccctatggccaaggcccacggcaccagctcttatacccctgataagagctccttcaacctggccaccgtggtggccgagacactgggcctgggcgtgcaggaggaaagcgagacacagggcccaatgagccctctgggagatgagctgtaccactgcctggaaggcaaccacaagaaacagccttttgagtccggctccgagactcctggaacaagcgagagcgctacacctgagggcagccctaagagaaaggtgtccagcgccgagggcgctgccaaggaagagcctaaacggagaagcgccagactgagcgccaagccccccgccaaggtggaagccaagcctaagaaggccgccgctaaggacaagagcagcgataagaaagtccagaccaagggcaagcggggcgccaaaggcaaacaggccgaggtggccaaccaggagacaaaggaagatctgcctgctgagaacggcgaaaccaagaccgaggaatctccagcttctgacgaggccggagagaaggaggccaaaagcgacagcggctctgagacacctggaacaagcgagagcgccaccccggaatcctatgaacaacttgcaccacaaccgtgtgtgggagaaactttacattctagcctcccacgagacagtgaactgtttgtgcctgaagaggggagcagcgagaaggagagcgaggacgcgccaaaaacatctcctccgacgcctgggaaacatggtttggaacagactggggaggaaaaagtgatggtgactgttcctgacaaaaatccaccttgtccttgctgtggtacccgggtaaactctgtgttgaatctgattgaacatctgaaagtgtcacacgggaaaaggggggtttgttttcggtgtgcaaaatgtggaaaggaaaatagtaactatcacagtgttgtttgtcattttaagaaatgcaggggtccagagacggagaaagccccagctggggagtggatttgtgaggtatgcaacagagattttacaaccaaaattggcctgggacaacacaagagattggcacacccagcagtgagaaatcaggaaaggatcgttgcttcccaaccgaaagaaacatcaaatagaggtgctcacaaaaggtgctggacaaaggaggaggaagaattactaataagactggaggctcagttcgagggaaacaaaaatattaataagcttattgcagaacacataaccaccaaaacagctaagcagatcagtgacaaaaggcgattgctgtccagaaagccagcagaggagccacgtgaggagcctggaacgtgtcatcacaccaggagagcagctgcgagcctgagaacggagcctgagatgagtcatcacgcccaggcagaggacagagataatggacctgggagacgccctctgccaggcagggcagctgccggagggagaacaatggacgagataagacgccaccctgataagggcaacggacagcagagacccaccaagcaaaaatcagaagaacagctgcaggcttactataaaaagacactagaggaacgactttcagctggggcacttaacaccttcccccgagcattcaagcaggtaatggaaggccgggatataaagctagtaatcaatcagacagcgcaggactgcttcggatgcctggaatccataagccaaataagaacggcaacccgagataaaaaggacacggtgacccgggagaaacacccaaagaaaccttttcagaagtggatgaagaagagagcaatcaaaaaaggtaattatcttcggttccagcgtttattttatcttgatagagggaaactggctaaaatcattttagatgatattgaatgcttgtcttgtgacataccactcagtgaaatttattcggtttttaaaacaagatgggaaacaactggtagctttaaaagccttggggactttaaaacttacgggaaggctgacaacactgccttcagagaattaattacggctaaagaaattgagaaaaatgtgcaggaaatgagcaaaggctcggctcccggtccagacgggattactcttggggacgtcgtaaagatggatcccgagttttcccggaccatggagattttcaatttatggttaacaactggtaaaatcccggacatggtgagggggtgcagaaccgttttgattccaaaatcatcaaagccggatcgtttgaaagacattaataactggagacctatcacgatcggttccatcttgtacagactgttctccaggattgtaacagctaggctgagcaaagcgtgccccctgaacccaaggcaaagaggctttatcagagcggcgggatgctctgaaaacttaaaactcctgcaaactataatttggtcggccaaaagagaacacagaccactgggtgttgtattcgtggacatcgccaaggcttttgacaccgtaagccaccagcacatcattcatgctttgcagcaaagagaggtggatccccacatcgtcggtctggtgagcaatatgtacgagaacatcagtacgtatatcaccacaaagaggaacacacacacagacaaaatccagatccgggttggagtaaagcagggtgacccgatgtcgccccttttatttaacctggcaatggaccctctattatgcaagctggaagagagtggcaaaggataccaccgaggacagagcagcatcacagcgatggcatttgcagacgatctggttttgctgagcgactcctgggaaaatatgaatacaaatattagcatactggagaccttctgcaatctgaccggactcaaaacacaggggcaaaagtgccacggcttttacatcaagccgacaaaggactcttacaccatcaatgactgcgctgcctggactatcaacggcacacccctgaacatgatcgaccccggcgaatctgagaaatacctcggcctgcagtttgacccgtggattggaatagcaaggtccggtctctccacaaaactagatttttggcttcagcggatcgatcaagcaccacttaaacctctgcagaaaactgatattctcaaaacatacaccatccctcggctgatctacatagctgaccactcagaagtgaaaagcgcactactcgaaacccttgaccagaagatccggacagcggtcaaggaatggcttcacctacctccgtgcacctgcgatgccatcctgtactcgagcacgagagacggcggtttgggcatcaccaaattggcaggactgatccccagcgtgcaggcccgtagactgcatcggatcgcacagtcatctgacgatacgatgaaatgcttcatggaaaaagagaaaatggaacagctgcataagaaattgtggattcaagctggaggggacagagagaacataccctcgatttgggaagcaccaccgtcgagtgaaccaccaaacaacgtgagcacaaattcggaatgggaagcaccgacccagaaagataaatttccaaagccttgcaattggaggaaaaacgaattcaaaaaatggaccaaattggcatcccaaggccgcggaattgtaaattttgaaagagacaaaattagtaaccattggatccaatactacagacgcatacctcacaggaaactcctcactgcactacaactcagggccaacgtttaccccacgagagaatttctagccaggggtagacaagaccaatacatcaaggcgtgtaggcactgcgatgcggacaacgaatcctgcgcccacatcatcggcaactgcccagtgacacaggacgcccgaatcaagaggcacaattacatctgcgaactgcttctcgaggaggcgaagaagaaggactgggtagtgttcaaggaaccgcacataagggattccaacaaggaactgtacaaacctgacctgatatttgtgaaggatgggcgtgcacttgtcgtggatgtgacagtacggtatgaagcagccaaatcatcgctggaggaagccgctgcagagaaagtgagaaagtacaaacacctggaaacggaagtaagacatctcacgaatgcaaaggacgttacttttgtgggctttcccctaggagcgcgggggaaatggcaccaagataactttaaacttttgactgagcttggcctctccaaatcgaggcaagtgaaaatggcagagactttttccacagtagcgctcttttcatctgtggacattgtacatatgtttgccagtagggccagaaaatctatggttatgtgataataggctgccttctgcggggcttgccttctggccatgcccttcttctctcccttgcacctgtacctcttggtctttgaataaagcctgagtaggaaggaccggtaaaaaaaaaaaaaaaaaaaaaaaaaaaaaaacgttgactaaaaaaaaaaaaaaaaaaaaaaaaaaaaaaaaaaaaaaaaaaaaaaaaaaaaaaaaaaaaaaaaaaaaaa

SEQ ID NO: 11123 - DNA, 5264 bp, synthetic construct
  source 1..5264: mol_type = other DNA
gaaataagagagaaaagaagagtaagaagaaatataagagaattcgccaccatggcccctaagaaaaagcggaaggtgaatatcagcggctctagctgcggcagccccaacagcgccgacaccagcagcgacttcaaggacctgtggaccaagctgaaggaatgccacgaccgggaagtgcagggactccaggtgaaggtcaccaaactcaagcaagaaagaatcctggacgcccagagactggaagaattcttcaccaagaaccagcagctgagagagcagcagaaagtgctgcacgagacaatcaaggttctggaagatagactgcgggccggcctgtgcgacagatgcgccgtgaccgaggaacacatgcgcaaaaagcagcaggagttcgagaacattagacagcaaaatctgaaattgatcacagagctgatgaacgagagaaacacactgcaggaggagaacaagaagctgagcgagcagctgcaacagaagatcgagaatgatcagcaacaccaggccgctgagctggaatgtgaagaggacgtgatccccgacagcccaatcacagctttcagcttttctggcgtgaacagactgaggcggaaggaaaacccccacgtgcggtacatcgagcagacccataccaagctggaacacagcgtgtgtgccaacgagatgagaaaggtgtccaagtcctccacccatccccagcacaaccctaacgaaaatgagatcctggtggctgatacctacgaccagtctcagagccctatggccaaggcccacggcaccagctcttatacccctgataagagctccttcaacctggccaccgtggtggccgagacactgggcctgggcgtgcaggaggaaagcgagacacagggcccaatgagccctctgggagatgagctgtaccactgcctggaaggcaaccacaagaaacagccttttgagtccggctccgagactcctggaacaagcgagagcgctacacctgagggcagccctaagagaaaggtgtccagcgccgagggcgctgccaaggaagagcctaaacggagaagcgccagactgagcgccaagccccccgccaaggtggaagccaagcctaagaaggccgccgctaaggacaagagcagcgataagaaagtccagaccaagggcaagcggggcgccaaaggcaaacaggccgaggtggccaaccaggagacaaaggaagatctgcctgctgagaacggcgaaaccaagaccgaggaatctccagcttctgacgaggccggagagaaggaggccaaaagcgacagcggctctgagacacctggaacaagcgagagcgccaccccggaatcctatgaacaacttgcaccacaaccgtgtgtgggagaaactttacattctagcctcccacgagacagtgaactgtttgtgcctgaagaggggagcagcgagaaggagagcgaggacgcgccaaaaacatctcctccgacgcctgggaaacatggtttggaacagactggggaggaaaaagtgatggtgactgttcctgacaaaaatccaccttgtccttgctgtggtacccgggtaaactctgtgttgaatctgattgaacatctgaaagtgtcacacgggaaaaggggggtttgttttcggtgtgcaaaatgtggaaaggaaaatagtaactatcacagtgttgtttgtcattttaagaaatgcaggggtccagagacggagaaagccccagctggggagtggatttgtgaggtatgcaacagagattttacaaccaaaattggcctgggacaacacaagagattggcacacccagcagtgagaaatcaggaaaggatcgttgcttcccaaccgaaagaaacatcaaatagaggtgctcacaaaaggtgctggacaaaggaggaggaagaattactaataagactggaggctcagttcgagggaaacaaaaatattaataagcttattgcagaacacataaccaccaaaacagctaagcagatcagtgacaaaaggcgattgctgtccagaaagccagcagaggagccacgtgaggagcctggaacgtgtcatcacaccaggagagcagctgcgagcctgagaacggagcctgagatgagtcatcacgcccaggcagaggacagagataatggacctgggagacgccctctgccaggcagggcagctgccggagggagaacaatggacgagataagacgccaccctgataagggcaacggacagcagagacccaccaagcaaaaatcagaagaacagctgcaggcttactataaaaagacactagaggaacgactttcagctggggcacttaacaccttcccccgagcattcaagcaggtaatggaaggccgggatataaagctagtaatcaatcagacagcgcaggactgcttcggatgcctggaatccataagccaaataagaacggcaacccgagataaaaaggacacggtgacccgggagaaacacccaaagaaaccttttcagaagtggatgaagaagagagcaatcaaaaaaggtaattatcttcggttccagcgtttattttatcttgatagagggaaactggctaaaatcattttagatgatattgaatgcttgtcttgtgacataccactcagtgaaatttattcggtttttaaaacaagatgggaaacaactggtagctttaaaagccttggggactttaaaacttacgggaaggctgacaacactgccttcagagaattaattacggctaaagaaattgagaaaaatgtgcaggaaatgagcaaaggctcggctcccggtccagacgggattactcttggggacgtcgtaaagatggatcccgagttttcccggaccatggagattttcaatttatggttaacaactggtaaaatcccggacatggtgagggggtgcagaaccgttttgattccaaaatcatcaaagccggatcgtttgaaagacattaataactggagacctatcacgatcggttccatcttgctgagactgttctccaggattgtaacagctaggctgagcaaagcgtgccccctgaacccaaggcaaagaggctttatcagagcggcgggatgctctgaaaacttaaaactcctgcaaactataatttggtcggccaaaagagaacacagaccactgggtgttgtattcgtggacatcgccaacgcttttgacaccgtaagccaccagcacatcattcatgctttgcagcaaagagaggtggatccccacatcgtcggtctggtgagcaatatgtacgagaacatcagtacgtatatcaccacaaagaggaacacacacacagacaaaatccagatccgggttggagtaaagcagggtgacccgatgtcgccccttttatttaacctggcaatggaccctctattatgcaagctggaagagagtggcaaaggataccaccgaggacagagcagcatcacagcgatggcatttgcagacgatctggttttgctgagcgactcctgggaaaatatgaatacaaatattagcatactggagaccttctgcaatctgaccggactcaaaacacaggggcaaaagtgccacggcttttacatcaagccgacaaaggactcttacaccatcaatgactgcgctgcctggactatcaacggcacacccctgaacatgatcgaccccggcgaatctgagaaatacctcggcctgcagtttgacccgtggattggaatagcaaggtccggtctctccacaaaactagatttttggcttcagcggatcgatcaagcaccacttaaacctctgcagaaaactgatattctcaaaacatacaccatccctcggctgatctacatagctgaccactcagaagtgaaaagcgcactactcgaaacccttgaccagaagatccggacagcggtcaaggaatggcttcacctacctccgtgcacctgcgatgccatcctgtactcgagcacgagagacggcggtttgggcatcaccaaattggcaggactgatccccagcgtgcaggcccgtagactgcatcggatcgcacagtcatctgacgatacgatgaaatgcttcatggaaaaagagaaaatggaacagctgcataagaaattgtggattcaagctggaggggacagagagaacataccctcgatttgggaagcaccaccgtcgagtgaaccaccaaacaacgtgagcacaaattcggaatgggaagcaccgacccagaaagataaatttccaaagccttgcaattggaggaaaaacgaattcaaaaaatggaccaaattggcatcccaaggccgcggaattgtaaattttgaaagagacaaaattagtaaccattggatccaatactacagacgcatacctcacaggaaactcctcactgcactacaactcagggccaacgtttaccccacgagagaatttctagccaggggtagacaagaccaatacatcaaggcgtgtaggcactgcgatgcggacaacgaatcctgcgcccacatcatcggcaactgcccagtgacacaggacgcccgaatcaagaggcacaattacatctgcgaactgcttctcgaggaggcgaagaagaaggactgggtagtgttcaaggaaccgcacataagggattccaacaaggaactgtacaaacctgacctgatatttgtgaaggatgggcgtgcacttgtcgtggatgtgacagtacggtatgaagcagccaaatcatcgctggaggaagccgctgcagagaaagtgagaaagtacaaacacctggaaacggaagtaagacatctcacgaatgcaaaggacgttacttttgtgggctttcccctaggagcgcgggggaaatggcaccaagataactttaaacttttgactgagcttggcctctccaaatcgaggcaagtgaaaatggcagagactttttccacagtagcgctcttttcatctgtggacattgtacatatgtttgccagtagggccagaaaatctatggttatgtgataataggctgccttctgcggggcttgccttctggccatgcccttcttctctcccttgcacctgtacctcttggtctttgaataaagcctgagtaggaaggaccggtaaaaaaaaaaaaaaaaaaaaaaaaaaaaaaacgttgactaaaaaaaaaaaaaaaaaaaaaaaaaaaaaaaaaaaaaaaaaaaaaaaaaaaaaaaaaaaaaaaaaaaaaa

SEQ ID NO: 11124 - DNA, 5264 bp, synthetic construct
  source 1..5264: mol_type = other DNA
gaaataagagagaaaagaagagtaagaagaaatataagagaattcgccaccatggcccctaagaaaaagcggaaggtgaatatcagcggctctagctgcggcagccccaacagcgccgacaccagcagcgacttcaaggacctgtggaccaagctgaaggaatgccacgacaaggaagtgcagggactccaggtgaaggtcaccaaactcaagcaagaaagaatcctggacgcccagagactggaagaattcttcaccaagaaccagcagctgagagagcagcagaaagtgctgcacgagacaatcaaggttctggaagatagactgcgggccggcctgtgcgacagatgcgccgtgaccgaggaacacatgcgcaaaaagcagcaggagttcgagaacattagacagcaaaatctgaaattgatcacagagctgatgaacgagagaaacacactgcaggaggagaacaagaagctgagcgagcagctgcaacagaagatcgagaatgatcagcaacaccaggccgctgagctggaatgtgaagaggacgtgatccccgacagcccaatcacagctttcagcttttctggcgtgaacagactgaggcggaaggaaaacccccacgtgcggtacatcgagcagacccataccaagctggaacacagcgtgtgtgccaacgagatgagaaaggtgtccaagtcctccacccatccccagcacaaccctaacgaaaatgagatcctggtggctgatacctacgaccagtctcagagccctatggccaaggcccacggcaccagctcttatacccctgataagagctccttcaacctggccaccgtggtggccgagacactgggcctgggcgtgcaggaggaaagcgagacacagggcccaatgagccctctgggagatgagctgtaccactgcctggaaggcaaccacaagaaacagccttttgagtccggctccgagactcctggaacaagcgagagcgctacacctgagggcagccctaagagaaaggtgtccagcgccgagggcgctgccaaggaagagcctaaacggagaagcgccagactgagcgccaagccccccgccaaggtggaagccaagcctaagaaggccgccgctaaggacaagagcagcgataagaaagtccagaccaagggcaagcggggcgccaaaggcaaacaggccgaggtggccaaccaggagacaaaggaagatctgcctgctgagaacggcgaaaccaagaccgaggaatctccagcttctgacgaggccggagagaaggaggccaaaagcgacagcggctctgagacacctggaacaagcgagagcgccaccccggaatcctatgaacaacttgcaccacaaccgtgtgtgggagaaactttacattctagcctcccacgagacagtgaactgtttgtgcctgaagaggggagcagcgagaaggagagcgaggacgcgccaaaaacatctcctccgacgcctgggaaacatggtttggaacagactggggaggaaaaagtgatggtgactgttcctgacaaaaatccaccttgtccttgctgtggtacccgggtaaactctgtgttgaatctgattgaacatctgaaagtgtcacacgggaaaaggggggtttgttttcggtgtgcaaaatgtggaaaggaaaatagtaactatcacagtgttgtttgtcattttaagaaatgcaggggtccagagacggagaaagccccagctggggagtggatttgtgaggtatgcaacagagattttacaaccaaaattggcctgggacaacacaagagattggcacacccagcagtgagaaatcaggaaaggatcgttgcttcccaaccgaaagaaacatcaaatagaggtgctcacaaaaggtgctggacaaaggaggaggaagaattactaataagactggaggctcagttcgagggaaacaaaaatattaataagcttattgcagaacacataaccaccaaaacagctaagcagatcagtgacaaaaggcgattgctgtccagaaagccagcagaggagccacgtgaggagcctggaacgtgtcatcacaccaggagagcagctgcgagcctgagaacggagcctgagatgagtcatcacgcccaggcagaggacagagataatggacctgggagacgccctctgccaggcagggcagctgccggagggagaacaatggacgagataagacgccaccctgataagggcaacggacagcagagacccaccaagcaaaaatcagaagaacagctgcaggcttactataaaaagacactagaggaacgactttcagctggggcacttaacaccttcccccgagcattcaagcaggtaatggaaggccgggatataaagctagtaatcaatcagacagcgcaggactgcttcggatgcctggaatccataagccaaataagaacggcaacccgagataaaaaggacacggtgacccgggagaaacacccaaagaaaccttttcagaagtggatgaagaagagagcaatcaaaaaaggtaattatcttcggttccagcgtttattttatcttgatagagggaaactggctaaaatcattttagatgatattgaatgcttgtcttgtgacataccactcagtgaaatttattcggtttttaaaacaagatgggaaacaactggtagctttaaaagccttggggactttaaaacttacgggaaggctgacaacactgccttcagagaattaattacggctaaagaaattgagaaaaatgtgcaggaaatgagcaaaggctcggctcccggtccagacgggattactcttggggacgtcgtaaagatggatcccgagttttcccggaccatggagattttcaatttatggttaacaactggtaaaatcccggacatggtgagggggtgcagaaccgttttgattccaaaatcatcaaagccggatcgtttgaaagacattaataactggagacctatcacgatcggttccatcttgctgagactgttctccaggattgtaacagctaggctgagcaaagcgtgccccctgaacccaaggcaaagaggctttatcagagcggcgggatgctctgaaaacttaaaactcctgcaaactataatttggtcggccaaaagagaacacagaccactgggtgttgtattcgtggacatcgccaaggcttttgacaccgtaagccaccagcacatcattcatgctttgcagcaaagagaggtggatccccacatcgtcggtctggtgagcaatatgtacgagaacatcagtacgtatatcaccacaaagaggaacacacacacagacaaaatccagatccgggttggagtaaagcagggtgacccgatgtcgccccttttatttaacctggcaatggaccctctattatgcaagctggaagagagtggcaaaggataccaccgaggacagagcagcatcacagcgatggcatttgcagacgatctggttttgctgagcgactcctgggaaaatatgaatacaaatattagcatactggagaccttctgcaatctgaccggactcaaaacacaggggcaaaagtgccacggcttttacatcaagccgacaaaggactcttacaccatcaatgactgcgctgcctggactatcaacggcacacccctgaacatgatcgaccccggcgaatctgagaaatacctcggcctgcagtttgacccgtggattggaatagcaaggtccggtctctccacaaaactagatttttggcttcagcggatcgatcaagcaccacttaaacctctgcagaaaactgatattctcaaaacatacaccatccctcggctgatctacatagctgaccactcagaagtgaaaagcgcactactcgaaacccttgaccagaagatccggacagcggtcaaggaatggcttcacctacctccgtgcacctgcgatgccatcctgtactcgagcacgagagacggcggtttgggcatcaccaaattggcaggactgatccccagcgtgcaggcccgtagactgcatcggatcgcacagtcatctgacgatacgatgaaatgcttcatggaaaaagagaaaatggaacagctgcataagaaattgtggattcaagctggaggggacagagagaacataccctcgatttgggaagcaccaccgtcgagtgaaccaccaaacaacgtgagcacaaattcggaatgggaagcaccgacccagaaagataaatttccaaagccttgcaattggaggaaaaacgaattcaaaaaatggaccaaattggcatcccaaggccgcggaattgtaaattttgaaagagacaaaattagtaaccattggatccaatactacagacgcatacctcacaggaaactcctcactgcactacaactcagggccaacgtttaccccacgagagaatttctagccaggggtagacaagaccaatacatcaaggcgtgtaggcactgcgatgcggacaacgaatcctgcgcccacatcatcggcaactgcccagtgacacaggacgcccgaatcaagaggcacaattacatctgcgaactgcttctcgaggaggcgaagaagaaggactgggtagtgttcaaggaaccgcacataagggattccaacaaggaactgtacaaacctgacctgatatttgtgaaggatgggcgtgcacttgtcgtggatgtgacagtacggtatgaagcagccaaatcatcgctggaggaagccgctgcagagaaagtgagaaagtacaaacacctggaaacggaagtaagacatctcacgaatgcaaaggacgttacttttgtgggctttcccctaggagcgcgggggaaatggcaccaagataactttaaacttttgactgagcttggcctctccaaatcgaggcaagtgaaaatggcagagactttttccacagtagcgctcttttcatctgtggacattgtacatatgtttgccagtagggccagaaaatctatggttatgtgataataggctgccttctgcggggcttgccttctggccatgcccttcttctctcccttgcacctgtacctcttggtctttgaataaagcctgagtaggaaggaccggtaaaaaaaaaaaaaaaaaaaaaaaaaaaaaaacgttgactaaaaaaaaaaaaaaaaaaaaaaaaaaaaaaaaaaaaaaaaaaaaaaaaaaaaaaaaaaaaaaaaaaaaaa

SEQ ID NO: 11125 - DNA, 5389 bp, synthetic construct
  source 1..5389: mol_type = other DNA
ggtctagttacaactgggcatcgctgcagagatcgcacctcctcgtggtcccgctggtagcccttcgaagggtgactaagtcgatctctgccccaggtacggagccgttgggactcaccagtccaacgtaactcctgcctaaattcggtgaaacaaattcctcggtaaaaagccccatggcccctaagaaaaagcggaaggtgaatatcagcggctctagctgcggcagccccaacagcgccgacaccagcagcgacttcaaggacctgtggaccaagctgaaggaatgccacgaccgggaagtgcagggactccaggtgaaggtcaccaaactcaagcaagaaagaatcctggacgcccagagactggaagaattcttcaccaagaaccagcagctgagagagcagcagaaagtgctgcacgagacaatcaaggttctggaagatagactgcgggccggcctgtgcgacagatgcgccgtgaccgaggaacacatgcgcaaaaagcagcaggagttcgagaacattagacagcaaaatctgaaattgatcacagagctgatgaacgagagaaacacactgcaggaggagaacaagaagctgagcgagcagctgcaacagaagatcgagaatgatcagcaacaccaggccgctgagctggaatgtgaagaggacgtgatccccgacagcccaatcacagctttcagcttttctggcgtgaacagactgaggcggaaggaaaacccccacgtgcggtacatcgagcagacccataccaagctggaacacagcgtgtgtgccaacgagatgagaaaggtgtccaagtcctccacccatccccagcacaaccctaacgaaaatgagatcctggtggctgatacctacgaccagtctcagagccctatggccaaggcccacggcaccagctcttatacccctgataagagctccttcaacctggccaccgtggtggccgagacactgggcctgggcgtgcaggaggaaagcgagacacagggcccaatgagccctctgggagatgagctgtaccactgcctggaaggcaaccacaagaaacagccttttgagtccggctccgagactcctggaacaagcgagagcgctacacctgagggcagccctaagagaaaggtgtccagcgccgagggcgctgccaaggaagagcctaaacggagaagcgccagactgagcgccaagccccccgccaaggtggaagccaagcctaagaaggccgccgctaaggacaagagcagcgataagaaagtccagaccaagggcaagcggggcgccaaaggcaaacaggccgaggtggccaaccaggagacaaaggaagatctgcctgctgagaacggcgaaaccaagaccgaggaatctccagcttctgacgaggccggagagaaggaggccaaaagcgacagcggctctgagacacctggaacaagcgagagcgccaccccggaatcctacgaacagctggctccccagccctgtgtaggcgagacattacacagcagcctgcccagagacagcgagctgttcgttccggaagagggctctagcgagaaggagagcgaggacgctcctaagaccagccctcctacccctggcaaacacggcctgagacaaacaggcgaggagaaggtcatggtgaccgtgcccgacaagaaccctccctgtccttgctgtggcacaagagtcaacagcgtgctgaacctcatcgagcacctgaaggtgtcccacggcaagagaggcgtgtgcttcagatgcgccaagtgcggcaaggagagaagcaactaccacagcgtcgtgtgccacttcaagaagtgcagaggccctgagaccgagaaggctcccgctggcgaatggatttgcgaggtgtgcaacagagacttcaccaccaagatcggcctgggccagcacaagcggttagctcaccctgctgtgagaaaccaggagagaatcgtggccagccagcccaaggagacaagcaacaggggcgctcacaagagatgctggaccaaggaggaagaggagctgctcatcagactggaggctcagttcgagggcaacaagaacatcaataagcttatcgccgagcacatcaccacaaagaccgccaagcagatcagcgacaagaggagactgctgtccagaaagcccgccgaggagcctagaatggaacctggtacatgtcaccacaccagaagagccgccgctagcctgagaaccgagcccgaaatgtctcaccacgctcaggccgaggacagagacaacggccctggcaggagacctcttcccggcagagctgctgctggaggcagaaccatggacgagatcaggagacaccccgataagggcaacggccagcagagacccacaaagcagaagtccgaggaacagctccaggcctactacaagaaaaccctggaggagagactgtccgcgggagctctgaacaccttccctagagccttcaaacaagtcatggagggcagagacatcaagctggtgatcaaccagaccgcccaggactgcttcggctgccttgagtctatcagccagatcaggaccgccacacgggataagaagtacaccgtcaccagagagaagcaccccaagaagcccttccagaaatggatgaagaagagggccatcaagaagggcaattacctgagattccagaggctgttctacctggacagaggcaagctggccaagatcatcctggacgacatcgagtgcctgagctgcgacatccctctgagcgagatctacagcgtgttcaagaccagatgggagaccaccggcagcttcaagtctctgggcgacttcaagacatacggcaaggccgacaacaccgccttcagagagctcatcaccgctaaggagatcgagaagaacgtgcaggagatgagcaagggcagcgctcctggccccgatggaattacactgggcgatgtggtgaagatggaccccgagttcagcagaacaatggagatcttcaacctgtggctcaccacaggcaagatccccgacatggtgagaggctgcagaaccgtgcttatccccaagagcagcgaccccgacagactgaaggatatcaacaactggagacccatcaccatcggcagcatcctgctgcggctgttcagccggattgtgaccgctagactgagcaaagcctgtcccctgaaccccagacagagaggcttcatcagagccgctggctgcagcgagaacctgaagctgctccagacaatcatctggagcgccaagagagagcacagacccctgggcgttgttttcgtggacatcgccaaggccttcgacaccgtgtcccatcagcacattatccacgccctgcagcagagggaggtcgaccctcatattgtgggcctggtgtccaacatgtacgagaacatctccacctatattacgaccaagagaaacacccacacagacaagatccagatccgggtcggcgtcaagcagggcgatcctatgtctcctctgctgttcaacctcgccatggaccctctgctctgcaagctcgaggagtctggaaagggctaccatagaggccaatcatcgatcaccgccatggccttcgccgacgacctggtgcttttaagcgacagctgggagaacatgaacaccaacatctctatcctggagacattctgcaaccttaccggcctgaaaacccagggccagaagtgtcatggcttctacatcaaacccaccaagaagagctacaccatcaacgactgcgccgcctggacaatcaacggcacccctctcaacatgatcgaccccggcgagtctgagaagtacctgggcctgcagttcgatccctggatcggcatcgctagaagcggcttgagcaccaagctggacttttggctccaacgcatagaccaggcccccctgaagcctcttcagaaactggacattttgaaaacttatacgatccccagactcatctacatcgccgaccactccgaggtcaagagcgctctgctggaaaccctggaccagaaaatcagaaccgccgtcaaggaatggctgcacctgcccccttgcacatgcgacgctatcctgtacagcagcaccagggacggcggcttaggaatcaccaagttagccggcctcatccccagcgtgcaggctaggagactccacagaatcgcccagagcagcgacgacaccatgaagtgcttcatggagaaggaaaagatggagcagctgcacaagaagctgtggatccaagcgggcggagatcgtgagaacattcccagcatctgggaggcccctcccagctcagaacctcccaataacgtgtccaccaattctgaatgggaggctcccacccagaaggataagtttcccaagccctgcaactggcggaagaacgagttcaaaaaatggacaaagctggctagccagggcaggggcatcgtgaacttcgaaagggacaagattagcaaccactggatccagtactacagaagaatcccccacagaaagctcctcaccgccctccagttacgtgcaaacgtgtacccaaccagagaattcctggccagaggcagacaggaccagtacatcaaggcctgccggcactgcgatgccgataacgagagctgtgctcacatcatcggcaactgccccgtcacccaggacgccagaatcaagagacacaactacatctgcgagttacttctggaggaagccaagaagaaggattgggttgtgttcaaggagccccacatcagagactccaacaaggagctgtacaagccagacctcatcttcgtgaaggacggcagagccctggtggtggacgtcaccgtcagatacgaggctgctaagtccagccttgaggaggctgccgccgagaaagtgcggaagtacaagcacctggaaacagaggtcagacacctcaccaacgccaaggacgttaccttcgtgggcttccccctaggtgctagaggcaaatggcaccaggacaacttcaagctgcttaccgagctgggcctctccaagagccgacaggttaagatggccgagaccttcagcaccgtcgccctgttctcttctgtggacattgtgcacatgttcgcctccagagccagaaagagcatggtgatgtgataataggctgccttctgcggggcttgccttctggccatgcccttcttctctcccttgcacctgtacctcttggtctttgaataaagcctgagtaggaaggaccggtaaaaaaaaaaaaaaaaaaaaaaaaaaaaaaacgttgactaaaaaaaaaaaaaaaaaaaaaaaaaaaaaaaaaaaaaaaaaaaaaaaaaaaaaaaaaaaaaaaaaaaaaa

SEQ ID NO: 11126 - DNA, 5389 bp, synthetic construct
  source 1..5389: mol_type = other DNA
ggtctagttacaactgggcatcgctgcagagatcgcacctcctcgtggtcccgctggtagcccttcgaagggtgactaagtcgatctctgccccaggtacggagccgttgggactcaccagtccaacgtaactcctgcctaaattcggtgaaacaaattcctcggtaaaaagccccatggcccctaagaaaaagcggaaggtgaatatcagcggctctagctgcggcagccccaacagcgccgacaccagcagcgacttcaaggacctgtggaccaagctgaaggaatgccacgaccgggaagtgcagggactccaggtgaaggtcaccaaactcaagcaagaaagaatcctggacgcccagagactggaagaattcttcaccaagaaccagcagctgagagagcagcagaaagtgctgcacgagacaatcaaggttctggaagatagactgcgggccggcctgtgcgacagatgcgccgtgaccgaggaacacatgcgcaaaaagcagcaggagttcgagaacattagacagcaaaatctgaaattgatcacagagctgatgaacgagagaaacacactgcaggaggagaacaagaagctgagcgagcagctgcaacagaagatcgagaatgatcagcaacaccaggccgctgagctggaatgtgaagaggacgtgatccccgacagcccaatcacagctttcagcttttctggcgtgaacagactgaggcggaaggaaaacccccacgtgcggtacatcgagcagacccataccaagctggaacacagcgtgtgtgccaacgagatgagaaaggtgtccaagtcctccacccatccccagcacaaccctaacgaaaatgagatcctggtggctgatacctacgaccagtctcagagccctatggccaaggcccacggcaccagctcttatacccctgataagagctccttcaacctggccaccgtggtggccgagacactgggcctgggcgtgcaggaggaaagcgagacacagggcccaatgagccctctgggagatgagctgtaccactgcctggaaggcaaccacaagaaacagccttttgagtccggctccgagactcctggaacaagcgagagcgctacacctgagggcagccctaagagaaaggtgtccagcgccgagggcgctgccaaggaagagcctaaacggagaagcgccagactgagcgccaagccccccgccaaggtggaagccaagcctaagaaggccgccgctaaggacaagagcagcgataagaaagtccagaccaagggcaagcggggcgccaaaggcaaacaggccgaggtggccaaccaggagacaaaggaagatctgcctgctgagaacggcgaaaccaagaccgaggaatctccagcttctgacgaggccggagagaaggaggccaaaagcgacagcggctctgagacacctggaacaagcgagagcgccaccccggaatcctacgaacagctggctccccagccctgtgtaggcgagacattacacagcagcctgcccagagacagcgagctgttcgttccggaagagggctctagcgagaaggagagcgaggacgctcctaagaccagccctcctacccctggcaaacacggcctggagcaaacaggcgaggagaaggtcatggtgaccgtgcccgacaagaaccctccctgtccttgctgtggcacaagagtcaacagcgtgctgaacctcatcgagcacctgaaggtgtcccacggcaagagaggcgtgtgcttcagatgcgccaagtgcggcaaggagaacagcaactaccacagcgtcgtgtgccacttcaagaagtgcagaggccctgagaccgagaaggctcccgctggcgaatggatttgcgaggtgtgcaacagagacttcaccaccaagatcggcctgggccagcacaagcggttagctcaccctgctgtgagaaaccaggagagaatcgtggccagccagcccaaggagacaagcaacaggggcgctcacaagagatgctggaccaaggaggaagaggagctgctcatcagactggaggctcagttcgagggcaacaagaacatcaataagcttatcgccgagcacatcaccacaaagaccgccaagcagatcagcgacaagaggagactgctgtccagaaagcccgccgaggagcctagaatggaacctggtacatgtcaccacaccagaagagccgccgctagcctgagaaccgagcccgaaatgtctcaccacgctcaggccgaggacagagacaacggccctggcaggagacctcttcccggcagagctgctgctggaggcagaaccatggacgagatcaggagacaccccgataagggcaacggccagcagagacccacaaagcagaagtccgaggaacagctccaggcctactacaagaaaaccctggaggagagactgtccgcgggagctctgaacaccttccctagagccttcaaacaagtcatggagggcagagacatcaagctggtgatcaaccagaccgcccaggactgcttcggctgccttgagtctatcagccagatcaggaccgccacacgggataagaagtacaccgtcaccagagagaagcaccccaagaagcccttccagaaatggatgaagaagagggccatcaagaagggcaattacctgagattccagaggctgttctacctggacagaggcaagctggccaagatcatcctggacgacatcgagtgcctgagctgcgacatccctctgagcgagatctacagcgtgttcaagaccagatgggagaccaccggcagcttcaagtctctgggcgacttcaagacatacggcaaggccgacaacaccgccttcagagagctcatcaccgctaaggagatcgagaagaacgtgcaggagatgagcaagggcagcgctcctggccccgatggaattacactgggcgatgtggtgaagatggaccccgagttcagcctgacaatggagatcttcaacctgtggctcaccacaggcaagatccccgacatggtgagaggctgcagaaccgtgcttatccccaagagcagcaagcccgacagactgaaggatatcaacaactggagacccatcaccatcggcagcatcctgctgcggctgttcagccggattgtgaccgctagactgagcaaagcctgtcccctgaaccccagacagagaggcttcatcagagccgctggctgcagcgagaacctgaagctgctccagacaatcatctggagcgccaagagagagcacagacccctgggcgttgttttcgtggacatcgccaaggccttcgacaccgtgtcccatcagcacattatccacgccctgcagcagagggaggtcgaccctcatattgtgggcctggtgtccaacatgtacgagaacatctccacctatattacgaccaagagaaacacccacacagacaagatccagatccgggtcggcgtcaagcagggcgatcctatgtctcctctgctgttcaacctcgccatggaccctctgctctgcaagctcgaggagtctggaaagggctaccatagaggccaatcatcgatcaccgccatggccttcgccgacgacctggtgcttttaagcgacagctgggagaacatgaacaccaacatctctatcctggagacattctgcaaccttaccggcctgaaaacccagggccagaagtgtcatggcttctacatcaaacccaccaagaagagctacaccatcaacgactgcgccgcctggacaatcaacggcacccctctcaacatgatcgaccccggcgagtctgagaagtacctgggcctgcagttcgatccctggatcggcatcgctagaagcggcttgagcaccaagctggacgagtggctccaacgcatagaccaggcccccctgaagcctcttcagaaactggacattttgaaaacttatacgatccccagactcatctacatcgccgaccactccgaggtcaagagcgctctgctggaaaccctggaccagaaaatcagaaccgccgtcaaggaatggctgcacctgcccccttgcacatgcgacgctatcctgtacagcagcaccagggacggcggcttaggaatcaccaagttagccggcctcatccccagcgtgcaggctaggagactccacagaatcgcccagagcagcgacgacaccatgaagtgcttcatggagaaggaaaagatggagcagctgcacaagaagctgtggatccaagcgggcggagatcgtgagaacattcccagcatctgggaggcccctcccagctcagaacctcccaataacgtgtccaccaattctgaatgggaggctcccacccagaagcccaagtttcccaagccctgcaactggcggaagaacgagttcaaaaaatggacaaagctggctagccagggcaggggcatcgtgaacttcgaaagggacaagattagcaaccactggatccagtactacagaagaatcccccacagaaagctcctcaccgccctccagttacgtgcaaacgtgtacccaaccagagaattcctggccagaggcagacaggaccagtacatcaaggcctgccggcactgcgatgccgataacgagagctgtgctcacatcatcggcaactgccccgtcacccaggacgccagaatcaagagacacaactacatctgcgagttacttctggaggaagccaagaagaaggattgggttgtgttcaaggagccccacatcagagactccaacaaggagctgtacaagccagacctcatcttcgtgaaggacggcagagccctggtggtggacgtcaccgtcagatacgaggctgctaagtccagccttgaggaggctgccgccgagaaagtgcggaagtacaagcacctggaaacagaggtcagacacctcaccaacgccaaggacgttaccttcgtgggcttccccctaggtgctagaggcaaatggcaccaggacaacttcaagctgcttaccgagctgggcctctccaagagccgacaggttaagatggccgagaccttcagcaccgtcgccctgttctcttctgtggacattgtgcacatgttcgcctccagagccagaaagagcatggtgatgtgataataggctgccttctgcggggcttgccttctggccatgcccttcttctctcccttgcacctgtacctcttggtctttgaataaagcctgagtaggaaggaccggtaaaaaaaaaaaaaaaaaaaaaaaaaaaaaaacgttgactaaaaaaaaaaaaaaaaaaaaaaaaaaaaaaaaaaaaaaaaaaaaaaaaaaaaaaaaaaaaaaaaaaaaaa

SEQ ID NO: 11127 - DNA, 5389 bp, synthetic construct
  source 1..5389: mol_type = other DNA
ggtctagttacaactgggcatcgctgcagagatcgcacctcctcgtggtcccgctggtagcccttcgaagggtgactaagtcgatctctgccccaggtacggagccgttgggactcaccagtccaacgtaactcctgcctaaattcggtgaaacaaattcctcggtaaaaagccccatggcccctaagaaaaagcggaaggtgaatatcagcggctctagctgcggcagccccaacagcgccgacaccagcagcgacttcaaggacctgtggaccaagctgaaggaatgccacgaccgggaagtgcagggactccaggtgaaggtcaccaaactcaagcaagaaagaatcctggacgcccagagactggaagaattcttcaccaagaaccagcagctgagagagcagcagaaagtgctgcacgagacaatcaaggttctggaagatagactgcgggccggcctgtgcgacagatgcgccgtgaccgaggaacacatgcgcaaaaagcagcaggagttcgagaacattagacagcaaaatctgaaattgatcacagagctgatgaacgagagaaacacactgcaggaggagaacaagaagctgagcgagcagctgcaacagaagatcgagaatgatcagcaacaccaggccgctgagctggaatgtgaagaggacgtgatccccgacagcccaatcacagctttcagcttttctggcgtgaacagactgaggcggaaggaaaacccccacgtgcggtacatcgagcagacccataccaagctggaacacagcgtgtgtgccaacgagatgagaaaggtgtccaagtcctccacccatccccagcacaaccctaacgaaaatgagatcctggtggctgatacctacgaccagtctcagagccctatggccaaggcccacggcaccagctcttatacccctgataagagctccttcaacctggccaccgtggtggccgagacactgggcctgggcgtgcaggaggaaagcgagacacagggcccaatgagccctctgggagatgagctgtaccactgcctggaaggcaaccacaagaaacagccttttgagtccggctccgagactcctggaacaagcgagagcgctacacctgagggcagccctaagagaaaggtgtccagcgccgagggcgctgccaaggaagagcctaaacggagaagcgccagactgagcgccaagccccccgccaaggtggaagccaagcctaagaaggccgccgctaaggacaagagcagcgataagaaagtccagaccaagggcaagcggggcgccaaaggcaaacaggccgaggtggccaaccaggagacaaaggaagatctgcctgctgagaacggcgaaaccaagaccgaggaatctccagcttctgacgaggccggagagaaggaggccaaaagcgacagcggctctgagacacctggaacaagcgagagcgccaccccggaatcctacgaacagctggctccccagccctgtgtaggcgagacattacacagcagcctgcccagagacagcgagctgttcgttccggaagagggctctagcgagaaggagagcgaggacgctcctaagaccagccctcctacccctggcaaacacggcctggagcaaacaggcgaggagaaggtcatggtgaccgtgcccgacaagaaccctccctgtccttgctgtggcacaagagtcaacagcgtgctgaacctcatcgagcacctgaaggtgtcccacggcaagagaggcgtgtgcttcagatgcgccaagtgcggcaaggagaacagcaactaccacagcgtcgtgtgccacttcaagaagtgcagaggccctgagaccgagaaggctcccgctggcgaatggatttgcgaggtgtgcaacagagacttcaccaccaagatcggcctgggccagcacaagcggttagctcaccctgctgtgagaaaccaggagagaatcgtggccagccagcccaaggagacaagcaacaggggcgctcacaagagatgctggaccaaggaggaagaggagctgctcatcagactggaggctcagttcgagggccacaagaacatcaataagcttatcgccgagcacatcaccacaaagaccgccaagcagatcagcgacaagaggagactgctgtccagaaagcccgccgaggagcctagaatggaacctggtacatgtcaccacaccagaagagccgccgctagcctgagaaccgagcccgaaatgtctcaccacgctcaggccgaggacagagacaacggccctggcaggagacctcttcccggcagagctgctgctggaggcagaaccatggacgagatcaggagacaccccgataagggcaacggccagcagagacccacaaagcagaagtccgaggaacagctccaggcctactacaagaaaaccctggaggagagactgtccgcgggagctctgaacaccttccctagagccttcaaacaagtcatggagggcagagacatcaagctggtgatcaaccagaccgcccaggactgcttcggctgccttgagtctatcagccagatcaggaccgccacacgggataagaaggacaccgtcaccagagagaagcaccccaagagacccttccagaaatggatgaagaagagggccatcaagaagggcaattacctgagattccagaggctgttctacctggacagaggcaagctggccaagatcatcctggacgacatcgagtgcctgagctgcgacatccctctgagcgagatctacagcgtgttcaagaccagatgggagaccaccggcagcttcaagtctctgggcgacttcaagacatacggcaaggccgacaacaccgccttcagagagctcatcaccgctaaggagatcgagaagaacgtgcaggagatgagcaagggcagcgctcctggccccgatggaattacactgggcgatgtggtgaagatggaccccgagttcagcagaacaatggagatcttcaacctgtggctcaccacaggcaagatccccgacatggtgagaggctgcagaaccgtgcttatccccaagagcagcaagcccgacagactgaaggatatcaacaactggagacccatcaccatcggcagcatcctgctgcggctgttcagccggattgtgaccgctagactgagcaaagcctgtcccctgaaccccagacagagaggcttcatcagagccgctggctgcagcgagaacctgaagctgctccagacaatcatctggagcgccaagagagagcacagacccctgggcgttgttttcgtggacatcgccaaggccttcgacaccgtgtcccatcagcacattatccacgccctgcagcagagggaggtcgaccctcatattgtgggcctggtgtccaacatgtacgagaacatctccacctatattacgaccaagagaaacacccacacagacaagatccagatccgggtcggcgtcaagcagggcgatcctatgtctcctctgctgttcaacctcgccatggaccctctgctctgcaagctcgaggagtctggaaagggctaccatagaggccaatcatcgatcaccgccatggccttcgccgacgacctggtgcttttaagcgacagctgggagaacatgaacaccaacatctctatcctggagacattctgcaaccttaccggcctgaaaacccagggccagaagtgtcatggcttctacatcaaacccaccaagaagagctacaccatcaacgactgcgccgcctggacaatcaacggcacccctctcaacatgatcgaccccggcgagtctgagaagtacctgggcctgcagttcgatccctggatcggcatcgctagaagcggcttgagcaccaagctggacttttggctccaacgcatagaccaggcccccctgaagcctcttcagaaactggacattttgaaaacttatacgatccccagactcatctacatcgccgaccactccgaggtcaagagcgctctgctggaaaccctggaccagaaaatcagaaccgccgtcaaggaatggctgcacctgcccccttgcacatgcgacgctatcctgtacagcagcaccagggacggcggcttaggaatcaccaagttagccggcctcatccccagcgtgcaggctaggagactccacagaatcgcccagagcagcgacgacaccatgaagtgcttcatggagaaggaaagaatggagcagctgcacaagaagctgtggatccaagcgggcggagatcgtgagaacattcccagcatctgggaggcccctcccagctcagaacctcccaataacgtgtccaccaattctgaatgggaggctcccacccagaaggataagtttcccaagccctgcaactggcggaagaacgagttcaaaaaatggacaaagctggctagccagggcaggggcatcgtgaacttcgaaagggacaagattagcaaccactggatccagtactacagaagaatcccccacagaaagctcctcaccgccctccagttacgtgcaaacgtgtacccaaccagagaattcctggccagaggcagacaggaccagtacatcaaggcctgccggcactgcgatgccgataacgagagctgtgctcacatcatcggcaactgccccgtcacccaggacgccagaatcaagagacacaactacatctgcgagttacttctggaggaagccaagaagaaggattgggttgtgttcaaggagccccacatcagagactccaacaaggagctgtacaagccagacctcatcttcgtgaaggacggcagagccctggtggtggacgtcaccgtcagatacgaggctgctaagtccagccttgaggaggctgccgccgagaaagtgcggaagtacaagcacctggaaacagaggtcagacacctcaccaacgccaaggacgttaccttcgtgggcttccccctaggtgctagaggcaaatggcaccaggacaacttcaagctgcttaccgagctgggcctctccaagagccgacaggttaagatggccgagaccttcagcaccgtcgccctgttctcttctgtggacattgtgcacatgttcgcctccagagccagaaagagcatggtgatgtgataataggctgccttctgcggggcttgccttctggccatgcccttcttctctcccttgcacctgtacctcttggtctttgaataaagcctgagtaggaaggaccggtaaaaaaaaaaaaaaaaaaaaaaaaaaaaaaacgttgactaaaaaaaaaaaaaaaaaaaaaaaaaaaaaaaaaaaaaaaaaaaaaaaaaaaaaaaaaaaaaaaaaaaaaa

SEQ ID NO: 11128 - DNA, 5389 bp, synthetic construct
  source 1..5389: mol_type = other DNA
ggtctagttacaactgggcatcgctgcagagatcgcacctcctcgtggtcccgctggtagcccttcgaagggtgactaagtcgatctctgccccaggtacggagccgttgggactcaccagtccaacgtaactcctgcctaaattcggtgaaacaaattcctcggtaaaaagccccatggcccctaagaaaaagcggaaggtgaatatcagcggctctagctgcggcagccccaacagcgccgacaccagcagcgacttcaaggacctgtggaccaagctgaaggaatgccacgaccgggaagtgcagggactccaggtgaaggtcaccaaactcaagcaagaaagaatcctggacgcccagagactggaagaattcttcaccaagaaccagcagctgagagagcagcagaaagtgctgcacgagacaatcaaggttctggaagatagactgcgggccggcctgtgcgacagatgcgccgtgaccgaggaacacatgcgcaaaaagcagcaggagttcgagaacattagacagcaaaatctgaaattgatcacagagctgatgaacgagagaaacacactgcaggaggagaacaagaagctgagcgagcagctgcaacagaagatcgagaatgatcagcaacaccaggccgctgagctggaatgtgaagaggacgtgatccccgacagcccaatcacagctttcagcttttctggcgtgaacagactgaggcggaaggaaaacccccacgtgcggtacatcgagcagacccataccaagctggaacacagcgtgtgtgccaacgagatgagaaaggtgtccaagtcctccacccatccccagcacaaccctaacgaaaatgagatcctggtggctgatacctacgaccagtctcagagccctatggccaaggcccacggcaccagctcttatacccctgataagagctccttcaacctggccaccgtggtggccgagacactgggcctgggcgtgcaggaggaaagcgagacacagggcccaatgagccctctgggagatgagctgtaccactgcctggaaggcaaccacaagaaacagccttttgagtccggctccgagactcctggaacaagcgagagcgctacacctgagggcagccctaagagaaaggtgtccagcgccgagggcgctgccaaggaagagcctaaacggagaagcgccagactgagcgccaagccccccgccaaggtggaagccaagcctaagaaggccgccgctaaggacaagagcagcgataagaaagtccagaccaagggcaagcggggcgccaaaggcaaacaggccgaggtggccaaccaggagacaaaggaagatctgcctgctgagaacggcgaaaccaagaccgaggaatctccagcttctgacgaggccggagagaaggaggccaaaagcgacagcggctctgagacacctggaacaagcgagagcgccaccccggaatcctacgaacagctggctccccagccctgtgtaggcgagacattacacagcagcctgcccagagacagcgagctgttcgttccggaagagggctctagcgagaaggagagcgaggacgctcctaagaccagccctcctacccctggcaaacacggcctggagcaaacaggcgaggagaaggtcatggtgaccgtgcccgacaagaaccctccctgtccttgctgtggcacaagagtcaacagcgtgctgaacctcatcgagcacctgaaggtgtcccacggcaagagaagagtgtgcttcagatgcgccaagtgcggcaaggagaacagcaactaccacagcgtcgtgtgccacttcaagaagtgcagaggccctgagaccgagaaggctcccgctggcgaatggatttgcgaggtgtgcaacagagacttcaccaccaagatcggcctgggccagcacaagcggttagctcaccctgctgtgagaaaccaggagagaatcgtggccagccagcccaaggagacaagcaacaggggcgctcacaagagatgctggaccaaggaggaagaggagctgctcatcagactggaggctcagttcgagggccacaagaacatcaataagcttatcgccgagcacatcaccacaaagaccgccaagcagatcagcgacaagaggagactgctgtccagaaagcccgccgaggagcctagaatggaacctggtacatgtcaccacaccagaagagccgccgctagcctgagaaccgagcccgaaatgtctcaccacgctcaggccgaggacagagacaacggccctggcaggagacctcttcccggcagacccgctgctggaggcagaaccatggacgagatcaggagacaccccgataagggcaacggccagcagagacccacaaagcagaagtccgaggaacagctccaggcctactacaagaaaaccctggaggagagactgtccgcgggagctctgaacaccttccctagagccttcaaacaagtcatggagggcagagacatcaagctggtgatcaaccagaccgcccaggactgcttcggctgccttgagtctatcagccagatcaggaccgccacacgggataagaaggacaccgtcaccagagagaagcaccccaagagacccttccagaaatggatgaagaagagggccatcaagaagggcaattacctgagattccagaggctgttctacctggacagaggcaagctggccaagatcatcctggacgacatcgagtgcctgagctgcgacatccctctgagcgagatctacagcgtgttcaagaccagatgggagaccaccggcagcttcaagtctctgggcgacttcaagacatacggcaaggccgacaacaccgccttcagagagctcatcaccgctaaggagatcgagaagaacgtgcaggagatgagcaagggcagcgctcctggccccgatggaattacactgggcgatgtggtgaagatggaccccgagttcagcagaacaatggagatcttcaacctgtggctcaccacaggcaagatccccgacatggtgagaggctgcagaaccgtgcttatccccaagagcagcaagcccgacagactgaaggatatcaacaactggagacccatcaccatcggcagcatcctgctgcggctgttcagccggattgtgaccgctagactgagcaaagcctgtcccctgaaccccagacagagaggcttcatcagagccgctggctgcagcgagaacctgaagctgctccagacaatcatctggagcgccaagagagagcacagacccctgggcgttgttttcgtggacatcgccaaggccttcgacaccgtgtcccatcagcacattatccacgccctgcagcagagggaggtcgaccctcatattgtgggcctggtgtccaacatgtacgagaacatctccacctatattacgaccaagagaaacacccacacagacaagatccagatccgggtcggcgtcaagcagggcgatcctatgtctcctctgctgttcaacctcgccatggaccctctgctctgcaagctcgaggagtctggaaagggctaccatagaggccaatcatcgatcaccgccatggccttcgccgacgacctggtgcttttaagcgacagctgggagaacatgaacaccaacatctctatcctggagacattctgcaaccttaccggcctgaaaacccagggccagaagtgtcatggcttctacatcaaacccaccaagaagagctacaccatcaacgactgcgccgcctggacaatcaacggcacccctctcaacatgatcgaccccggcgagtctgagaagtacctgggcctgcagttcgatccctggatcggcatcgctagaagcggcttgagcaccaagctggacttttggctccaacgcatagaccaggcccccctgaagcctcttcagaaactggacattttgaaaacttatacgatccccagactcatctacatcgccgaccactccgaggtcaagagcgctctgctggaaaccctggaccagaaaatcagaaccgccgtcaaggaatggctgcacctgcccccttgcacatgcgacgctatcctgtacagcagcaccagggacggcggcttaggaatcaccaagttagccggcctcatccccagcgtgcaggctaggagactccacagaatcgcccagagcagcgacgacaccatgaagtgcttcatggagaaggaaagaatggagcagctgcacaagaagctgtggatccaagcgggcggagatcgtgagaacattcccagcatctgggaggcccctcccagctcagaacctcccaataacgtgtccaccaattctgaatgggaggctcccacccagaaggataagtttcccaagccctgcaactggcggaagaacgagttcaaaaaatggacaaagctggctagccagggcaggggcatcgtgaacttcgaaagggacaagattagcaaccactggatccagtactacagaagaatcccccacagaaagctcctcaccgccctccagttacgtgcaaacgtgtacccaaccagagaattcctggccagaggcagacaggaccagtacatcaaggcctgccggcactgcgatgccgataacgagagctgtgctcacatcatcggcaactgccccgtcacccaggacgccagaatcaagagacacaactacatctgcgagttacttctggaggaagccaagaagaaggattgggttgtgttcaaggagccccacatcagagactccaacaaggagctgtacaagccagacctcatcttcgtgaaggacggcagagccctggtggtggacgtcaccgtcagatacgaggctgctaagtccagccttgaggaggctgccgccgagaaagtgcggaagtacaagcacctggaaacagaggtcagacacctcaccaacgccaaggacgttaccttcgtgggcttccccctaggtgctagaggcaaatggcaccaggacaacttcaagctgcttaccgagctgggcctctccaagagccgacaggttaagatggccgagaccttcagcaccgtcgccctgttctcttctgtggacattgtgcacatgttcgcctccagagccagaaagagcatggtgatgtgataataggctgccttctgcggggcttgccttctggccatgcccttcttctctcccttgcacctgtacctcttggtctttgaataaagcctgagtaggaaggaccggtaaaaaaaaaaaaaaaaaaaaaaaaaaaaaaacgttgactaaaaaaaaaaaaaaaaaaaaaaaaaaaaaaaaaaaaaaaaaaaaaaaaaaaaaaaaaaaaaaaaaaaaaa

SEQ ID NO: 11129 - DNA, 5389 bp, synthetic construct
  source 1..5389: mol_type = other DNA
ggtctagttacaactgggcatcgctgcagagatcgcacctcctcgtggtcccgctggtagcccttcgaagggtgactaagtcgatctctgccccaggtacggagccgttgggactcaccagtccaacgtaactcctgcctaaattcggtgaaacaaattcctcggtaaaaagccccatggcccctaagaaaaagcggaaggtgaatatcagcggctctagctgcggcagccccaacagcgccgacaccagcagcgacttcaaggacctgtggaccaagctgaaggaatgccacgaccgggaagtgcagggactccaggtgaaggtcaccaaactcaagcaagaaagaatcctggacgcccagagactggaagaattcttcaccaagaaccagcagctgagagagcagcagaaagtgctgcacgagacaatcaaggttctggaagatagactgcgggccggcctgtgcgacagatgcgccgtgaccgaggaacacatgcgcaaaaagcagcaggagttcgagaacattagacagcaaaatctgaaattgatcacagagctgatgaacgagagaaacacactgcaggaggagaacaagaagctgagcgagcagctgcaacagaagatcgagaatgatcagcaacaccaggccgctgagctggaatgtgaagaggacgtgatccccgacagcccaatcacagctttcagcttttctggcgtgaacagactgaggcggaaggaaaacccccacgtgcggtacatcgagcagacccataccaagctggaacacagcgtgtgtgccaacgagatgagaaaggtgtccaagtcctccacccatccccagcacaaccctaacgaaaatgagatcctggtggctgatacctacgaccagtctcagagccctatggccaaggcccacggcaccagctcttatacccctgataagagctccttcaacctggccaccgtggtggccgagacactgggcctgggcgtgcaggaggaaagcgagacacagggcccaatgagccctctgggagatgagctgtaccactgcctggaaggcaaccacaagaaacagccttttgagtccggctccgagactcctggaacaagcgagagcgctacacctgagggcagccctaagagaaaggtgtccagcgccgagggcgctgccaaggaagagcctaaacggagaagcgccagactgagcgccaagccccccgccaaggtggaagccaagcctaagaaggccgccgctaaggacaagagcagcgataagaaagtccagaccaagggcaagcggggcgccaaaggcaaacaggccgaggtggccaaccaggagacaaaggaagatctgcctgctgagaacggcgaaaccaagaccgaggaatctccagcttctgacgaggccggagagaaggaggccaaaagcgacagcggctctgagacacctggaacaagcgagagcgccaccccggaatcctacgaacagctggctccccagccctgtgtaggcgagacattacacagcagcctgcccagagacagcgagctgttcgttccggaagagggctctagcgagaaggagagcgaggacgctcctaagaccagccctcctacccctggcaaacacggcctggagcaaacaggcgaggagaaggtcatggtgaccgtgcccgacaagaaccctccctgtccttgctgtggcacaagagtcaacagcgtgctgaacctcatcgagcacctgaaggtgtcccacggcaagagaggcgtgtgcttcagatgcgccaagtgcggcaaggagaacagcaactaccacagcgtcgtgtgccacttcaagaagtgcagaggccctgagaccgagaaggctcccgctggcgaatggatttgcgaggtgtgcaacagagacttcaccaccaagatcggcctgggccagcacaagcggttagctcaccctgctgtgagaaaccaggagagaatcgtggccagccagcccaaggagacaagcaacaggggcgctcacaagagatgctggaccaaggaggaagaggagctgctcatcagactggaggctcagttcgagggcaacaagaacatcaataagcttatcgccgagcacatcaccacaaagaccgccaagcagatcagcgacaagaggagactgctgtccagaaagcccgccgaggagcctagaatggaacctggtacatgtcaccacaccagaagagccgccgctagcctgagaaccgagcccgaaatgtctcaccacgctcaggccgaggacagagacaacggccctggcaggagacctcttcccggcagagctgctgctggaggcagaaccatggacgagatcaggagacaccccgataagggcaacggccagcagagacccacaaagcagaagtccgaggaacagctccaggcctactacaagaaaaccctggaggagagactgtccgcgggagctctgaacaccttccctagagccttcaaacaagtcatggagggcagagacatcaagctggtgatcaaccagaccgcccaggactgcttcggctgccttgagtctatcagccagatcaggaccgccacacgggataagaaggacaccgtcaccagagagaagcaccccaagaagcccttccagaaatggatgaagaagagggccatcaagaagggcaattacctgagattccagaggctgttctacctggacagaggcaagctggccaagatcatcctggacgacatcgagtgcctgagctgcgacatccctctgagcgagatctacagcgtgttcaagaccagatgggagaccaccggcagcttcaagtctctgggcgacttcaagacatacggcaaggccgacaacaccgccttcagagagctcatcaccgctaaggagatcgagaagaacgtgcaggagatgagcaagggcagcgctcctggccccgatggaattacactgggcgatgtggtgaagatggaccccgagttcagcagaacaatggagatcttcaacctgtggctcaccacaggcaagatccccgacatggtgagaggctgcagaaccgtgcttatccccaagagcagcaagcccgacagactgaaggatatcaacaactggagacccatcaccatcggcagcatcctgctgcggctgttcagccggattgtgaccgctagactgagcaaagcctgtcccctgaaccccagacagagaggcttcatcagagccgctggctgcagcgagaacctgaagctgctccagacaatcatctggagcgccaagagagagcacagacccctgggcgttgttttcgtggacatcgccaaggccttcgacaccgtgtcccatcagcacattatccacgccctgcagcagagggaggtcgaccctcatattgtgggcctggtgtccaacatgtacgagaacatctccacctatattacgaccaagagaaacacccacacagacaagatccagatccgggtcggcgtcaagcagggcgatcctatgtctcctctgctgttcaacctcgccatggaccctctgctctgcaagctcgaggagtctggaaagggctaccatagaggccaatcatcgatcaccgccatggccttcgccgacgacctggtgcttttaagcgacagctgggagaacatgaacaccaacatctctatcctggagacattctgcaaccttaccggcctgaaaacccagggccagaagtgtcatggcttctacatcaaacccaccaagaagagctacaccatcaacgactgcgccgcctggacaatcaacggcacccctctcaacatgatcgaccccggcgagtctgagaagtacctgggcctgcagttcgatccctggatcggcatcgctagaagcggcttgagcaccaagctggacttttggctccaacgcatagaccaggcccccctgaagcctcttcagaaactggacattttgaaaacttatacgatccccagactcatctacatcgccgaccactccgaggtcaagagcgctctgctggaaaccctggaccagaaaatcagaaccgccgtcaaggaatggctgcacctgcccccttgcacatgcgacgctatcctgtacagcagcaccagggacggcggcttaggaatcaccaagttagccggcctcatccccagcgtgcaggctaggagactccacagaatcgcccagagcagcgacgacaccatgaagtgcttcatggagaaggaaaagatggagcagctgcacaagaagctgtggatccaagcgggcggagatcgtgagaacattcccagcatctgggaggcccctcccagctcagaacctcccaataacgtgtccaccaattctgaatgggaggctcccacccagaaggataagtttcccaagccctgcaactggcggaagaacgagttcaaaaaatggacaaagctggctagccagggcaggggcatcgtgaacttcgaaagggacaagattagcaaccactggatccagtactacagaagaatcccccacagaaagctcctcaccgccctccagttacgtgcaaacgtgtacccaaccagagaattcctggccagaggcagacaggaccagtacatcaaggcctgccggcactgcgatgccgataacgagagctgtgctcacatcatcggcaactgccccgtcacccaggacgccagaatcaagagagccaactacatctgcgagttacttctggaggaagccaagaagaaggattgggttgtgttcaaggagccccacatcagagactccaacaaggagctgtacaagccagacctcatcttcgtgaaggacggcagagccctggtggtggacgtcaccgtcagatacgaggctgctaagtccagccttgaggaggctgccgccgagaaagtgcggaagtacaagcacctggaaacagaggtcagacacctcaccaacgccaaggacgttaccttcgtgggcttccccctaggtgctagaggcaaatggcaccaggacaacttcaagctgcttaccgagctgggcctctccaagagccgacaggttaagatggccgagaccttcagcaccgtcgccctgttctcttctgtggacattgtgcacatgttcgcctccagagccagaaagagcatggtgatgtgataataggctgccttctgcggggcttgccttctggccatgcccttcttctctcccttgcacctgtacctcttggtctttgaataaagcctgagtaggaaggaccggtaaaaaaaaaaaaaaaaaaaaaaaaaaaaaaacgttgactaaaaaaaaaaaaaaaaaaaaaaaaaaaaaaaaaaaaaaaaaaaaaaaaaaaaaaaaaaaaaaaaaaaaaa

SEQ ID NO: 11130 - DNA, 5389 bp, synthetic construct
  source 1..5389: mol_type = other DNA
ggtctagttacaactgggcatcgctgcagagatcgcacctcctcgtggtcccgctggtagcccttcgaagggtgactaagtcgatctctgccccaggtacggagccgttgggactcaccagtccaacgtaactcctgcctaaattcggtgaaacaaattcctcggtaaaaagccccatggcccctaagaaaaagcggaaggtgaatatcagcggctctagctgcggcagccccaacagcgccgacaccagcagcgacttcaaggacctgtggaccaagctgaaggaatgccacgaccgggaagtgcagggactccaggtgaaggtcaccaaactcaagcaagaaagaatcctggacgcccagagactggaagaattcttcaccaagaaccagcagctgagagagcagcagaaagtgctgcacgagacaatcaaggttctggaagatagactgcgggccggcctgtgcgacagatgcgccgtgaccgaggaacacatgcgcaaaaagcagcaggagttcgagaacattagacagcaaaatctgaaattgatcacagagctgatgaacgagagaaacacactgcaggaggagaacaagaagctgagcgagcagctgcaacagaagatcgagaatgatcagcaacaccaggccgctgagctggaatgtgaagaggacgtgatccccgacagcccaatcacagctttcagcttttctggcgtgaacagactgaggcggaaggaaaacccccacgtgcggtacatcgagcagacccataccaagctggaacacagcgtgtgtgccaacgagatgagaaaggtgtccaagtcctccacccatccccagcacaaccctaacgaaaatgagatcctggtggctgatacctacgaccagtctcagagccctatggccaaggcccacggcaccagctcttatacccctgataagagctccttcaacctggccaccgtggtggccgagacactgggcctgggcgtgcaggaggaaagcgagacacagggcccaatgagccctctgggagatgagctgtaccactgcctggaaggcaaccacaagaaacagccttttgagtccggctccgagactcctggaacaagcgagagcgctacacctgagggcagccctaagagaaaggtgtccagcgccgagggcgctgccaaggaagagcctaaacggagaagcgccagactgagcgccaagccccccgccaaggtggaagccaagcctaagaaggccgccgctaaggacaagagcagcgataagaaagtccagaccaagggcaagcggggcgccaaaggcaaacaggccgaggtggccaaccaggagacaaaggaagatctgcctgctgagaacggcgaaaccaagaccgaggaatctccagcttctgacgaggccggagagaaggaggccaaaagcgacagcggctctgagacacctggaacaagcgagagcgccaccccggaatcctacgaacagctggctccccagccctgtgtaggcgagacattacacagcagcctgcccagagacagcgagctgttcgttccggaagagggctctagcgagaaggagagcgaggacgctcctaagaccagccctcctacccctggcaaacacggcctggagcaaacaggcgaggagaaggtcatggtgaccgtgcccgacaagaaccctccctgtccttgctgtggcacaagagtcaacagcgtgctgaacctcatcgagcacctgaaggtgtcccacggcaagagaggcgtgtgcttcagatgcgccaagtgcggcaaggagaacagcaactaccacagcgtcgtgtgccacttcaagaagtgcagaggccctgagaccgagaaggctcccgctggcgaatggatttgcgaggtgtgcaacagagacttcaccaccaagatcggcctgggccagcacaagcggttagctcaccctgctgtgagaaaccaggagagaatcgtggccagccagcccaaggagacaagcaacaggggcgctcacaagagatgctggaccaaggaggaagaggagctgctcatcagactggaggctcagttcgagggcaacaagaacatcaataagcttatcgccgagcacatcaccacaaagaccgccaagcagatcagcgacaagaggagactgctgtccagaaagcccgccgaggagcctagaatggaacctggtacatgtcaccacaccagaagagccgccgctagcctgagaaccgagcccgaaatgtctcaccacgctcaggccgaggacagagacaacggccctggcaggagacctcttcccggcagagctgctgctggaggcagaaccatggacgagatcaggagacaccccgataagggcaacggccagcagagacccacaaagcagaagtccgaggaacagctccaggcctactacaagaaaaccctggaggagagactgtccgcgggagctctgaacaccttccctagagccttcaaacaagtcatggagggcagagacatcaagctggtgatcaaccagaccgcccaggactgcttcggctgccttgagtctatcagccagatcaggaccgccacacgggataagaaggacaccgtcaccagagagaagcaccccaagaagcccttccagaaatggatgaagaagagggccatcaagaagggcaattacctgagattccagaggctgttctacctggacagaggcaagctggccaagatcatcctggacgacatcgagtgcctgagctgcgacatccctctgagcgagatctacagcgtgttcaagaccagatgggagaccaccggcagcttcaagtctctgggcgacttcaagacatacggcaaggccgacaacaccgccttcagagagctcatcaccgctaaggagatcgagaagaacgtgcaggagatgagcaagggcagcgctcctggccccgatggaattacactgggcgatgtggtgaagatggaccccgagttcagcagaacaatggagatcttcaacctgtggctcaccacaggcaagatccccgacatggtgagaggctgcagaaccgtgcttatccccaagagcagcaagcccgacagactgaaggatatcaacaactggagacccatcaccatcggcagcatcctgctgcggctgttcagccggattgtgaccgctagactgagcaaagcctgtcccctgaaccccagacagagaggcttcatcagagccgctggctgcagcgagaacctgaagctgctccagacaatcatctggagcgccaagagagagcacagacccctgggcgttgttttcgtggacatcgccaaggccttcgacaccgtgtcccatcagcacattatccacgccctgcagcagagggaggtcgaccctcatattgtgggcctggtgtccaacatgtacgagaacatctccacctatattacgaccaagagaaacacccacacagacaagatccagatccgggtcggcgtcaagcagggcgatcctatgtctcctctgctgttcaacctcgccatggaccctctgctctgcaagctcgaggagtctggaaagggctaccatagaggccaatcatcgatcaccgccatggccttcgccgacgacctggtgcttttaagcgacagctgggagaacatgaacaccaacatctctatcctggagacattctgcaaccttaccggcctgaaaacccagggccagaagtgtcatggcttctacatcaaacccaccaagaagagctacaccatcaacgactgcgccgcctggacaatcaacggcacccctctcaacatgatcgaccccggcgagtctgagaagtacctgggcctgcagttcgatccctggatcggcatcgctagaagcggcttgagcaccaagctggacttttggctccaacgcatagaccaggcccccctgaagcctcttcagaaactggacattttgaaaacttatacgatccccagactcatctacatcgccgaccactccgaggtcaagagcgctctgctggaaaccctggaccagaaaatcagaaccgccgtcaaggaatggctgcacctgcccccttgcacatgcgacgctatcctgtacagcagcaccagggacggcggcttaggaatcaccaagttagccggcctcatccccagcgtgcaggctaggagactccacagaatcgcccagagcagcgacgacaccatgaagtgcttcatggagaaggaaaagatggagcagctgcacaagaagctgtggatccaagcgggcggagatcgtgagaacattcccagcatctgggaggcccctcccagctcagaacctcccaataacgtgtccaccaattctgaatgggaggctcccacccagaaggataagtttcccaagccctgcaactggcggaagaacgagttcaaaaaatggacaaagctggctagccagggcaggggcatcgtgaacttcgaaagggacaagattagcaaccactggatccagtactacagaagaatcccccacagaaagctcctcaccgccctccagttacgtgcaaacgtgtacccaaccagagaattcctggccagaggcagacaggaccagtacatcaaggcctgccggcactgcgatgccgataacgagagctgtgctcacatcatcggcaactgccccgtcacccaggacgccagaatcaagagagccaactacatctgcgagttacttctggaggaagccaagaagaaggattgggttgtgttcaaggagccccacatcagagactccaacaaggagctgtacaagccagacctcatcttcgtgaaggacggcagagccctggtggtggacgtcaccgtcagatacgaggctgctaagtccagccttgaggaggctgccgccgagaaagtgcggaagtacaagcacctggaaacagaggtcagacacctcaccaacgccaaggacgttaccttcgtgggcttccccctaggtgctgccggcaaatggcaccaggacaacttcaagctgcttaccgagctgggcctctccaagagccgacaggttaagatggccgagaccttcagcaccgtcgccctgttctcttctgtggacattgtgcacatgttcgcctccagagccagaaagagcatggtgatgtgataataggctgccttctgcggggcttgccttctggccatgcccttcttctctcccttgcacctgtacctcttggtctttgaataaagcctgagtaggaaggaccggtaaaaaaaaaaaaaaaaaaaaaaaaaaaaaaacgttgactaaaaaaaaaaaaaaaaaaaaaaaaaaaaaaaaaaaaaaaaaaaaaaaaaaaaaaaaaaaaaaaaaaaaaa

SEQ ID NO: 11131 - DNA, 6116 bp, synthetic construct
  source 1..6116: mol_type = other DNA
gaaataagagagaaaagaagagtaagaagaaatataagagaattcgccaccatggccagcaacgactacacccagcaggccacccagagctacggcgcctaccccacccagcccggccagggctacagccagcagagcagccagccctacggccagcagagctacagcggctacagccagagcaccgacaccagcggctacggccagagcagctacagcagctacggccagagccagaacaccggctacggcacccagagcaccccccagggctacggcagcaccggcggctacggcagcagccagagcagccagagcagctacggccagcagagcagctaccccggctacggccagcagcccgcccccagcagcaccagcggcagctacggcagcagcagccagagcagcagctacggccagccccagagcggcagctacagccagcagcccagctacggcggccagcagcagagctacggccagcagcagagctacaaccccccccagggctacggccagcagaaccagtacaacagcagcagcggcggcggcggcggcggcggcggcggcggcaactacggccaggaccagagcagcatgagcagcggcggcggcagcggcggcggctacggcaaccaggaccagagcggcggcggcggcagcggcggctacggccagcaggacaggggcggcaggggcaggggcggcagcggcggcggcggcggcggcggcggcggcggctacaacaggagcagcggcggctacgagcccaggggcaggggcggcggcaggggcggcaggggcggcatgggcggcagcgacaggggcggcttcaacaagttcggcggccccagggaccagggcagcaggcacgacagcgagcaggacaacagcgacaacaacacccctaagaaaaagcggaaggtgaatatcagcggctctagctgcggcagccccaacagcgccgacaccagcagcgacttcaaggacctgtggaccaagctgaaggaatgccacgaccgggaagtgcagggactccaggtgaaggtcaccaaactcaagcaagaaagaatcctggacgcccagagactggaagaattcttcaccaagaaccagcagctgagagagcagcagaaagtgctgcacgagacaatcaaggttctggaagatagactgcgggccggcctgtgcgacagatgcgccgtgaccgaggaacacatgcgcaaaaagcagcaggagttcgagaacattagacagcaaaatctgaaattgatcacagagctgatgaacgagagaaacacactgcaggaggagaacaagaagctgagcgagcagctgcaacagaagatcgagaatgatcagcaacaccaggccgctgagctggaatgtgaagaggacgtgatccccgacagcccaatcacagctttcagcttttctggcgtgaacagactgaggcggaaggaaaacccccacgtgcggtacatcgagcagacccataccaagctggaacacagcgtgtgtgccaacgagatgagaaaggtgtccaagtcctccacccatccccagcacaaccctaacgaaaatgagatcctggtggctgatacctacgaccagtctcagagccctatggccaaggcccacggcaccagctcttatacccctgataagagctccttcaacctggccaccgtggtggccgagacactgggcctgggcgtgcaggaggaaagcgagacacagggcccaatgagccctctgggagatgagctgtaccactgcctggaaggcaaccacaagaaacagccttttgagtccggctccgagactcctggaacaagcgagagcgctacacctgagggcagccctaagagaaaggtgtccagcgccgagggcgctgccaaggaagagcctaaacggagaagcgccagactgagcgccaagccccccgccaaggtggaagccaagcctaagaaggccgccgctaaggacaagagcagcgataagaaagtccagaccaagggcaagcggggcgccaaaggcaaacaggccgaggtggccaaccaggagacaaaggaagatctgcctgctgagaacggcgaaaccaagaccgaggaatctccagcttctgacgaggccggagagaaggaggccaaaagcgacagcggctctgagacacctggaacaagcgagagcgccaccccggaatcctatgaacaacttgcaccacaaccgtgtgtgggagaaactttacattctagcctcccacgagacagtgaactgtttgtgcctgaagaggggagcagcgagaaggagagcgaggacgcgccaaaaacatctcctccgacgcctgggaaacatggtttggaacagactggggaggaaaaagtgatggtgactgttcctgacaaaaatccaccttgtccttgctgtggtacccgggtaaactctgtgttgaatctgattgaacatctgaaagtgtcacacgggaaaaggggggtttgttttcggtgtgcaaaatgtggaaaggaaaatagtaactatcacagtgttgtttgtcattttaagaaatgcaggggtccagagacggagaaagccccagctggggagtggatttgtgaggtatgcaacagagattttacaaccaaaattggcctgggacaacacaagagattggcacacccagcagtgagaaatcaggaaaggatcgttgcttcccaaccgaaagaaacatcaaatagaggtgctcacaaaaggtgctggacaaaggaggaggaagaattactaataagactggaggctcagttcgagggaaacaaaaatattaataagcttattgcagaacacataaccaccaaaacagctaagcagatcagtgacaaaaggcgattgctgtccagaaagccagcagaggagccacgtgaggagcctggaacgtgtcatcacaccaggagagcagctgcgagcctgagaacggagcctgagatgagtcatcacgcccaggcagaggacagagataatggacctgggagacgccctctgccaggcagggcagctgccggagggagaacaatggacgagataagacgccaccctgataagggcaacggacagcagagacccaccaagcaaaaatcagaagaacagctgcaggcttactataaaaagacactagaggaacgactttcagctggggcacttaacaccttcccccgagcattcaagcaggtaatggaaggccgggatataaagctagtaatcaatcagacagcgcaggactgcttcggatgcctggaatccataagccaaataagaacggcaacccgagataaaaaggacacggtgacccgggagaaacacccaaagaaaccttttcagaagtggatgaagaagagagcaatcaaaaaaggtaattatcttcggttccagcgtttattttatcttgatagagggaaactggctaaaatcattttagatgatattgaatgcttgtcttgtgacataccactcagtgaaatttattcggtttttaaaacaagatgggaaacaactggtagctttaaaagccttggggactttaaaacttacgggaaggctgacaacactgccttcagagaattaattacggctaaagaaattgagaaaaatgtgcaggaaatgagcaaaggctcggctcccggtccagacgggattactcttggggacgtcgtaaagatggatcccgagttttcccggaccatggagattttcaatttatggttaacaactggtaaaatcccggacatggtgagggggtgcagaaccgttttgattccaaaatcatcaaagccggatcgtttgaaagacattaataactggagacctatcacgatcggttccatcttgctgagactgttctccaggattgtaacagctaggctgagcaaagcgtgccccctgaacccaaggcaaagaggctttatcagagcggcgggatgctctgaaaacttaaaactcctgcaaactataatttggtcggccaaaagagaacacagaccactgggtgttgtattcgtggacatcgccaaggcttttgacaccgtaagccaccagcacatcattcatgctttgcagcaaagagaggtggatccccacatcgtcggtctggtgagcaatatgtacgagaacatcagtacgtatatcaccacaaagaggaacacacacacagacaaaatccagatccgggttggagtaaagcagggtgacccgatgtcgccccttttatttaacctggcaatggaccctctattatgcaagctggaagagagtggcaaaggataccaccgaggacagagcagcatcacagcgatggcatttgcagacgatctggttttgctgagcgactcctgggaaaatatgaatacaaatattagcatactggagaccttctgcaatctgaccggactcaaaacacaggggcaaaagtgccacggcttttacatcaagccgacaaagaagtcttacaccatcaatgactgcgctgcctggactatcaacggcacacccctgaacatgatcgaccccggcgaatctgagaaatacctcggcctgcagtttgacccgtggattggaatagcaaggtccggtctctccacaaaactagatttttggcttcagcggatcgatcaagcaccacttaaacctctgcagaaaactgatattctcaaaacatacaccatccctcggctgatctacatagctgaccactcagaagtgaaaagcgcactactcgaaacccttgaccagaagatccggacagcggtcaaggaatggcttcacctacctccgtgcacctgcgatgccatcctgtactcgagcacgagagacggcggtttgggcatcaccaaattggcaggactgatccccagcgtgcaggcccgtagactgcatcggatcgcacagtcatctgacgatacgatgaaatgcttcatggaaaaagagaaaatggaacagctgcataagaaattgtggattcaagctggaggggacagagagaacataccctcgatttgggaagcaccaccgtcgagtgaaccaccaaacaacgtgagcacaaattcggaatgggaagcaccgacccagaaagataaatttccaaagccttgcaattggaggaaaaacgaattcaaaaaatggaccaaattggcatcccaaggccgcggaattgtaaattttgaaagagacaaaattagtaaccattggatccaatactacagacgcatacctcacaggaaactcctcactgcactacaactcagggccaacgtttaccccacgagagaatttctagccaggggtagacaagaccaatacatcaaggcgtgtaggcactgcgatgcggacaacgaatcctgcgcccacatcatcggcaactgcccagtgacacaggacgcccgaatcaagaggcacaattacatctgcgaactgcttctcgaggaggcgaagaagaaggactgggtagtgttcaaggaaccgcacataagggattccaacaaggaactgtacaaacctgacctgatatttgtgaaggatgggcgtgcacttgtcgtggatgtgacagtacggtatgaagcagccaaatcatcgctggaggaagccgctgcagagaaagtgagaaagtacaaacacctggaaacggaagtaagacatctcacgaatgcaaaggacgttacttttgtgggctttcccctaggagcgcgggggaaatggcaccaagataactttaaacttttgactgagcttggcctctccaaatcgaggcaagtgaaaatggcagagactttttccacagtagcgctcttttcatctgtggacattgtacatatgtttgccagtagggccagaaaatctatggttatgtgataataggctgccttctgcggggcttgccttctggccatgcccttcttctctcccttgcacctgtacctcttggtctttgaataaagcctgagtaggaaggaccggtaaaaaaaaaaaaaaaaaaaaaaaaaaaaaaacgttgactaaaaaaaaaaaaaaaaaaaaaaaaaaaaaaaaaaaaaaaaaaaaaaaaaaaaaaaaaaaaaaaaaaaaaa

SEQ ID NO: 11132 - DNA, 5264 bp, synthetic construct
  source 1..5264: mol_type = other DNA
gaaataagagagaaaagaagagtaagaagaaatataagagaattcgccaccatggcccctaagaaaaagcggaaggtgaatatcagcggctctagctgcggcagccccaacagcgccgacaccagcagcgacttcaaggacctgtggaccaagctgaaggaatgccacgaccgggaagtgcagggactccaggtgaaggtcaccaaactcaagcaagaaagaatcctggacgcccagagactggaagaattcttcaccaagaaccagcagctgagagagcagcagaaagtgctgcacgagacaatcaaggttctggaagatagactgcgggccggcctgtgcgacagatgcgccgtgaccgaggaacacatgcgcaaaaagcagcaggagttcgagaacattagacagcaaaatctgaaattgatcacagagctgatgaacgagagaaacacactgcaggaggagaacaagaagctgagcgagcagctgcaacagaagatcgagaatgatcagcaacaccaggccgctgagctggaatgtgaagaggacgtgatccccgacagcccaatcacagctttcagcttttctggcgtgaacagactgaggcggaaggaaaacccccacgtgcggtacatcgagcagacccataccaagctggaacacagcgtgtgtgccaacgagatgagaaaggtgtccaagtcctccacccatccccagcacaaccctaacgaaaatgagatcctggtggctgatacctacgaccagtctcagagccctatggccaaggcccacggcaccagctcttatacccctgataagagctccttcaacctggccaccgtggtggccgagacactgggcctgggcgtgcaggaggaaagcgagacacagggcccaatgagccctctgggagatgagctgtaccactgcctggaaggcaaccacaagaaacagccttttgagtccggctccgagactcctggaacaagcgagagcgctacacctgagggcagccctaagagaaaggtgtccagcgccgagggcgctgccaaggaagagcctaaacggagaagcgccagactgagcgccaagccccccgccaaggtggaagccaagcctaagaaggccgccgctaaggacaagagcagcgataagaaagtccagaccaagggcaagcggggcgccaaaggcaaacaggccgaggtggccaaccaggagacaaaggaagatctgcctgctgagaacggcgaaaccaagaccgaggaatctccagcttctgacgaggccggagagaaggaggccaaaagcgacagcggctctgagacacctggaacaagcgagagcgccaccccggaatcctatgaacaacttgcaccacaaccgtgtgtgggagaaactttacattctagcctcccacgagacagtgaactgtttgtgcctgaagaggggagcagcgagaaggagagcgaggacgcgccaaaaacatctcctccgacgcctgggaaacatggtttggaacagactggggaggaaaaagtgatggtgactgttcctgacaaaaatccaccttgtccttgctgtggtacccgggtaaactctgtgttgaatctgattgaacatctgaaagtgtcacacgggaaaaggggggtttgttttcggtgtgcaaaatgtggaaaggaaaatagtaactatcacagtgttgtttgtcattttaagaaatgcaggggtccagagacggagaaagccccagctggggagtggatttgtgaggtatgcaacagagattttacaaccaaaattggcctgggacaacacaagagattggcacacccagcagtgagaaatcaggaaaggatcgttgcttcccaaccgaaagaaacatcaaatagaggtgctcacaaaaggtgctggacaaaggaggaggaagaattactaataagactggaggctcagttcgagggaaacaaaaatattaataagcttattgcagaacacataaccaccaaaacagctaagcagatcagtgacaaaaggcgattgctgtccagaaagccagcagaggagccacgtgaggagcctggaacgtgtcatcacaccaggagagcagctgcgagcctgagaacggagcctgagatgagtcatcacgcccaggcagaggacagagataatggacctgggagacgccctctgccaggcagggcagctgccggagggagaacaatggacgagataagacgccaccctgataagggcaacggacagcagagacccaccaagcaaaaatcagaagaacagctgcaggcttactataaaaagacactagaggaacgactttcagctggggcacttaacaccttcccccgagcattcaagcaggtaatggaaggccgggatataaagctagtaatcaatcagacagcgcaggactgcttcggatgcctggaatccataagccaaataagaacggcaacccgagataaaaaggacacggtgacccgggagaaacacccaaagaaaccttttcagaagtggatgaagaagagagcaatcaaaaaaggtaattatcttcggttccagcgtttattttataaggatagagggaaactggctaaaatcattttagatgatattgaatgcttgtcttgtgacataccactcagtgaaatttattcggtttttaaaacaagatgggaaacaactggtagctttaaaagccttggggactttaaaacttacgggaaggctgacaacactgccttcagagaattaattacggctaaagaaattgagaaaaatgtgcaggaaatgagcaaaggctcggctcccggtccagacgggattactcttggggacgtcgtaaagatggatcccgagttttcccggaccatggagattttcaatttatggttaacaactggtaaaatcccggacatggtgagggggtgcagaaccgttttgattccaaaatcatcaaagccggatcgtttgaaagacattaataactggagacctatcacgatcggttccatcttgctgagactgttctccaggattgtaacagctaggctgagcaaagcgtgccccctgaacccaaggcaaagaggctttatcagagcggcgggatgctctgaaaacttaaaactcctgcaaactataatttggtcggccaaaagagaacacagaccactgggtgttgtattcgtggacatcgccaaggcttttgacaccgtaagccaccagcacatcattcatgctttgcagcaaagagaggtggatccccacatcgtcggtctggtgagcaatatgtacgagaacatcagtacgtatatcaccacaaagaggaacacacacacagacaaaatccagatccgggttggagtaaagcagggtgacccgatgtcgccccttttatttaacctggcaatggaccctctattatgcaagctggaagagagtggcaaaggataccaccgaggacagagcagcatcacagcgatggcatttgcagacgatctggttttgctgagcgactcctgggaaaatatgaatacaaatattagcatactggagaccttctgcaatctgaccggactcaaaacacaggggcaaaagtgccacggcttttacatcaagccgacaaagaagtcttacaccatcaatgactgcgctgcctggactatcaacggcacacccctgaacatgatcgaccccggcgaatctgagaaatacctcggcctgcagtttgacccgtggattggaatagcaaggtccggtctctccacaaaactagatttttggcttcagcggatcgatcaagcaccacttaaacctctgcagaaaactgatattctcaaaacatacaccatccctcggctgatctacatagctgaccactcagaagtgaaaagcgcactactcgaaacccttgaccagaagatccggacagcggtcaaggaatggcttcacctacctccgtgcacctgcgatgccatcctgtactcgagcacgagagacggcggtttgggcatcaccaaattggcaggactgatccccagcgtgcaggcccgtagactgcatcggatcgcacagtcatctgacgatacgatgaaatgcttcatggaaaaagagaaaatggaacagctgcataagaaattgtggattcaagctggaggggacagagagaacataccctcgatttgggaagcaccaccgtcgagtgaaccaccaaacaacgtgagcacaaattcggaatgggaagcaccgacccagaaagataaatttccaaagccttgcaattggaggaaaaacgaattcaaaaaatggaccaaattggcatcccaaggccgcggaattgtaaattttgaaagagacaaaattagtaaccattggatccaatactacagacgcatacctcacaggaaactcctcactgcactacaactcagggccaacgtttaccccacgagagaatttctagccaggggtagacaagaccaatacatcaaggcgtgtaggcactgcgatgcggacaacgaatcctgcgcccacatcatcggcaactgcccagtgacacaggacgcccgaatcaagaggcacaattacatctgcgaactgcttctcgaggaggcgaagaagaaggactgggtagtgttcaaggaaccgcacataagggattccaacaaggaactgtacaaacctgacctgatatttgtgaaggatgggcgtgcacttgtcgtggatgtgacagtacggtatgaagcagccaaatcatcgctggaggaagccgctgcagagaaagtgagaaagtacaaacacctggaaacggaagtaagacatctcacgaatgcaaaggacgttacttttgtgggctttcccctaggagcgcgggggaaatggcaccaagataactttaaacttttgactgagcttggcctctccaaatcgaggcaagtgaaaatggcagagactttttccacagtagcgctcttttcatctgtggacattgtacatatgtttgccagtagggccagaaaatctatggttatgtgataataggctgccttctgcggggcttgccttctggccatgcccttcttctctcccttgcacctgtacctcttggtctttgaataaagcctgagtaggaaggaccggtaaaaaaaaaaaaaaaaaaaaaaaaaaaaaaacgttgactaaaaaaaaaaaaaaaaaaaaaaaaaaaaaaaaaaaaaaaaaaaaaaaaaaaaaaaaaaaaaaaaaaaaaa

SEQ ID NO: 11133 - DNA, 5264 bp, synthetic construct
  source 1..5264: mol_type = other DNA
gaaataagagagaaaagaagagtaagaagaaatataagagaattcgccaccatggcccctaagaaaaagcggaaggtgaatatcagcggctctagctgcggcagccccaacagcgccgacaccagcagcgacttcaaggacctgtggaccaagctgaaggaatgccacgaccgggaagtgcagggactccaggtgaaggtcaccaaactcaagcaagaaagaatcctggacgcccagagactggaagaattcttcaccaagaaccagcagctgagagagcagcagaaagtgctgcacgagacaatcaaggttctggaagatagactgcgggccggcctgtgcgacagatgcgccgtgaccgaggaacacatgcgcaaaaagcagcaggagttcgagaacattagacagcaaaatctgaaattgatcacagagctgatgaacgagagaaacacactgcaggaggagaacaagaagctgagcgagcagctgcaacagaagatcgagaatgatcagcaacaccaggccgctgagctggaatgtgaagaggacgtgatccccgacagcccaatcacagctttcagcttttctggcgtgaacagactgaggcggaaggaaaacccccacgtgcggtacatcgagcagacccataccaagctggaacacagcgtgtgtgccaacgagatgagaaaggtgtccaagtcctccacccatccccagcacaaccctaacgaaaatgagatcctggtggctgatacctacgaccagtctcagagccctatggccaaggcccacggcaccagctcttatacccctgataagagctccttcaacctggccaccgtggtggccgagacactgggcctgggcgtgcaggaggaaagcgagacacagggcccaatgagccctctgggagatgagctgtaccactgcctggaaggcaaccacaagaaacagccttttgagtccggctccgagactcctggaacaagcgagagcgctacacctgagggcagccctaagagaaaggtgtccagcgccgagggcgctgccaaggaagagcctaaacggagaagcgccagactgagcgccaagccccccgccaaggtggaagccaagcctaagaaggccgccgctaaggacaagagcagcgataagaaagtccagaccaagggcaagcggggcgccaaaggcaaacaggccgaggtggccaaccaggagacaaaggaagatctgcctgctgagaacggcgaaaccaagaccgaggaatctccagcttctgacgaggccggagagaaggaggccaaaagcgacagcggctctgagacacctggaacaagcgagagcgccaccccggaatcctatgaacaacttgcaccacaaccgtgtgtgggagaaactttacattctagcctcccacgagacagtgaactgtttgtgcctgaagaggggagcagcgagaaggagagcgaggacgcgccaaaaacatctcctccgacgcctgggaaacatggtttggaacagactggggaggaaaaagtgatggtgactgttcctgacaaaaatccaccttgtccttgctgtggtacccgggtaaactctgtgttgaatctgattgaacatctgaaagtgtcacacgggaaaaggggggtttgttttcggtgtgcaaaatgtggaaaggaaaatagtaactatcacagtgttgtttgtcattttaagaaatgcaggggtccagagacggagaaagccccagctggggagtggatttgtgaggtatgcaacagagattttacaaccaaaattggcctgggacaacacaagagattggcacacccagcagtgagaaatcaggaaaggatcgttgcttcccaaccgaaagaaacatcaaatagaggtgctcacaaaaggtgctggacaaaggaggaggaagaattactaataagactggaggctcagttcgagggaaacaaaaatattaataagcttattgcagaacacataaccaccaaaacagctaagcagatcagtgacaaaaggcgattgctgtccagaaagccagcagaggagccacgtgaggagcctggaacgtgtcatcacaccaggagagcagctgcgagcctgagaacggagcctgagatgagtcatcacgcccaggcagaggacagagataatggacctgggagacgccctctgccaggcagggcagctgccggagggagaacaatggacgagataagacgccaccctgataagggcaacggacagcagagacccaccaagcaaaaatcagaagaacagctgcaggcttactataaaaagacactagaggaacgactttcagctggggcacttaacaccttcccccgagcattcaagcaggtaatggaaggccgggatataaagctagtaatcaatcagacagcgcaggactgcttcggatgcctggaatccataagccaaataagaacggcaacccgagataaaaaggacacggtgacccgggagaaacacccaaagaaaccttttcagaagtggatgaagaagagagcaatcaaaaaaggtaattatcttcggttccagcgtttattttatcttgatagagggaaactggctaaaatcattttagatgatattgaatgcttgtcttgtgacataccactcagtgaaatttattcggtttttaaaacaagatgggaaacaactggtagctttaaaagccttggggactttaaaacttacgggaaggctgacaacactgccttcagagaattaattacggctaaagaaattgagaaaaatgtgcaggaaatgagcaaaggctcggctcccggtccagacgggattactcttggggacgtcgtaaagatggatcccgagttttcccggaccatggagattttcaatttatggttaacaactggtaaaatcccggacatggtgagggggtgcagaaccgttttgattccaaaatcatcaaagccggatcgtttgaaagacattaataactggagacctatcacgatcggttccatcttgctgagactgttctccaggattgtaacagctaggctgagcaaagcgtgccccctgaacccaaggcaaagaggctttatcagagcggcgggatgctctgaaaacttaaaactcctgcaaactataatttggtcggccaaaagagaacacagaccactgggtgttgtattcgtggacatcgccaaggcttttgacaccgtaagccaccagcacatcattcatgctttgcagcaaagagaggtggatccccacatcgtcggtctggtgagcaatatgtacgagaacatcagtacgtatatcaccacaaagaggaacacacacacagacaaaatccagatccgggttggagtaaagcagggtgacccgatgtcgccccttttatttaacctggcaatggaccctctattatgcaagctggaagagagtggcaaaggataccaccgaggacagagcagcatcacagcgatggcatttgcagacgatctggttttgctgagcgactcctgggaaaatatgaatacaaatattagcatactggagaccttctgcaatctgaccggactcaaaacacaggggcaaaagtgccacggcttttacatcaagccgacaaagaagtcttacaccatcaatgactgcgctgcctggactatcaacggcacacccctgaacatgatcgaccccggcgaatctgagaaatacctcggcctgcagtttgacccgtggattggaatagcaaggtccggtctctccacaaaactagatttttggcttcagcggatcgatcaagcaccacttaaacctctgcagaaaactgatattctcaaaacatacaccatccctcggctgatctacatagctgaccactcagaagtgaaaagcgcactactcgaaacccttgaccagaagatccggacagcggtcaaggaatggcttcacctacctccgtgcacctgcgatgccatcctgtactcgagcacgagagacggcggtttgggcatcaccaaattggcaggactgatccccagcgtgagagcccgtagactgcatcggatcgcacagtcatctgacgatacgatgaaatgcttcatggaaaaagagaaaatggaacagctgcataagaaattgtggattcaagctggaggggacagagagaacataccctcgatttgggaagcaccaccgtcgagtgaaccaccaaacaacgtgagcacaaattcggaatgggaagcaccgacccagaaagataaatttccaaagccttgcaattggaggaaaaacgaattcaaaaaatggaccaaattggcatcccaaggccgcggaattgtaaattttgaaagagacaaaattagtaaccattggatccaatactacagacgcatacctcacaggaaactcctcactgcactacaactcagggccaacgtttaccccacgagagaatttctagccaggggtagacaagaccaatacatcaaggcgtgtaggcactgcgatgcggacaacgaatcctgcgcccacatcatcggcaactgcccagtgacacaggacgcccgaatcaagaggcacaattacatctgcgaactgcttctcgaggaggcgaagaagaaggactgggtagtgttcaaggaaccgcacataagggattccaacaaggaactgtacaaacctgacctgatatttgtgaaggatgggcgtgcacttgtcgtggatgtgacagtacggtatgaagcagccaaatcatcgctggaggaagccgctgcagagaaagtgagaaagtacaaacacctggaaacggaagtaagacatctcacgaatgcaaaggacgttacttttgtgggctttcccctaggagcgcgggggaaatggcaccaagataactttaaacttttgactgagcttggcctctccaaatcgaggcaagtgaaaatggcagagactttttccacagtagcgctcttttcatctgtggacattgtacatatgtttgccagtagggccagaaaatctatggttatgtgataataggctgccttctgcggggcttgccttctggccatgcccttcttctctcccttgcacctgtacctcttggtctttgaataaagcctgagtaggaaggaccggtaaaaaaaaaaaaaaaaaaaaaaaaaaaaaaacgttgactaaaaaaaaaaaaaaaaaaaaaaaaaaaaaaaaaaaaaaaaaaaaaaaaaaaaaaaaaaaaaaaaaaaaaa

SEQ ID NO: 11134 - DNA, 5264 bp, synthetic construct
  source 1..5264: mol_type = other DNA
gaaataagagagaaaagaagagtaagaagaaatataagagaattcgccaccatggcccctaagaaaaagcggaaggtgaatatcagcggctctagctgcggcagccccaacagcgccgacaccagcagcgacttcaaggacctgtggaccaagctgaaggaatgccacgaccgggaagtgcagggactccaggtgaaggtcaccaaactcaagcaagaaagaatcctggacgcccagagactggaagaattcttcaccaagaaccagcagctgagagagcagcagaaagtgctgcacgagacaatcaaggttctggaagatagactgcgggccggcctgtgcgacagatgcgccgtgaccgaggaacacatgcgcaaaaagcagcaggagttcgagaacattagacagcaaaatctgaaattgatcacagagctgatgaacgagagaaacacactgcaggaggagaacaagaagctgagcgagcagctgcaacagaagatcgagaatgatcagcaacaccaggccgctgagctggaatgtgaagaggacgtgatccccgacagcccaatcacagctttcagcttttctggcgtgaacagactgaggcggaaggaaaacccccacgtgcggtacatcgagcagacccataccaagctggaacacagcgtgtgtgccaacgagatgagaaaggtgtccaagtcctccacccatccccagcacaaccctaacgaaaatgagatcctggtggctgatacctacgaccagtctcagagccctatggccaaggcccacggcaccagctcttatacccctgataagagctccttcaacctggccaccgtggtggccgagacactgggcctgggcgtgcaggaggaaagcgagacacagggcccaatgagccctctgggagatgagctgtaccactgcctggaaggcaaccacaagaaacagccttttgagtccggctccgagactcctggaacaagcgagagcgctacacctgagggcagccctaagagaaaggtgtccagcgccgagggcgctgccaaggaagagcctaaacggagaagcgccagactgagcgccaagccccccgccaaggtggaagccaagcctaagaaggccgccgctaaggacaagagcagcgataagaaagtccagaccaagggcaagcggggcgccaaaggcaaacaggccgaggtggccaaccaggagacaaaggaagatctgcctgctgagaacggcgaaaccaagaccgaggaatctccagcttctgacgaggccggagagaaggaggccaaaagcgacagcggctctgagacacctggaacaagcgagagcgccaccccggaatcctatgaacaacttgcaccacaaccgtgtgtgggagaaactttacattctagcctcccacgagacagtgaactgtttgtgcctgaagaggggagcagcgagaaggagagcgaggacgcgccaaaaacatctcctccgacgcctgggaaacatggtttggaacagactggggaggaaaaagtgatggtgactgttcctgacaaaaatccaccttgtccttgctgtggtacccgggtaaactctgtgttgaatctgattgaacatctgaaagtgtcacacgggaaaaggggggtttgttttcggtgtgcaaaatgtggaaaggaaaatagtaactatcacagtgttgtttgtcattttaagaaatgcaggggtccagagacggagaaagccccagctggggagtggatttgtgaggtatgcaacagagattttacaaccaaaattggcctgggacaacacaagagattggcacacccagcagtgagaaatcaggaaaggatcgttgcttcccaaccgaaagaaacatcaaatagaggtgctcacaaaaggtgctggacaaaggaggaggaagaattactaataagactggaggctcagttcgagggaaacaaaaatattaataagcttattgcagaacacataaccaccaaaacagctaagcagatcagtgacaaaaggcgattgctgtccagaaagccagcagaggagccacgtgaggagcctggaacgtgtcatcacaccaggagagcagctgcgagcctgagaacggagcctgagatgagtcatcacgcccaggcagaggacagagataatggacctgggagacgccctctgccaggcagggcagctgccggagggagaacaatggacgagataagacgccaccctgataagggcaacggacagcagagacccaccaagcaaaaatcagaagaacagctgcaggcttactataaaaagacactagaggaacgactttcagctggggcacttaacaccttcccccgagcattcaagcaggtaatggaaggccgggatataaagctagtaatcaatcagacagcgcaggactgcttcggatgcctggaatccataagccaaataagaacggcaacccgagataaaaaggacacggtgacccgggagaaacacccaaagaaaccttttcagaagtggatgaagaagagagcaatcaaaaaaggtaattatcttcggttccagcgtttattttatcttgatagagggaaactggctaaaatcattttagatgatattgaatgcttgtcttgtgacataccactcagtgaaatttattcggtttttaaaacaagatgggaaacaactggtagctttaaaagccttggggactttaaaacttacgggaaggctgacaacactgccttcagagaattaattacggctaaagaaattgagaaaaatgtgcaggaaatgagcaaaggctcggctcccggtccagacgggattactcttggggacgtcgtaaagatggatcccgagttttcccggaccatggagattttcaatttatggttaacaactggtaaaatcccggacatggtgagggggtgcagaaccgttttgattccaaaatcatcaaagccggatcgtttgaaagacattaataactggagacctatcacgatcggttccatcttgctgagactgttctccaggattgtaacagctaggctgagcaaagcgtgccccctgaacccaaggcaaagaggctttatcagagcggcgggatgctctgaaaacttaaaactcctgcaaactataatttggtcggccaaaagagaacacagaccactgggtgttgtattcgtggacatcgccaaggcttttgacaccgtaagccaccagcacatcattcatgctttgcagcaaagagaggtggatccccacatcgtcggtctggtgagcaatatgtacgagaacatcagtacgtatatcaccacaaagaggaacacacacacagacaaaatccagatccgggttggagtaaagcagggtgacccgatgtcgccccttttatttaacctggcaatggaccctctattatgcaagctggaagagagtggcaaaggataccaccgaggacagagcagcatcacagcgatggcatttgcagacgatctggttttgctgagcgactcctgggaaaatatgaatacaaatattagcatactggagaccttctgcaatctgaccggactcaaaacacaggggcaaaagtgccacggcttttacatcaagccgacaaagaagtcttacaccatcaatgactgcgctgcctggactatcaacggcacacccctgaacatgatcgaccccggcgaatctgagaaatacctcggcctgcagtttgacccgtggattggaatagcaaggtccggtctctccacaaaactagatttttggcttcagcggatcgatcaagcaccacttaaacctctgcagaaaactgatattctcaaaacatacaccatccctcggctgatctacatagctgaccactcagaagtgaaaagcgcactactcgaaacccttgaccagaagatccggacagcggtcaaggaatggcttcacctacctccgtgcacctgcgatgccatcctgtactcgagcacgagagacggcggtttgggcatcaccaaattggcaggactgatccccagcgtgcaggcccgtagactgcatcggatcgcacagtcatctgacgatacgatgaaatgcttcatggaaaaagagaaaatggaacagctgcataagaaattgtggattcaagctggaggggacagagagaacataccctcgatttgggaagcaccaccgtcgagtgaaccaccaaacaacgtgagcacaaattcggaatgggaagcaccgacccagaaagataaatttccaaagccttgcaattggaggaaaaacgaattcaaaaaatggaccaaattggcatcccaaggccgcggaattgtaaattttgaaagagacaaaattagtaaccattggatccaatactacagacgcatacctcacaggaaactcatcactgcactacaactcagggccaacgtttaccccacgagagaatttctagccaggggtagacaagaccaatacatcaaggcgtgtaggcactgcgatgcggacaacgaatcctgcgcccacatcatcggcaactgcccagtgacacaggacgcccgaatcaagaggcacaattacatctgcgaactgcttctcgaggaggcgaagaagaaggactgggtagtgttcaaggaaccgcacataagggattccaacaaggaactgtacaaacctgacctgatatttgtgaaggatgggcgtgcacttgtcgtggatgtgacagtacggtatgaagcagccaaatcatcgctggaggaagccgctgcagagaaagtgagaaagtacaaacacctggaaacggaagtaagacatctcacgaatgcaaaggacgttacttttgtgggctttcccctaggagcgcgggggaaatggcaccaagataactttaaacttttgactgagcttggcctctccaaatcgaggcaagtgaaaatggcagagactttttccacagtagcgctcttttcatctgtggacattgtacatatgtttgccagtagggccagaaaatctatggttatgtgataataggctgccttctgcggggcttgccttctggccatgcccttcttctctcccttgcacctgtacctcttggtctttgaataaagcctgagtaggaaggaccggtaaaaaaaaaaaaaaaaaaaaaaaaaaaaaaacgttgactaaaaaaaaaaaaaaaaaaaaaaaaaaaaaaaaaaaaaaaaaaaaaaaaaaaaaaaaaaaaaaaaaaaaaa

SEQ ID NO: 11135 - DNA, 5264 bp, synthetic construct
  source 1..5264: mol_type = other DNA
gaaataagagagaaaagaagagtaagaagaaatataagagaattcgccaccatggcccctaagaaaaagcggaaggtgaatatcagcggctctagctgcggcagccccaacagcgccgacaccagcagcgacttcaaggacctgtggaccaagctgaaggaatgccacgaccgggaagtgcagggactccaggtgaaggtcaccaaactcaagcaagaaagaatcctggacgcccagagactggaagaattcttcaccaagaaccagcagctgagagagcagcagaaagtgctgcacgagacaatcaaggttctggaagatagactgcgggccggcctgtgcgacagatgcgccgtgaccgaggaacacatgcgcaaaaagcagcaggagttcgagaacattagacagcaaaatctgaaattgatcacagagctgatgaacgagagaaacacactgcaggaggagaacaagaagctgagcgagcagctgcaacagaagatcgagaatgatcagcaacaccaggccgctgagctggaatgtgaagaggacgtgatccccgacagcccaatcacagctttcagcttttctggcgtgaacagactgaggcggaaggaaaacccccacgtgcggtacatcgagcagacccataccaagctggaacacagcgtgtgtgccaacgagatgagaaaggtgtccaagtcctccacccatccccagcacaaccctaacgaaaatgagatcctggtggctgatacctacgaccagtctcagagccctatggccaaggcccacggcaccagctcttatacccctgataagagctccttcaacctggccaccgtggtggccgagacactgggcctgggcgtgcaggaggaaagcgagacacagggcccaatgagccctctgggagatgagctgtaccactgcctggaaggcaaccacaagaaacagccttttgagtccggctccgagactcctggaacaagcgagagcgctacacctgagggcagccctaagagaaaggtgtccagcgccgagggcgctgccaaggaagagcctaaacggagaagcgccagactgagcgccaagccccccgccaaggtggaagccaagcctaagaaggccgccgctaaggacaagagcagcgataagaaagtccagaccaagggcaagcggggcgccaaaggcaaacaggccgaggtggccaaccaggagacaaaggaagatctgcctgctgagaacggcgaaaccaagaccgaggaatctccagcttctgacgaggccggagagaaggaggccaaaagcgacagcggctctgagacacctggaacaagcgagagcgccaccccggaatcctatgaacaacttgcaccacaaccgtgtgtgggagaaactttacattctagcctcccacgagacagtgaactgtttgtgcctgaagaggggagcagcgagaaggagagcgaggacgcgccaaaaacatctcctccgacgcctgggaaacatggtttggaacagactggggaggaaaaagtgatggtgactgttcctgacaaaaatccaccttgtccttgctgtggtacccgggtaaactctgtgttgaatctgattgaacatctgaaagtgtcacacgggaaaaggggggtttgttttcggtgtgcaaaatgtggaaaggaaaatagtaactatcacagtgttgtttgtcattttaagaaatgcaggggtccagagacggagaaagccccagctggggagtggatttgtgaggtatgcaacagagattttacaaccaaaattggcctgggacaacacaagagattggcacacccagcagtgagaaatcaggaaaggatcgttgcttcccaaccgaaagaaacatcaaatagaggtgctcacaaaaggtgctggacaaaggaggaggaagaattactaataagactggaggctcagttcgagggaaacaaaaatattaataagcttattgcagaacacataaccaccaaaacagctaagcagatcagtgacaaaaggcgattgctgtccagaaagccagcagaggagccacgtgaggagcctggaacgtgtcatcacaccaggagagcagctgcgagcctgagaacggagcctgagatgagtcatcacgcccaggcagaggacagagataatggacctgggagacgccctctgccaggcagggcagctgccggagggagaacaatggacgagataagacgccaccctgataagggcaacggacagcagagacccaccaagcaaaaatcagaagaacagctgcaggcttactataaaaagacactagaggaacgactttcagctggggcacttaacaccttcccccgagcattcaagcaggtaatggaaggccgggatataaagctagtaatcaatcagacagcgcaggactgcttcggatgcctggaatccataagccaaataagaacggcaacccgagataaaaaggacacggtgacccgggagaaacacccaaagaaaccttttcagaagtggatgaagaagagagcaatcaaaaaaggtaattatcttcggttccagcgtttattttatcttgatagagggaaactggctaaaatcattttagatgatattgaatgcttgtcttgtgacataccactcagtgaaatttattcggtttttaaaacaagatgggaaacaactggtagctttaaaagccttggggactttaaaacttacgggaaggctgacaacactgccttcagagaattaattacggctaaagaaattgagaaaaatgtgcaggaaatgagcaaaggctcggctcccggtccagacgggattactcttggggacgtcgtaaagatggatcccgagttttcccggaccatggagattttcaatttatggttaacaactggtaaaatcccggacatggtgagggggtgcagaaccgttttgattccaaaatcatcaaagccggatcgtttgaaagacattaataactggagacctatcacgatcggttccatcttgctgagactgttctccaggattgtaacagctaggctgagcaaagcgtgccccctgaacccaaggcaaagaggctttatcagagcggcgggatgctctgaaaacttaaaactcctgcaaactataatttggtcggccaaaagagaacacagaccactgggtgttgtattcgtggacatcgccaaggcttttgacaccgtaagccaccagcacatcattcatgctttgcagcaaagagaggtggatccccacatcgtcggtctggtgagcaatatgtacgagaacatcagtacgtatatcaccacaaagaggaacacacacacagacaaaatccagatccgggttggagtaaagcagggtgacccgatgtcgccccttttatttaacctggcaatggaccctctattatgcaagctggaagagagtggcaaaggataccaccgaggacagagcagcatcacagcgatggcatttgcagacgatctggttttgctgagcgactcctgggaaaatatgaatacaaatattagcatactggagaccttctgcaatctgaccggactcaaaacacaggggcaaaagtgccacggcttttacatcaagccgacaaagaagtcttacaccatcaatgactgcgctgcctggactatcaacggcacacccctgaacatgatcgaccccggcgaatctgagaaatacctcggcctgcagtttgacccgtggattggaatagcaaggtccggtctctccacaaaactagatttttggcttcagcggatcgatcaagcaccacttaaacctctgcagaaaactgatattctcaaaacatacaccatccctcggctgatctacatagctgaccactcagaagtgaaaagcgcactactcgaaacccttgaccagaagatccggacagcggtcaaggaatggcttcacctacctccgtgcacctgcgatgccatcctgtactcgagcacgagagacggcggtttgggcatcaccaaattggcaggactgatccccagcgtgcaggcccgtagactgcatcggatcgcacagtcatctgacgatacgatgaaatgcttcatggaaaaagagaaaatggaacagctgcataagaaattgtggattcaagctggaggggacagagagaacataccctcgatttgggaagcaccaccgtcgagtgaaccaccaaacaacgtgagcacaaattcggaatgggaagcaccgacccagaaagataaatttccaaagccttgcaattggaggaaaaacgaattcaaaaaatggaccaaattggcatcccaaggccgcggaattgtaaattttgaaagagacaaaattagtaaccattggatccaatactacagacgcatacctcacaggaaactcctcactgcactacaactcagggccaacgtttaccccacgagagaatttctagccaggggtagacaagaccaatacatcaaggcgtgtaggcactgcgatgcggacaacgaatcctgcgcccacatcatcggccagtgcccagtgacacaggacgcccgaatcaagaggcacaattacatctgcgaactgcttctcgaggaggcgaagaagaaggactgggtagtgttcaaggaaccgcacataagggattccaacaaggaactgtacaaacctgacctgatatttgtgaaggatgggcgtgcacttgtcgtggatgtgacagtacggtatgaagcagccaaatcatcgctggaggaagccgctgcagagaaagtgagaaagtacaaacacctggaaacggaagtaagacatctcacgaatgcaaaggacgttacttttgtgggctttcccctaggagcgcgggggaaatggcaccaagataactttaaacttttgactgagcttggcctctccaaatcgaggcaagtgaaaatggcagagactttttccacagtagcgctcttttcatctgtggacattgtacatatgtttgccagtagggccagaaaatctatggttatgtgataataggctgccttctgcggggcttgccttctggccatgcccttcttctctcccttgcacctgtacctcttggtctttgaataaagcctgagtaggaaggaccggtaaaaaaaaaaaaaaaaaaaaaaaaaaaaaaacgttgactaaaaaaaaaaaaaaaaaaaaaaaaaaaaaaaaaaaaaaaaaaaaaaaaaaaaaaaaaaaaaaaaaaaaaa

SEQ ID NO: 11136 - DNA, 5264 bp, synthetic construct
  source 1..5264: mol_type = other DNA
gaaataagagagaaaagaagagtaagaagaaatataagagaattcgccaccatggcccctaagaaaaagcggaaggtgaatatcagcggctctagctgcggcagccccaacagcgccgacaccagcagcgacttcaaggacctgtggaccaagctgaaggaatgccacgaccgggaagtgcagggactccaggtgaaggtcaccaaactcaagcaagaaagaatcctggacgcccagagactggaagaattcttcaccaagaaccagcagctgagagagcagcagaaagtgctgcacgagacaatcaaggttctggaagatagactgcgggccggcctgtgcgacagatgcgccgtgaccgaggaacacatgcgcaaaaagcagcaggagttcgagaacattagacagcaaaatctgaaattgatcacagagctgatgaacgagagaaacacactgcaggaggagaacaagaagctgagcgagcagctgcaacagaagatcgagaatgatcagcaacaccaggccgctgagctggaatgtgaagaggacgtgatccccgacagcccaatcacagctttcagcttttctggcgtgaacagactgaggcggaaggaaaacccccacgtgcggtacatcgagcagacccataccaagctggaacacagcgtgtgtgccaacgagatgagaaaggtgtccaagtcctccacccatccccagcacaaccctaacgaaaatgagatcctggtggctgatacctacgaccagtctcagagccctatggccaaggcccacggcaccagctcttatacccctgataagagctccttcaacctggccaccgtggtggccgagacactgggcctgggcgtgcaggaggaaagcgagacacagggcccaatgagccctctgggagatgagctgtaccactgcctggaaggcaaccacaagaaacagccttttgagtccggctccgagactcctggaacaagcgagagcgctacacctgagggcagccctaagagaaaggtgtccagcgccgagggcgctgccaaggaagagcctaaacggagaagcgccagactgagcgccaagccccccgccaaggtggaagccaagcctaagaaggccgccgctaaggacaagagcagcgataagaaagtccagaccaagggcaagcggggcgccaaaggcaaacaggccgaggtggccaaccaggagacaaaggaagatctgcctgctgagaacggcgaaaccaagaccgaggaatctccagcttctgacgaggccggagagaaggaggccaaaagcgacagcggctctgagacacctggaacaagcgagagcgccaccccggaatcctatgaacaacttgcaccacaaccgtgtgtgggagaaactttacattctagcctcccacgagacagtgaactgtttgtgcctgaagaggggagcagcgagaaggagagcgaggacgcgccaaaaacatctcctccgacgcctgggaaacatggtttggaacagactggggaggaaaaagtgatggtgactgttcctgacaaaaatccaccttgtccttgctgtggtacccgggtaaactctgtgttgaatctgattgaacatctgaaagtgtcacacgggaaaaggggggtttgttttcggtgtgcaaaatgtggaaaggaaaatagtaactatcacagtgttgtttgtcattttaagaaatgcaggggtccagagacggagaaagccccagctggggagtggatttgtgaggtatgcaacagagattttacaaccaaaattggcctgggacaacacaagagattggcacacccagcagtgagaaatcaggaaaggatcgttgcttcccaaccgaaagaaacatcaaatagaggtgctcacaaaaggtgctggacaaaggaggaggaagaattactaataagactggaggctcagttcgagggaaacaaaaatattaataagcttattgcagaacacataaccaccaaaacagctaagcagatcagtgacaaaaggcgattgctgtccagaaagccagcagaggagccacgtgaggagcctggaacgtgtcatcacaccaggagagcagctgcgagcctgagaacggagcctgagatgagtcatcacgcccaggcagaggacagagataatggacctgggagacgccctctgccaggcagggcagctgccggagggagaacaatggacgagataagacgccaccctgataagggcaacggacagcagagacccaccaagcaaaaatcagaagaacagctgcaggcttactataaaaagacactagaggaacgactttcagctggggcacttaacaccttcccccgagcattcaagcaggtaatggaaggccgggatataaagctagtaatcaatcagacagcgcaggactgcttcggatgcctggaatccataagccaaataagaacggcaacccgagataaaaaggacacggtgacccgggagaaacacccaaagaaaccttttcagaagtggatgaagaagagagcaatcaaaaaaggtaattatcttcggttccagcgtttattttatcttgatagagggaaactggctaaaatcattttagatgatattgaatgcttgtcttgtgacataccactcagtgaaatttattcggtttttaaaacaagatgggaaacaactggtagctttaaaagccttggggactttaaaacttacgggaaggctgacaacactgccttcagagaattaattacggctaaagaaattgagaaaaatgtgcaggaaatgagcaaaggctcggctcccggtccagacgggattactcttggggacgtcgtaaagatggatcccgagttttcccggaccatggagattttcaatttatggttaacaactggtaaaatcccggacatggtgagggggtgcagaaccgttttgattccaaaatcatcaaagccggatcgtttgaaagacattaataactggagacctatcacgatcggttccatcttgctgagactgttctccaggattgtaacagctaggctgagcaaagcgtgccccctgaacccaaggcaaagaggctttatcagagcggcgggatgctctgaaaacttaaaactcctgcaaactataatttggtcggccaaaagagaacacagaccactgggtgttgtattcgtggacatcgccaaggcttttgacaccgtaagccaccagcacatcattcatgctttgcagcaaagagaggtggatccccacatcgtcggtctggtgagcaatatgtacgagaacatcagtacgtatatcaccacaaagaggaacacacacacagacaaaatccagatccgggttggagtaaagcagggtgacccgatgtcgccccttttatttaacctggcaatggaccctctattatgcaagctggaagagagtggcaaaggataccaccgaggacagagcagcatcacagcgatggcatttgcagacgatctggttttgctgagcgactcctgggaaaatatgaatacaaatattagcatactggagaccttctgcaatctgaccggactcaaaacacaggggcaaaagtgccacggcttttacatcaagccgacaaagaagtcttacaccatcaatgactgcgctgcctggactatcaacggcacacccctgaacatgatcgaccccggcgaatctgagaaatacctcggcctgcagtttgacccgtggattggaatagcaaggtccggtctctccacaaaactagatttttggcttcagcggatcgatcaagcaccacttaaacctctgcagaaaactgatattctcaaaacatacaccatccctcggctgatctacatagctgaccactcagaagtgaaaagcgcactactcgaaacccttgaccagaagatccggacagcggtcaaggaatggcttcacctacctccgtgcacctgcgatgccatcctgtactcgagcacgagagacggcggtttgggcatcaccaaattggcaggactgatccccagcgtgcaggcccgtagactgcatcggatcgcacagtcatctgacgatacgatgaaatgcttcatggaaaaagagaaaatggaacagctgcataagaaattgtggattcaagctggaggggacagagagaacataccctcgatttgggaagcaccaccgtcgagtgaaccaccaaacaacgtgagcacaaattcggaatgggaagcaccgacccagaaagataaatttccaaagccttgcaattggaggaaaaacgaattcaaaaaatggaccaaattggcatcccaaggccgcggaattgtaaattttgaaagagacaaaattagtaaccattggatccaatactacagacgcatacctcacaggaaactcctcactgcactacaactcagggccaacgtttaccccacgagagaatttctagccaggggtagacaagaccaatacatcaaggcgtgtaggcactgcgatgcggacaacgaatcctgcgcccacatcatcggcaactgcccagtgacacaggacgcccgaatcaagaggcacaattacatctgcgaactgcttctcgaggaggcgaagaagaaggactgggtagtgttcaaggaaccgcacataagggattccaacaaggaactgtacaaacctgacctgatatttgtgaaggatgggcgtgcacttgtcgtggatgtgacagtacggtatgaagcagccaaatcatcgctggaggaagccgctgcagagaaagtgagaaagtacaaacacctggaaacggaagtaagacatctcacgaatgcaaaggacgttacttttgtgggctttcccctaggagcgcgggggaaatggcaccaagataacaacaaacttttgactgagcttggcctctccaaatcgaggcaagtgaaaatggcagagactttttccacagtagcgctcttttcatctgtggacattgtacatatgtttgccagtagggccagaaaatctatggttatgtgataataggctgccttctgcggggcttgccttctggccatgcccttcttctctcccttgcacctgtacctcttggtctttgaataaagcctgagtaggaaggaccggtaaaaaaaaaaaaaaaaaaaaaaaaaaaaaaacgttgactaaaaaaaaaaaaaaaaaaaaaaaaaaaaaaaaaaaaaaaaaaaaaaaaaaaaaaaaaaaaaaaaaaaaaa

SEQ ID NO: 11137 - DNA, 5264 bp, synthetic construct
  source 1..5264: mol_type = other DNA
gaaataagagagaaaagaagagtaagaagaaatataagagaattcgccaccatggcccctaagaaaaagcggaaggtgaatatcagcggctctagctgcggcagccccaacagcgccgacaccagcagcgacttcaaggacctgtggaccaagctgaaggaatgccacgaccgggaagtgcagggactccaggtgaaggtcaccaaactcaagcaagaaagaatcctggacgcccagagactggaagaattcttcaccaagaaccagcagctgagagagcagcagaaagtgctgcacgagacaatcaaggttctggaagatagactgcgggccggcctgtgcgacagatgcgccgtgaccgaggaacacatgcgcaaaaagcagcaggagttcgagaacattagacagcaaaatctgaaattgatcacagagctgatgaacgagagaaacacactgcaggaggagaacaagaagctgagcgagcagctgcaacagaagatcgagaatgatcagcaacaccaggccgctgagctggaatgtgaagaggacgtgatccccgacagcccaatcacagctttcagcttttctggcgtgaacagactgaggcggaaggacaacccccacgtgcggtacatcgagcagacccataccaagctggaacacagcgtgtgtgccaacgagatgagaaaggtgtccaagtcctccacccatccccagcacaaccctaacgaaaatgagatcctggtggctgatacctacgaccagtctcagagccctatggccaaggcccacggcaccagctcttatacccctgataagagctccttcaacctggccaccgtggtggccgagacactgggcctgggcgtgcaggaggaaagcgagacacagggcccaatgagccctctgggagatgagctgtaccactgcctggaaggcaaccacaagaaacagccttttgagtccggctccgagactcctggaacaagcgagagcgctacacctgagggcagccctaagagaaaggtgtccagcgccgagggcgctgccaaggaagagcctaaacggagaagcgccagactgagcgccaagccccccgccaaggtggaagccaagcctaagaaggccgccgctaaggacaagagcagcgataagaaagtccagaccaagggcaagcggggcgccaaaggcaaacaggccgaggtggccaaccaggagacaaaggaagatctgcctgctgagaacggcgaaaccaagaccgaggaatctccagcttctgacgaggccggagagaaggaggccaaaagcgacagcggctctgagacacctggaacaagcgagagcgccaccccggaatcctatgaacaacttgcaccacaaccgtgtgtgggagaaactttacattctagcctcccacgagacagtgaactgtttgtgcctgaagaggggagcagcgagaaggagagcgaggacgcgccaaaaacatctcctccgacgcctgggaaacatggtttggaacagactggggaggaaaaagtgatggtgactgttcctgacaaaaatccaccttgtccttgctgtggtacccgggtaaactctgtgttgaatctgattgaacatctgaaagtgtcacacgggaaaaggggggtttgttttcggtgtgcaaaatgtggaaaggaaaatagtaactatcacagtgttgtttgtcattttaagaaatgcaggggtccagagacggagaaagccccagctggggagtggatttgtgaggtatgcaacagagattttacaaccaaaattggcctgggacaacacaagagattggcacacccagcagtgagaaatcaggaaaggatcgttgcttcccaaccgaaagaaacatcaaatagaggtgctcacaaaaggtgctggacaaaggaggaggaagaattactaataagactggaggctcagttcgagggaaacaaaaatattaataagcttattgcagaacacataaccaccaaaacagctaagcagatcagtgacaaaaggcgattgctgtccagaaagccagcagaggagccacgtgaggagcctggaacgtgtcatcacaccaggagagcagctgcgagcctgagaacggagcctgagatgagtcatcacgcccaggcagaggacagagataatggacctgggagacgccctctgccaggcagggcagctgccggagggagaacaatggacgagataagacgccaccctgataagggcaacggacagcagagacccaccaagcaaaaatcagaagaacagctgcaggcttactataaaaagacactagaggaacgactttcagctggggcacttaacaccttcccccgagcattcaagcaggtaatggaaggccgggatataaagctagtaatcaatcagacagcgcaggactgcttcggatgcctggaatccataagccaaataagaacggcaacccgagataaaaaggacacggtgacccgggagaaacacccaaagaaaccttttcagaagtggatgaagaagagagcaatcaaaaaaggtaattatcttcggttccagcgtttattttatcttgatagagggaaactggctaaaatcattttagatgatattgaatgcttgtcttgtgacataccactcagtgaaatttattcggtttttaaaacaagatgggaaacaactggtagctttaaaagccttggggactttaaaacttacgggaaggctgacaacactgccttcagagaattaattacggctaaagaaattgagaaaaatgtgcaggaaatgagcaaaggctcggctcccggtccagacgggattactcttggggacgtcgtaaagatggatcccgagttttcccggaccatggagattttcaatttatggttaacaactggtaaaatcccggacatggtgagggggtgcagaaccgttttgattccaaaatcatcaaagccggatcgtttgaaagacattaataactggagacctatcacgatcggttccatcttgctgagactgttctccaggattgtaacagctaggctgagcaaagcgtgccccctgaacccaaggcaaagaggctttatcagagcggcgggatgctctgaaaacttaaaactcctgcaaactataatttggtcggccaaaagagaacacagaccactgggtgttgtattcgtggacatcgccaaggcttttgacaccgtaagccaccagcacatcattcatgctttgcagcaaagagaggtggatccccacatcgtcggtctggtgagcaatatgtacgagaacatcagtacgtatatcaccacaaagaggaacacacacacagacaaaatccagatccgggttggagtaaagcagggtgacccgatgtcgccccttttatttaacctggcaatggaccctctattatgcaagctggaagagagtggcaaaggataccaccgaggacagagcagcatcacagcgatggcatttgcagacgatctggttttgctgagcgactcctgggaaaatatgaatacaaatattagcatactggagaccttctgcaatctgaccggactcaaaacacaggggcaaaagtgccacggcttttacatcaagccgacaaaggactcttacaccatcaatgactgcgctgcctggactatcaacggcacacccctgaacatgatcgaccccggcgaatctgagaaatacctcggcctgcagtttgacccgtggattggaatagcaaggtccggtctctccacaaaactagatttttggcttcagcggatcgatcaagcaccacttaaacctctgcagaaaactgatattctcaaaacatacaccatccctcggctgatctacatagctgaccactcagaagtgaaaagcgcactactcgaaacccttgaccagaagatccggacagcggtcaaggaatggcttcacctacctccgtgcacctgcgatgccatcctgtactcgagcacgagagacggcggtttgggcatcaccaaattggcaggactgatccccagcgtgcaggcccgtagactgcatcggatcgcacagtcatctgacgatacgatgaaatgcttcatggaaaaagagaaaatggaacagctgcataagaaattgtggattcaagctggaggggacagagagaacataccctcgatttgggaagcaccaccgtcgagtgaaccaccaaacaacgtgagcacaaattcggaatgggaagcaccgacccagaaagataaatttccaaagccttgcaattggaggaaaaacgaattcaaaaaatggaccaaattggcatcccaaggccgcggaattgtaaattttgaaagagacaaaattagtaaccattggatccaatactacagacgcatacctcacaggaaactcctcactgcactacaactcagggccaacgtttaccccacgagagaatttctagccaggggtagacaagaccaatacatcaaggcgtgtaggcactgcgatgcggacaacgaatcctgcgcccacatcatcggcaactgcccagtgacacaggacgcccgaatcaagaggcacaattacatctgcgaactgcttctcgaggaggcgaagaagaaggactgggtagtgttcaaggaaccgcacataagggattccaacaaggaactgtacaaacctgacctgatatttgtgaaggatgggcgtgcacttgtcgtggatgtgacagtacggtatgaagcagccaaatcatcgctggaggaagccgctgcagagaaagtgagaaagtacaaacacctggaaacggaagtaagacatctcacgaatgcaaaggacgttacttttgtgggctttcccctaggagcgcgggggaaatggcaccaagataactttaaacttttgactgagcttggcctctccaaatcgaggcaagtgaaaatggcagagactttttccacagtagcgctcttttcatctgtggacattgtacatatgtttgccagtagggccagaaaatctatggttatgtgataataggctgccttctgcggggcttgccttctggccatgcccttcttctctcccttgcacctgtacctcttggtctttgaataaagcctgagtaggaaggaccggtaaaaaaaaaaaaaaaaaaaaaaaaaaaaaaacgttgactaaaaaaaaaaaaaaaaaaaaaaaaaaaaaaaaaaaaaaaaaaaaaaaaaaaaaaaaaaaaaaaaaaaaaa

SEQ ID NO: 11138 - DNA, 5264 bp, synthetic construct
  source 1..5264: mol_type = other DNA
gaaataagagagaaaagaagagtaagaagaaatataagagaattcgccaccatggcccctaagaaaaagcggaaggtgaatatcagcggctctagctgcggcagccccaacagcgccgacaccagcagcgacttcaaggacctgtggaccaagctgaaggaatgccacgaccgggaagtgcagggactccaggtgaaggtcaccaaactcaagcaagaaagaatcctggacgcccagagactggaagaattcttcaccaagaaccagcagctgagagagcagcagaaagtgctgcacgagacaatcaaggttctggaagatagactgcgggccggcctgtgcgacagatgcgccgtgaccgaggaacacatgcgcaaaaagcagcaggagttcgagaacattagacagcaaaatctgaaattgatcacagagctgatgaacgagagaaacacactgcaggaggagaacaagaagctgagcgagcagctgcaacagaagatcgagaatgatcagcaacaccaggccgctgagctggaatgtgaagaggacgtgatccccgacagcccaatcacagctttcagcttttctggcgtgaacagactgaggcggaaggccaacccccacgtgcggtacatcgagcagacccataccaagctggaacacagcgtgtgtgccaacgagatgagaaaggtgtccaagtcctccacccatccccagcacaaccctaacgaaaatgagatcctggtggctgatacctacgaccagtctcagagccctatggccaaggcccacggcaccagctcttatacccctgataagagctccttcaacctggccaccgtggtggccgagacactgggcctgggcgtgcaggaggaaagcgagacacagggcccaatgagccctctgggagatgagctgtaccactgcctggaaggcaaccacaagaaacagccttttgagtccggctccgagactcctggaacaagcgagagcgctacacctgagggcagccctaagagaaaggtgtccagcgccgagggcgctgccaaggaagagcctaaacggagaagcgccagactgagcgccaagccccccgccaaggtggaagccaagcctaagaaggccgccgctaaggacaagagcagcgataagaaagtccagaccaagggcaagcggggcgccaaaggcaaacaggccgaggtggccaaccaggagacaaaggaagatctgcctgctgagaacggcgaaaccaagaccgaggaatctccagcttctgacgaggccggagagaaggaggccaaaagcgacagcggctctgagacacctggaacaagcgagagcgccaccccggaatcctatgaacaacttgcaccacaaccgtgtgtgggagaaactttacattctagcctcccacgagacagtgaactgtttgtgcctgaagaggggagcagcgagaaggagagcgaggacgcgccaaaaacatctcctccgacgcctgggaaacatggtttggaacagactggggaggaaaaagtgatggtgactgttcctgacaaaaatccaccttgtccttgctgtggtacccgggtaaactctgtgttgaatctgattgaacatctgaaagtgtcacacgggaaaaggggggtttgttttcggtgtgcaaaatgtggaaaggacaatagtaactatcacagtgttgtttgtcattttaagaaatgcaggggtccagagacggagaaagccccagctggggagtggatttgtgaggtatgcaacagagattttacaaccaaaattggcctgggacaacacaagagattggcacacccagcagtgagaaatcaggaaaggatcgttgcttcccaaccgaaagaaacatcaaatagaggtgctcacaaaaggtgctggacaaaggaggaggaagaattactaataagactggaggctcagttcgagggaaacaaaaatattaataagcttattgcagaacacataaccaccaaaacagctaagcagatcagtgacaaaaggcgattgctgtccagaaagccagcagaggagccacgtgaggagcctggaacgtgtcatcacaccaggagagcagctgcgagcctgagaacggagcctgagatgagtcatcacgcccaggcagaggacagagataatggacctgggagacgccctctgccaggcagggcagctgccggagggagaacaatggacgagataagacgccaccctgataagggcaacggacagcagagacccaccaagcaaaaatcagaagaacagctgcaggcttactataaaaagacactagaggaacgactttcagctggggcacttaacaccttcccccgagcattcaagcaggtaatggaaggccgggatataaagctagtaatcaatcagacagcgcaggactgcttcggatgcctggaatccataagccaaataagaacggcaacccgagataaaaaggacacggtgacccgggagaaacacccaaagaaaccttttcagaagtggatgaagaagagagcaatcaaaaaaggtaattatcttcggttccagcgtttattttatcttgatagagggaaactggctaaaatcattttagatgatattgaatgcttgtcttgtgacataccactcagtgaaatttattcggtttttaaaacaagatgggaaacaactggtagctttaaaagccttggggactttaaaacttacgggaaggctgacaacactgccttcagagaattaattacggctaaagaaattgagaaaaatgtgcaggaaatgagcaaaggctcggctcccggtccagacgggattactcttggggacgtcgtaaagatggatcccgagttttcccggaccatggagattttcaatttatggttaacaactggtaaaatcccggacatggtgagggggtgcagaaccgttttgattccaaaatcatcaaagccggatcgtttgaaagacattaataactggagacctatcacgatcggttccatcttgctgagactgttctccaggattgtaacagctaggctgagcaaagcgtgccccctgaacccaaggcaaagaggctttatcagagcggcgggatgctctgaaaacttaaaactcctgcaaactataatttggtcggccaaaagagaacacagaccactgggtgttgtattcgtggacatcgccaaggcttttgacaccgtaagccaccagcacatcattcatgctttgcagcaaagagaggtggatccccacatcgtcggtctggtgagcaatatgtacgagaacatcagtacgtatatcaccacaaagaggaacacacacacagacaaaatccagatccgggttggagtaaagcagggtgacccgatgtcgccccttttatttaacctggcaatggaccctctattatgcaagctggaagagagtggcaaaggataccaccgaggacagagcagcatcacagcgatggcatttgcagacgatctggttttgctgagcgactcctgggaaaatatgaatacaaatattagcatactggagaccttctgcaatctgaccggactcaaaacacaggggcaaaagtgccacggcttttacatcaagccgacaaaggactcttacaccatcaatgactgcgctgcctggactatcaacggcacacccctgaacatgatcgaccccggcgaatctgagaaatacctcggcctgcagtttgacccgtggattggaatagcaaggtccggtctctccacaaaactagatttttggcttcagcggatcgatcaagcaccacttaaacctctgcagaaaactgatattctcaaaacatacaccatccctcggctgatctacatagctgaccactcagaagtgaaaagcgcactactcgaaacccttgaccagaagatccggacagcggtcaaggaatggcttcacctacctccgtgcacctgcgatgccatcctgtactcgagcacgagagacggcggtttgggcatcaccaaattggcaggactgatccccagcgtgcaggcccgtagactgcatcggatcgcacagtcatctgacgatacgatgaaatgcttcatggaaaaagagaaaatggaacagctgcataagaaattgtggattcaagctggaggggacagagagaacataccctcgatttgggaagcaccaccgtcgagtgaaccaccaaacaacgtgagcacaaattcggaatgggaagcaccgacccagaaagataaatttccaaagccttgcaattggaggaaaaacgaattcaaaaaatggaccaaattggcatcccaaggccgcggaattgtaaattttgaaagagacaaaattagtaaccattggatccaatactacagacgcatacctcacaggaaactcctcactgcactacaactcagggccaacgtttaccccacgagagaatttctagccaggggtagacaagaccaatacatcaaggcgtgtaggcactgcgatgcggacaacgaatcctgcgcccacatcatcggcaactgcccagtgacacaggacgcccgaatcaagaggcacaattacatctgcgaactgcttctcgaggaggcgaagaagaaggactgggtagtgttcaaggaaccgcacataagggattccaacaaggaactgtacaaacctgacctgatatttgtgaaggatgggcgtgcacttgtcgtggatgtgacagtacggtatgaagcagccaaatcatcgctggaggaagccgctgcagagaaagtgagaaagtacaaacacctggaaacggaagtaagacatctcacgaatgcaaaggacgttacttttgtgggctttcccctaggagcgcgggggaaatggcaccaagataactttaaacttttgactgagcttggcctctccaaatcgaggcaagtgaaaatggcagagactttttccacagtagcgctcttttcatctgtggacattgtacatatgtttgccagtagggccagaaaatctatggttatgtgataataggctgccttctgcggggcttgccttctggccatgcccttcttctctcccttgcacctgtacctcttggtctttgaataaagcctgagtaggaaggaccggtaaaaaaaaaaaaaaaaaaaaaaaaaaaaaaacgttgactaaaaaaaaaaaaaaaaaaaaaaaaaaaaaaaaaaaaaaaaaaaaaaaaaaaaaaaaaaaaaaaaaaaaaa

SEQ ID NO: 11139 - DNA, 5264 bp, synthetic construct
  source 1..5264: mol_type = other DNA
gaaataagagagaaaagaagagtaagaagaaatataagagaattcgccaccatggcccctaagaaaaagcggaaggtgaatatcagcggctctagctgcggcagccccaacagcgccgacaccagcagcgacttcaaggacctgtggaccaagctgaaggaatgccacgaccgggaagtgcagggactccaggtgaaggtcaccaaactcaagcaagaaagaatcctggacgcccagagactggaagaattcttcaccaagaaccagcagctgagagagcagcagaaagtgctgcacgagacaatcaaggttctggaagatagactgcgggccggcctgtgcgacagatgcgccgtgaccgaggaacacatgcgcaaaaagcagcaggagttcgagaacattagacagcaaaatctgaaattgatcacagagctgatgaacgagagaaacacactgcaggaggagaacaagaagctgagcgagcagctgcaacagaagatcgagaatgatcagcaacaccaggccgctgagctggaatgtgaagaggacgtgatccccgacagcccaatcacagctttcagcttttctggcgtgaacagactgaggcggaaggaaaacccccacgtgcggtacatcgagcagacccataccaagctggaacacagcgtgtgtgccaacgagatgagaaaggtgtccaagtcctccacccatccccagcacaaccctaacgaaaatgagatcctggtggctgatacctacgaccagtctcagagccctatggccaaggcccacggcaccagctcttatacccctgataagagctccttcaacctggccaccgtggtggccgagacactgggcctgggcgtgcaggaggaaagcgagacacagggcccaatgagccctctgggagatgagctgtaccactgcctggaaggcaaccacaagaaacagccttttgagtccggctccgagactcctggaacaagcgagagcgctacacctgagggcagccctaagagaaaggtgtccagcgccgagggcgctgccaaggaagagcctaaacggagaagcgccagactgagcgccaagccccccgccaaggtggaagccaagcctaagaaggccgccgctaaggacaagagcagcgataagaaagtccagaccaagggcaagcggggcgccaaaggcaaacaggccgaggtggccaaccaggagacaaaggaagatctgcctgctgagaacggcgaaaccaagaccgaggaatctccagcttctgacgaggccggagagaaggaggccaaaagcgacagcggctctgagacacctggaacaagcgagagcgccaccccggaatcctatgaacaacttgcaccacaaccgtgtgtgggagaaactttacattctagcctcccacgagacagtgaactgtttgtgcctgaagaggggagcagcgagaaggagagcgaggacgcgccaaaaacatctcctccgacgcctgggaaacatggtttggaacagactggggaggaaaaagtgatggtgactgttcctgacaaaaatccaccttgtccttgctgtggtacccgggtaaactctgtgttgaatctgattgaacatctgaaagtgtcacacgggaaaaggggggtttgttttcggtgtgcaaaatgtggaaaggaaaatagtaactatcacagtgttgtttgtcattttaagaaatgcaggggtccagagacggagaaagccccagctggggagtggatttgtgaggtatgcaacagagattttacaaccaaaattggcctgggacaacacaagagattggcacacccagcagtgagaaatcaggaaaggatcgttgcttcccaaccgaaagaaacatcaaatagaggtgctcacaaaaggtgctggacaaaggaggaggaagaattactaataagactggaggctcagttcgagggaaacaaaaatattaataagcttattgcagaacacataaccaccaaaacagctaagcagatcagtgacaaaaggcgattgctgtccagaaagccagcagaggagccacgtgaggagcctggaacgtgtcatcacaccaggagagcagctgcgagcctgagaacggagcctgagatgagtcatcacgcccaggcagaggacagagataatggacctgggaaacgccctctgccaggcagggcagctgccggagggagaacaatggacgagataagacgccaccctgataagggcaacggacagcagagacccaccaagcaaaaatcagaagaacagctgcaggcttactataaaaagacactagaggaacgactttcagctggggcacttaacaccttcccccgagcattcaagcaggtaatggaaggccgggatataaagctagtaatcaatcagacagcgcaggactgcttcggatgcctggaatccataagccaaataagaacggcaacccgagataaaaaggacacggtgacccgggagaaacacccaaagaaaccttttcagaagtggatgaagaagagagcaatcaaaaaaggtaattatcttcggttccagcgtttattttatcttgatagagggaaactggctaaaatcattttagatgatattgaatgcttgtcttgtgacataccactcagtgaaatttattcggtttttaaaacaagatgggaaacaactggtagctttaaaagccttggggactttaaaacttacgggaaggctgacaacactgccttcagagaattaattacggctaaagaaattgagaaaaatgtgcaggaaatgagcaaaggctcggctcccggtccagacgggattactcttggggacgtcgtaaagatggatcccgagttttcccggaccatggagattttcaatttatggttaacaactggtaaaatcccggacatggtgagggggtgcagaaccgttttgattccaaaatcatcaaagccggatcgtttgaaagacattaataactggagacctatcacgatcggttccatcttgctgagactgttctccaggattgtaacagctaggctgagcaaagcgtgccccctgaacccaaggcaaagaggctttatcagagcggcgggatgctctgaaaacttaaaactcctgcaaactataatttggtcggccaaaagagaacacagaccactgggtgttgtattcgtggacatcgccaaggcttttgacaccgtaagccaccagcacatcattcatgctttgcagcaaagagaggtggatccccacatcgtcggtctggtgagcaatatgtacgagaacatcagtacgtatatcaccacaaagaggaacacacacacagacaaaatccagatccgggttggagtaaagcagggtgacccgatgtcgccccttttatttaacctggcaatggaccctctattatgcaagctggaagagagtggcaaaggataccaccgaggacagagcagcatcacagcgatggcatttgcagacgatctggttttgctgagcgactcctgggaaaatatgaatacaaatattagcatactggagaccttctgcaatctgaccggactcaaaacacaggggcaaaagtgccacggcttttacatcaagccgacaaaggactcttacaccatcaatgactgcgctgcctggactatcaacggcacacccctgaacatgatcgaccccggcgaatctgagaaatacctcggcctgcagtttgacccgtggattggaatagcaaggtccggtctctccacaaaactagatttttggcttcagcggatcgatcaagcaccacttaaacctctgcagaaaactgatattctcaaaacatacaccatccctcggctgatctacatagctgaccactcagaagtgaaaagcgcactactcgaaacccttgaccagaagatccggacagcggtcaaggaatggcttcacctacctccgtgcacctgcgatgccatcctgtactcgagcacgagagacggcggtttgggcatcaccaaattggcaggactgatccccagcgtgcaggcccgtagactgcatcggatcgcacagtcatctgacgatacgatgaaatgcttcatggaaaaagagaaaatggaacagctgcataagaaattgtggattcaagctggaggggacagagagaacataccctcgatttgggaagcaccaccgtcgagtgaaccaccaaacaacgtgagcacaaattcggaatgggaagcaccgacccagaaagataaatttccaaagccttgcaattggaggaaaaacgaattcaaaaaatggaccaaattggcatcccaaggccgcggaattgtaaattttgaaagagacaaaattagtaaccattggatccaatactacagacgcatacctcacaggaaactcctcactgcactacaactcagggccaacgtttaccccacgagagaatttctagccaggggtagacaagaccaatacatcaaggcgtgtaggcactgcgatgcggacaacgaatcctgcgcccacatcatcggcaactgcccagtgacacaggacgcccgaatcaagaggcacaattacatctgcgaactgcttctcgaggaggcgaagaagaaggactgggtagtgttcaaggaaccgcacataagggattccaacaaggaactgtacaaacctgacctgatatttgtgaaggatgggcgtgcacttgtcgtggatgtgacagtacggtatgaagcagccaaatcatcgctggaggaagccgctgcagagaaagtgagaaagtacaaacacctggaaacggaagtaagacatctcacgaatgcaaaggacgttacttttgtgggctttcccctaggagcgcgggggaaatggcaccaagataactttaaacttttgactgagcttggcctctccaaatcgaggcaagtgaaaatggcagagactttttccacagtagcgctcttttcatctgtggacattgtacatatgtttgccagtagggccagaaaatctatggttatgtgataataggctgccttctgcggggcttgccttctggccatgcccttcttctctcccttgcacctgtacctcttggtctttgaataaagcctgagtaggaaggaccggtaaaaaaaaaaaaaaaaaaaaaaaaaaaaaaacgttgactaaaaaaaaaaaaaaaaaaaaaaaaaaaaaaaaaaaaaaaaaaaaaaaaaaaaaaaaaaaaaaaaaaaaaa

SEQ ID NO: 11140 - DNA, 5264 bp, synthetic construct
  source 1..5264: mol_type = other DNA
gaaataagagagaaaagaagagtaagaagaaatataagagaattcgccaccatggcccctaagaaaaagcggaaggtgaatatcagcggctctagctgcggcagccccaacagcgccgacaccagcagcgacttcaaggacctgtggaccaagctgaaggaatgccacgaccgggaagtgcagggactccaggtgaaggtcaccaaactcaagcaagaaagaatcctggacgcccagagactggaagaattcttcaccaagaaccagcagctgagagagcagcagaaagtgctgcacgagacaatcaaggttctggaagatagactgcgggccggcctgtgcgacagatgcgccgtgaccgaggaacacatgcgcaaaaagcagcaggagttcgagaacattagacagcaaaatctgaaattgatcacagagctgatgaacgagagaaacacactgcaggaggagaacaagaagctgagcgagcagctgcaacagaagatcgagaatgatcagcaacaccaggccgctgagctggaatgtgaagaggacgtgatccccgacagcccaatcacagctttcagcttttctggcgtgaacagactgaggcggaaggaaaacccccacgtgcggtacatcgagcagacccataccaagctggaacacagcgtgtgtgccaacgagatgagaaaggtgtccaagtcctccacccatccccagcacaaccctaacgaaaatgagatcctggtggctgatacctacgaccagtctcagagccctatggccaaggcccacggcaccagctcttatacccctgataagagctccttcaacctggccaccgtggtggccgagacactgggcctgggcgtgcaggaggaaagcgagacacagggcccaatgagccctctgggagatgagctgtaccactgcctggaaggcaaccacaagaaacagccttttgagtccggctccgagactcctggaacaagcgagagcgctacacctgagggcagccctaagagaaaggtgtccagcgccgagggcgctgccaaggaagagcctaaacggagaagcgccagactgagcgccaagccccccgccaaggtggaagccaagcctaagaaggccgccgctaaggacaagagcagcgataagaaagtccagaccaagggcaagcggggcgccaaaggcaaacaggccgaggtggccaaccaggagacaaaggaagatctgcctgctgagaacggcgaaaccaagaccgaggaatctccagcttctgacgaggccggagagaaggaggccaaaagcgacagcggctctgagacacctggaacaagcgagagcgccaccccggaatcctatgaacaacttgcaccacaaccgtgtgtgggagaaactttacattctagcctcccacgagacagtgaactgtttgtgcctgaagaggggagcagcgagaaggagagcgaggacgcgccaaaaacatctcctccgacgcctgggaaacatggtttggaacagactggggaggaaaaagtgatggtgactgttcctgacaaaaatccaccttgtccttgctgtggtacccgggtaaactctgtgttgaatctgattgaacatctgaaagtgtcacacgggaaaaggggggtttgttttcggtgtgcaaaatgtggaaaggaaaatagtaactatcacagtgttgtttgtcattttaagaaatgcaggggtccagagacggagaaagccccagctggggagtggatttgtgaggtatgcaacagagattttacaaccaaaattggcctgggacaacacaagagattggcacacccagcagtgagaaatcaggaaaggatcgttgcttcccaaccgaaagaaacatcaaatagaggtgctcacaaaaggtgctggacaaaggaggaggaagaattactaataagactggaggctcagttcgagggaaacaaaaatattaataagcttattgcagaacacataaccaccaaaacagctaagcagatcagtgacaaaaggcgattgctgtccagaaagccagcagaggagccacgtgaggagcctggaacgtgtcatcacaccaggagagcagctgcgagcctgagaacggagcctgagatgagtcatcacgcccaggcagaggacagagataatggacctgggagacgccctgccccaggcagggcagctgccggagggagaacaatggacgagataagacgccaccctgataagggcaacggacagcagagacccaccaagcaaaaatcagaagaacagctgcaggcttactataaaaagacactagaggaacgactttcagctggggcacttaacaccttcccccgagcattcaagcaggtaatggaaggccgggatataaagctagtaatcaatcagacagcgcaggactgcttcggatgcctggaatccataagccaaataagaacggcaacccgagataaaaaggacacggtgacccgggagaaacacccaaagaaaccttttcagaagtggatgaagaagagagcaatcaaaaaaggtaattatcttcggttccagcgtttattttatcttgatagagggaaactggctaaaatcattttagatgatattgaatgcttgtcttgtgacataccactcagtgaaatttattcggtttttaaaacaagatgggaaacaactggtagctttaaaagccttggggactttaaaacttacgggaaggctgacaacactgccttcagagaattaattacggctaaagaaattgagaaaaatgtgcaggaaatgagcaaaggctcggctcccggtccagacgggattactcttggggacgtcgtaaagatggatcccgagttttcccggaccatggagattttcaatttatggttaacaactggtaaaatcccggacatggtgagggggtgcagaaccgttttgattccaaaatcatcaaagccggatcgtttgaaagacattaataactggagacctatcacgatcggttccatcttgctgagactgttctccaggattgtaacagctaggctgagcaaagcgtgccccctgaacccaaggcaaagaggctttatcagagcggcgggatgctctgaaaacttaaaactcctgcaaactataatttggtcggccaaaagagaacacagaccactgggtgttgtattcgtggacatcgccaaggcttttgacaccgtaagccaccagcacatcattcatgctttgcagcaaagagaggtggatccccacatcgtcggtctggtgagcaatatgtacgagaacatcagtacgtatatcaccacaaagaggaacacacacacagacaaaatccagatccgggttggagtaaagcagggtgacccgatgtcgccccttttatttaacctggcaatggaccctctattatgcaagctggaagagagtggcaaaggataccaccgaggacagagcagcatcacagcgatggcatttgcagacgatctggttttgctgagcgactcctgggaaaatatgaatacaaatattagcatactggagaccttctgcaatctgaccggactcaaaacacaggggcaaaagtgccacggcttttacatcaagccgacaaaggactcttacaccatcaatgactgcgctgcctggactatcaacggcacacccctgaacatgatcgaccccggcgaatctgagaaatacctcggcctgcagtttgacccgtggattggaatagcaaggtccggtctctccacaaaactagatttttggcttcagcggatcgatcaagcaccacttaaacctctgcagaaaactgatattctcaaaacatacaccatccctcggctgatctacatagctgaccactcagaagtgaaaagcgcactactcgaaacccttgaccagaagatccggacagcggtcaaggaatggcttcacctacctccgtgcacctgcgatgccatcctgtactcgagcacgagagacggcggtttgggcatcaccaaattggcaggactgatccccagcgtgcaggcccgtagactgcatcggatcgcacagtcatctgacgatacgatgaaatgcttcatggaaaaagagaaaatggaacagctgcataagaaattgtggattcaagctggaggggacagagagaacataccctcgatttgggaagcaccaccgtcgagtgaaccaccaaacaacgtgagcacaaattcggaatgggaagcaccgacccagaaagataaatttccaaagccttgcaattggaggaaaaacgaattcaaaaaatggaccaaattggcatcccaaggccgcggaattgtaaattttgaaagagacaaaattagtaaccattggatccaatactacagacgcatacctcacaggaaactcctcactgcactacaactcagggccaacgtttaccccacgagagaatttctagccaggggtagacaagaccaatacatcaaggcgtgtaggcactgcgatgcggacaacgaatcctgcgcccacatcatcggcaactgcccagtgacacaggacgcccgaatcaagaggcacaattacatctgcgaactgcttctcgaggaggcgaagaagaaggactgggtagtgttcaaggaaccgcacataagggattccaacaaggaactgtacaaacctgacctgatatttgtgaaggatgggcgtgcacttgtcgtggatgtgacagtacggtatgaagcagccaaatcatcgctggaggaagccgctgcagagaaagtgagaaagtacaaacacctggaaacggaagtaagacatctcacgaatgcaaaggacgttacttttgtgggctttcccctaggagcgcgggggaaatggcaccaagataactttaaacttttgactgagcttggcctctccaaatcgaggcaagtgaaaatggcagagactttttccacagtagcgctcttttcatctgtggacattgtacatatgtttgccagtagggccagaaaatctatggttatgtgataataggctgccttctgcggggcttgccttctggccatgcccttcttctctcccttgcacctgtacctcttggtctttgaataaagcctgagtaggaaggaccggtaaaaaaaaaaaaaaaaaaaaaaaaaaaaaaacgttgactaaaaaaaaaaaaaaaaaaaaaaaaaaaaaaaaaaaaaaaaaaaaaaaaaaaaaaaaaaaaaaaaaaaaaa

SEQ ID NO: 11141 - DNA, 5264 bp, synthetic construct
  source 1..5264: mol_type = other DNA
gaaataagagagaaaagaagagtaagaagaaatataagagaattcgccaccatggcccctaagaaaaagcggaaggtgaatatcagcggctctagctgcggcagccccaacagcgccgacaccagcagcgacttcaaggacctgtggaccaagctgaaggaatgccacgaccgggaagtgcagggactccaggtgaaggtcaccaaactcaagcaagaaagaatcctggacgcccagagactggaagaattcttcaccaagaaccagcagctgagagagcagcagaaagtgctgcacgagacaatcaaggttctggaagatagactgcgggccggcctgtgcgacagatgcgccgtgaccgaggaacacatgcgcaaaaagcagcaggagttcgagaacattagacagcaaaatctgaaattgatcacagagctgatgaacgagagaaacacactgcaggaggagaacaagaagctgagcgagcagctgcaacagaagatcgagaatgatcagcaacaccaggccgctgagctggaatgtgaagaggacgtgatccccgacagcccaatcacagctttcagcttttctggcgtgaacagactgaggcggaaggaaaacccccacgtgcggtacatcgagcagacccataccaagctggaacacagcgtgtgtgccaacgagatgagaaaggtgtccaagtcctccacccatccccagcacaaccctaacgaaaatgagatcctggtggctgatacctacgaccagtctcagagccctatggccaaggcccacggcaccagctcttatacccctgataagagctccttcaacctggccaccgtggtggccgagacactgggcctgggcgtgcaggaggaaagcgagacacagggcccaatgagccctctgggagatgagctgtaccactgcctggaaggcaaccacaagaaacagccttttgagtccggctccgagactcctggaacaagcgagagcgctacacctgagggcagccctaagagaaaggtgtccagcgccgagggcgctgccaaggaagagcctaaacggagaagcgccagactgagcgccaagccccccgccaaggtggaagccaagcctaagaaggccgccgctaaggacaagagcagcgataagaaagtccagaccaagggcaagcggggcgccaaaggcaaacaggccgaggtggccaaccaggagacaaaggaagatctgcctgctgagaacggcgaaaccaagaccgaggaatctccagcttctgacgaggccggagagaaggaggccaaaagcgacagcggctctgagacacctggaacaagcgagagcgccaccccggaatcctatgaacaacttgcaccacaaccgtgtgtgggagaaactttacattctagcctcccacgagacagtgaactgtttgtgcctgaagaggggagcagcgagaaggagagcgaggacgcgccaaaaacatctcctccgacgcctgggaaacatggtttggaacagactggggaggaaaaagtgatggtgactgttcctgacaaaaatccaccttgtccttgctgtggtacccgggtaaactctgtgttgaatctgattgaacatctgaaagtgtcacacgggaaaaggggggtttgttttcggtgtgcaaaatgtggaaaggaaaatagtaactatcacagtgttgtttgtcattttaagaaatgcaggggtccagagacggagaaagccccagctggggagtggatttgtgaggtatgcaacagagattttacaaccaaaattggcctgggacaacacaagagattggcacacccagcagtgagaaatcaggaaaggatcgttgcttcccaaccgaaagaaacatcaaatagaggtgctcacaaaaggtgctggacaaaggaggaggaagaattactaataagactggaggctcagttcgagggaaacaaaaatattaataagcttattgcagaacacataaccaccaaaacagctaagcagatcagtgacaaaaggcgattgctgtccagaaagccagcagaggagccacgtgaggagcctggaacgtgtcatcacaccaggagagcagctgcgagcctgagaacggagcctgagatgagtcatcacgcccaggcagaggacagagataatggacctgggagacgccctctgccaggcagggcagctgccggagggagaacaatggacgagataagacgccaccctgataagggcaacggacagcagagacccaccaagcaaaaatcagaagaacagctgcaggcttactataaaaagacactagaggaacgactttcagctggggcacttaacaccttcccccgagcattcaagcaggtaatggaaggccgggatataaagctagtaatcaatcagacagcgcaggactgcttcggatgcctggaatccataagccaaataagaacggcaacccgagataaaaaggacacggtgacccgggagaaacacccaaagaaaccttttcagaagtggatgaagaagagagcaatcaaaaaaggtaattatcttcggttccagcgtttattttatcttgatagagggaaactggctaaaatcattttagatgatattgaatgcttgtcttgtgacataccactcagtgaaatttattcggtttttaaaacaagatgggaaacaactggtagctttaaaagccttggggactttaaaacttacgggaaggctgacaacactgccttcagagaattaattacggctaaagaaattgagaaaaatgtgcaggaaatgagcaaaggctcggctcccggtccagacgggattactcttggggacgtcgtaaagatggatcccgagttttcccggaccatggagattttcaatttatggttaacaactggtaaaatcccggacatggtgagggggtgcagaaccgttttgattccaaaatcatcaaagccggatcgtttgaaagacattaataactggagacctatcacgatcggttccatcttgctgagactgttctccaggattgtaacagctaggctgagcaaagcgtgccccctgaacccaaggcaaagaggctttatcagagcggcgggatgctctgaaaacttaaaactcctgcaaactataatttggtcggccaaaagagaacacagaccactgggtgttgtattcgtggacatcgccaaggcttttgacaccgtaagccaccagcacatcattcatgctttgcagcaaagagaggtggatccccacatcgtcggtctggtgagcaatatgtacgagaacatcagtacgtatatcaccacaaagaggaacacacacacagacaaaatccagatccgggttggagtaaagcagggtgacccgatgtcgccccttttatttaacctggcaatggaccctctattatgcaagctggaagagagtggcaaaggataccaccgaggacagagcagcatcacagcgatggcatttgcagacgatctggttttgctgagcgactcctgggaaaatatgaatacaaatattagcatactggagaccttctgcaatctgaccggactcaaaacacaggggcaaaagtgccacggcttttacatcaagccgacaaaggactcttacaccatcaatgactgcgctgcctggactatcaacggcacacccctgaacatgatcgaccccggcgaatctgagaaatacctcggcctgcagtttgacccgtggattggaatagcaaggtccggtctctccacaaaactagatttttggcttcagcggatcgatcaagcaccacttaaacctctgcagaaaactgatattctcaaaacatacaccatccctcggctgatctacatagctgaccactcagaagtgaaaagcgcactactcgaaacccttgaccagaagatccggacagcggtcaaggaatggcttcacctacctccgtgcacctgcgatgccatcctgtactcgagcacgagagacggcggtttgggcatcaccaaattggcaggactgatccccagcgtgcaggcccgtagactgcatcggatcgcacagtcatctgacgatacgatgaaatgcttcatggaaaaagagaaaatggaacagctgcataagaaattgtggattcaagctggaggggacagagagaacataccctcgatttgggaagcaccaccgtcgagtgaaccaccaaacaacgtgagcacaaattcggaatgggaagcaccgacccagaaagataaatttccaaagccttgcaattggaggaaaaacgaattcaaaaaatggaccaaattggcatcccaaggccgcggaattgtaaattttgaaagagacaaaattagtaaccattggatccaatactacagacgcatacctcacaggaaactcctcactgcactacaactcaggctgaacgtttaccccacgagagaatttctagccaggggtagacaagaccaatacatcaaggcgtgtaggcactgcgatgcggacaacgaatcctgcgcccacatcatcggcaactgcccagtgacacaggacgcccgaatcaagaggcacaattacatctgcgaactgcttctcgaggaggcgaagaagaaggactgggtagtgttcaaggaaccgcacataagggattccaacaaggaactgtacaaacctgacctgatatttgtgaaggatgggcgtgcacttgtcgtggatgtgacagtacggtatgaagcagccaaatcatcgctggaggaagccgctgcagagaaagtgagaaagtacaaacacctggaaacggaagtaagacatctcacgaatgcaaaggacgttacttttgtgggctttcccctaggagcgcgggggaaatggcaccaagataactttaaacttttgactgagcttggcctctccaaatcgaggcaagtgaaaatggcagagactttttccacagtagcgctcttttcatctgtggacattgtacatatgtttgccagtagggccagaaaatctatggttatgtgataataggctgccttctgcggggcttgccttctggccatgcccttcttctctcccttgcacctgtacctcttggtctttgaataaagcctgagtaggaaggaccggtaaaaaaaaaaaaaaaaaaaaaaaaaaaaaaacgttgactaaaaaaaaaaaaaaaaaaaaaaaaaaaaaaaaaaaaaaaaaaaaaaaaaaaaaaaaaaaaaaaaaaaaaa

SEQ ID NO: 11142 - DNA, 5264 bp, synthetic construct
  source 1..5264: mol_type = other DNA
gaaataagagagaaaagaagagtaagaagaaatataagagaattcgccaccatggcccctaagaaaaagcggaaggtgaatatcagcggctctagctgcggcagccccaacagcgccgacaccagcagcgacttcaaggacctgtggaccaagctgaaggaatgccacgaccgggaagtgcagggactccaggtgaaggtcaccaaactcaagcaagaaagaatcctggacgcccagagactggaagaattcttcaccaagaaccagcagctgagagagcagcagaaagtgctgcacgagacaatcaaggttctggaagatagactgcgggccggcctgtgcgacagatgcgccgtgaccgaggaacacatgcgcaaaaagcagcaggagttcgagaacattagacagcaaaatctgaaattgatcacagagctgatgaacgagagaaacacactgcaggaggagaacaagaagctgagcgagcagctgcaacagaagatcgagaatgatcagcaacaccaggccgctgagctggaatgtgaagaggacgtgatccccgacagcccaatcacagctttcagcttttctggcgtgaacagactgaggcggaaggaaaacccccacgtgcggtacatcgagcagacccataccaagctggaacacagcgtgtgtgccaacgagatgagaaaggtgtccaagtcctccacccatccccagcacaaccctaacgaaaatgagatcctggtggctgatacctacgaccagtctcagagccctatggccaaggcccacggcaccagctcttatacccctgataagagctccttcaacctggccaccgtggtggccgagacactgggcctgggcgtgcaggaggaaagcgagacacagggcccaatgagccctctgggagatgagctgtaccactgcctggaaggcaaccacaagaaacagccttttgagtccggctccgagactcctggaacaagcgagagcgctacacctgagggcagccctaagagaaaggtgtccagcgccgagggcgctgccaaggaagagcctaaacggagaagcgccagactgagcgccaagccccccgccaaggtggaagccaagcctaagaaggccgccgctaaggacaagagcagcgataagaaagtccagaccaagggcaagcggggcgccaaaggcaaacaggccgaggtggccaaccaggagacaaaggaagatctgcctgctgagaacggcgaaaccaagaccgaggaatctccagcttctgacgaggccggagagaaggaggccaaaagcgagagcggctctgagacacctggaacaagcgagagcgccaccccggaatcctatgaacaacttgcaccacaaccgtgtgtgggagaaactttacattctagcctcccacgagacagtgaactgtttgtgcctgaagaggggagcagcgagaaggagagcgaggacgcgccaaaaacatctcctccgacgcctgggaaacatggtttggaacagactggggaggaaaaagtgatggtgactgttcctgacaaaaatccaccttgtccttgctgtggtacccgggtaaactctgtgttgaatctgattgaacatctgaaagtgtcacacgggaaaaggggggtttgttttcggtgtgcaaaatgtggaaaggaaaatagtaactatcacagtgttgtttgtcattttaagaaatgcaggggtccagagacggagaaagccccagctggggagtggatttgtgaggtatgcaacagagattttacaaccaaaattggcctgggacaacacaagagattggcacacccagcagtgagaaatcaggaaaggatcgttgcttcccaaccgaaagaaacatcaaatagaggtgctcacaaaaggtgctggacaaaggaggaggaagaattactaataagactggaggctcagttcgagggaaacaaaaatattaataagcttattgcagaacacataaccaccaaaacagctaagcagatcagtgacaaaaggcgattgctgtccagaaagccagcagaggagccacgtgaggagcctggaacgtgtcatcacaccaggagagcagctgcgagcctgagaacggagcctgagatgagtcatcacgcccaggcagaggacagagataatggacctgggagacgccctctgccaggcagggcagctgccggagggagaacaatggacgagataagacgccaccctgataagggcaacggacagcagagacccaccaagcaaaaatcagaagaacagctgcaggcttactataaaaagacactagaggaacgactttcagctggggcacttaacaccttcccccgagcattcaagcaggtaatggaaggccgggatataaagctagtaatcaatcagacagcgcaggactgcttcggatgcctggaatccataagccaaataagaacggcaacccgagataaaaaggacacggtgacccgggagaaacacccaaagaaaccttttcagaagtggatgaagaagagagcaatcaaaaaaggtaattatcttcggttccagcgtttattttatcttgatagagggaaactggctaaaatcattttagatgatattgaatgcttgtcttgtgacataccactcagtgaaatttattcggtttttaaaacaagatgggaaacaactggtagctttaaaagccttggggactttaaaacttacgggaaggctgacaacactgccttcagagaattaattacggctaaagaaattgagaaaaatgtgcaggaaatgagcaaaggctcggctcccggtccagacgggattactcttggggacgtcgtaaagatggatcccgagttttcccggaccatggagattttcaatttatggttaacaactggtaaaatcccggacatggtgagggggtgcagaaccgttttgattccaaaatcatcaaagccggatcgtttgaaagacattaataactggagacctatcacgatcggttccatcttgctgagactgttctccaggattgtaacagctaggctgagcaaagcgtgccccctgaacccaaggcaaagaggctttatcagagcggcgggatgctctgaaaacttaaaactcctgcaaactataatttggtcggccaaaagagaacacagaccactgggtgttgtattcgtggacatcgccaaggcttttgacaccgtaagccaccagcacatcattcatgctttgcagcaaagagaggtggatccccacatcgtcggtctggtgagcaatatgtacgagaacatcagtacgtatatcaccacaaagaggaacacacacacagacaaaatccagatccgggttggagtaaagcagggtgacccgatgtcgccccttttatttaacctggcaatggaccctctattatgcaagctggaagagagtggcaaaggataccaccgaggacagagcagcatcacagcgatggcatttgcagacgatctggttttgctgagcgactcctgggaaaatatgaatacaaatattagcatactggagaccttctgcaatctgaccggactcaaaacacaggggcaaaagtgccacggcttttacatcaagccgacaaaggactcttacaccatcaatgactgcgctgcctggactatcaacggcacacccctgaacatgatcgaccccggcgaatctgagaaatacctcggcctgcagtttgacccgtggattggaatagcaaggtccggtctctccacaaaactagatttttggcttcagcggatcgatcaagcaccacttaaacctctgcagaaaactgatattctcaaaacatacaccatccctcggctgatctacatagctgaccactcagaagtgaaaagcgcactactcgaaacccttgaccagaagatccggacagcggtcaaggaatggcttcacctacctccgtgcacctgcgatgccatcctgtactcgagcacgagagacggcggtttgggcatcaccaaattggcaggactgatccccagcgtgcaggcccgtagactgcatcggatcgcacagtcatctgacgatacgatgaaatgcttcatggaaaaagagaaaatggaacagctgcataagaaattgtggattcaagctggaggggacagagagaacataccctcgatttgggaagcaccaccgtcgagtgaaccaccaaacaacgtgagcacaaattcggaatgggaagcaccgacccagaaagataaatttccaaagccttgcaattggaggaaaaacgaattcaaaaaatggaccaaattggcatcccaaggccgcggaattgtaaattttgaaagagacaaaattagtaaccattggatccaatactacagacgcatacctcacaggaaactcctcactgcactacaactcagggccaacgtttaccccacgagagaatttctagccaggggtagacaagaccaatacatcaaggcgtgtaggcactgcgatgcggacaacgaatcctgcgcccacatcatcggcaactgcccagtgacacaggacgcccgaatcaagaggcacaattacatctgcgaactgcttctcgaggaggcgaagaagaaggactgggtagtgttcaaggaaccgcacataagggattccaacaaggaactgtacaaacctgacctgatatttgtgaaggatgggcgtgcacttgtcgtggatgtgacagtacggtatgaagcagccaaatcatcgctggaggaagccgctgcagagaaagtgagaaagtacaaacacctggaaacggaagtaagacatctcacgaatgcaaaggacgttacttttgtgggctttcccctaggagcgcgggggaaatggcaccaagataactttaaacttttgactgagcttggcctctccaaatcgaggcaagtgaaaatggcagagactttttccacagtagcgctcttttcatctgtggacattgtacatatgtttgccagtagggccagaaaatctatggttatgtgataataggctgccttctgcggggcttgccttctggccatgcccttcttctctcccttgcacctgtacctcttggtctttgaataaagcctgagtaggaaggaccggtaaaaaaaaaaaaaaaaaaaaaaaaaaaaaaacgttgactaaaaaaaaaaaaaaaaaaaaaaaaaaaaaaaaaaaaaaaaaaaaaaaaaaaaaaaaaaaaaaaaaaaaaa

SEQ ID NO: 11143 - DNA, 5264 bp, synthetic construct
  source 1..5264: mol_type = other DNA
gaaataagagagaaaagaagagtaagaagaaatataagagaattcgccaccatggcccctaagaaaaagcggaaggtgaatatcagcggctctagctgcggcagccccaacagcgccgacaccagcagcgacttcaaggacctgtggaccaagctgaaggaatgccacgaccgggaagtgcagggactccaggtgaaggtcaccaaactcaagcaagaaagaatcctggacgcccagagactggaagaattcttcaccaagaaccagcagctgagagagcagcagaaagtgctgcacgagacaatcaaggttctggaagatagactgcgggccggcctgtgcgacagatgcgccgtgaccgaggaacacatgcgcaaaaagcagcaggagttcgagaacattagacagcaaaatctgaaattgatcacagagctgatgaacgagagaaacacactgcaggaggagaacaagaagctgagcgagcagctgcaacagaagatcgagaatgatcagcaacaccaggccgctgagctggaatgtgaagaggacgtgatccccgacagcccaatcacagctttcagcttttctggcgtgaacagactgaggcggaaggaaaacccccacgtgcggtacatcgagcagacccataccaagctggaacacagcgtgtgtgccaacgagatgagaaaggtgtccaagtcctccacccatccccagcacaaccctaacgaaaatgagatcctggtggctgatacctacgaccagtctcagagccctatggccaaggcccacggcaccagctcttatacccctgataagagctccttcaacctggccaccgtggtggccgagacactgggcctgggcgtgcaggaggaaagcgagacacagggcccaatgagccctctgggagatgagctgtaccactgcctggaaggcaaccacaagaaacagccttttgagtccggctccgagactcctggaacaagcgagagcgctacacctgagggcagccctaagagaaaggtgtccagcgccgagggcgctgccaaggaagagcctaaacggagaagcgccagactgagcgccaagccccccgccaaggtggaagccaagcctaagaaggccgccgctaaggacaagagcagcgataagaaagtccagaccaagggcaagcggggcgccaaaggcaaacaggccgaggtggccaaccaggagacaaaggaagatctgcctgctgagaacggcgaaaccaagaccgaggaatctccagcttctgacgaggccggagagaaggaggccaaaagcggcagcggctctgagacacctggaacaagcgagagcgccaccccggaatcctatgaacaacttgcaccacaaccgtgtgtgggagaaactttacattctagcctcccacgagacagtgaactgtttgtgcctgaagaggggagcagcgagaaggagagcgaggacgcgccaaaaacatctcctccgacgcctgggaaacatggtttggaacagactggggaggaaaaagtgatggtgactgttcctgacaaaaatccaccttgtccttgctgtggtacccgggtaaactctgtgttgaatctgattgaacatctgaaagtgtcacacgggaaaaggggggtttgttttcggtgtgcaaaatgtggaaaggaaaatagtaactatcacagtgttgtttgtcattttaagaaatgcaggggtccagagacggagaaagccccagctggggagtggatttgtgaggtatgcaacagagattttacaaccaaaattggcctgggacaacacaagagattggcacacccagcagtgagaaatcaggaaaggatcgttgcttcccaaccgaaagaaacatcaaatagaggtgctcacaaaaggtgctggacaaaggaggaggaagaattactaataagactggaggctcagttcgagggaaacaaaaatattaataagcttattgcagaacacataaccaccaaaacagctaagcagatcagtgacaaaaggcgattgctgtccagaaagccagcagaggagccacgtgaggagcctggaacgtgtcatcacaccaggagagcagctgcgagcctgagaacggagcctgagatgagtcatcacgcccaggcagaggacagagataatggacctgggagacgccctctgccaggcagggcagctgccggagggagaacaatggacgagataagacgccaccctgataagggcaacggacagcagagacccaccaagcaaaaatcagaagaacagctgcaggcttactataaaaagacactagaggaacgactttcagctggggcacttaacaccttcccccgagcattcaagcaggtaatggaaggccgggatataaagctagtaatcaatcagacagcgcaggactgcttcggatgcctggaatccataagccaaataagaacggcaacccgagataaaaaggacacggtgacccgggagaaacacccaaagaaaccttttcagaagtggatgaagaagagagcaatcaaaaaaggtaattatcttcggttccagcgtttattttatcttgatagagggaaactggctaaaatcattttagatgatattgaatgcttgtcttgtgacataccactcagtgaaatttattcggtttttaaaacaagatgggaaacaactggtagctttaaaagccttggggactttaaaacttacgggaaggctgacaacactgccttcagagaattaattacggctaaagaaattgagaaaaatgtgcaggaaatgagcaaaggctcggctcccggtccagacgggattactcttggggacgtcgtaaagatggatcccgagttttcccggaccatggagattttcaatttatggttaacaactggtaaaatcccggacatggtgagggggtgcagaaccgttttgattccaaaatcatcaaagccggatcgtttgaaagacattaataactggagacctatcacgatcggttccatcttgctgagactgttctccaggattgtaacagctaggctgagcaaagcgtgccccctgaacccaaggcaaagaggctttatcagagcggcgggatgctctgaaaacttaaaactcctgcaaactataatttggtcggccaaaagagaacacagaccactgggtgttgtattcgtggacatcgccaaggcttttgacaccgtaagccaccagcacatcattcatgctttgcagcaaagagaggtggatccccacatcgtcggtctggtgagcaatatgtacgagaacatcagtacgtatatcaccacaaagaggaacacacacacagacaaaatccagatccgggttggagtaaagcagggtgacccgatgtcgccccttttatttaacctggcaatggaccctctattatgcaagctggaagagagtggcaaaggataccaccgaggacagagcagcatcacagcgatggcatttgcagacgatctggttttgctgagcgactcctgggaaaatatgaatacaaatattagcatactggagaccttctgcaatctgaccggactcaaaacacaggggcaaaagtgccacggcttttacatcaagccgacaaaggactcttacaccatcaatgactgcgctgcctggactatcaacggcacacccctgaacatgatcgaccccggcgaatctgagaaatacctcggcctgcagtttgacccgtggattggaatagcaaggtccggtctctccacaaaactagatttttggcttcagcggatcgatcaagcaccacttaaacctctgcagaaaactgatattctcaaaacatacaccatccctcggctgatctacatagctgaccactcagaagtgaaaagcgcactactcgaaacccttgaccagaagatccggacagcggtcaaggaatggcttcacctacctccgtgcacctgcgatgccatcctgtactcgagcacgagagacggcggtttgggcatcaccaaattggcaggactgatccccagcgtgcaggcccgtagactgcatcggatcgcacagtcatctgacgatacgatgaaatgcttcatggaaaaagagaaaatggaacagctgcataagaaattgtggattcaagctggaggggacagagagaacataccctcgatttgggaagcaccaccgtcgagtgaaccaccaaacaacgtgagcacaaattcggaatgggaagcaccgacccagaaagataaatttccaaagccttgcaattggaggaaaaacgaattcaaaaaatggaccaaattggcatcccaaggccgcggaattgtaaattttgaaagagacaaaattagtaaccattggatccaatactacagacgcatacctcacaggaaactcctcactgcactacaactcagggccaacgtttaccccacgagagaatttctagccaggggtagacaagaccaatacatcaaggcgtgtaggcactgcgatgcggacaacgaatcctgcgcccacatcatcggcaactgcccagtgacacaggacgcccgaatcaagaggcacaattacatctgcgaactgcttctcgaggaggcgaagaagaaggactgggtagtgttcaaggaaccgcacataagggattccaacaaggaactgtacaaacctgacctgatatttgtgaaggatgggcgtgcacttgtcgtggatgtgacagtacggtatgaagcagccaaatcatcgctggaggaagccgctgcagagaaagtgagaaagtacaaacacctggaaacggaagtaagacatctcacgaatgcaaaggacgttacttttgtgggctttcccctaggagcgcgggggaaatggcaccaagataactttaaacttttgactgagcttggcctctccaaatcgaggcaagtgaaaatggcagagactttttccacagtagcgctcttttcatctgtggacattgtacatatgtttgccagtagggccagaaaatctatggttatgtgataataggctgccttctgcggggcttgccttctggccatgcccttcttctctcccttgcacctgtacctcttggtctttgaataaagcctgagtaggaaggaccggtaaaaaaaaaaaaaaaaaaaaaaaaaaaaaaacgttgactaaaaaaaaaaaaaaaaaaaaaaaaaaaaaaaaaaaaaaaaaaaaaaaaaaaaaaaaaaaaaaaaaaaaaa

SEQ ID NO: 11144 - DNA, 5264 bp, synthetic construct
  source 1..5264: mol_type = other DNA
gaaataagagagaaaagaagagtaagaagaaatataagagaattcgccaccatggcccctaagaaaaagcggaaggtgaatatcagcggctctagctgcggcagccccaacagcgccgacaccagcagcgacttcaaggacctgtggaccaagctgaaggaatgccacgaccgggaagtgcagggactccaggtgaaggtcaccaaactcaagcaagaaagaatcctggacgcccagagactggaagaattcttcaccaagaaccagcagctgagagagcagcagaaagtgctgcacgagacaatcaaggttctggaagatagactgcgggccggcctgtgcgacagatgcgccgtgaccgaggaacacatgcgcaaaaagcagcaggagttcgagaacattagacagcaaaatctgaaattgatcacagagctgatgaacgagagaaacacactgcaggaggagaacaagaagctgagcgagcagctgcaacagaagatcgagaatgatcagcaacaccaggccgctgagctggaatgtgaagaggacgtgatccccgacagcccaatcacagctttcagcttttctggcgtgaacagactgaggcggaaggaaaacccccacgtgcggtacatcgagcagacccataccaagctggaacacagcgtgtgtgccaacgagatgagaaaggtgtccaagtcctccacccatccccagcacaaccctaacgaaaatgagatcctggtggctgatacctacgaccagtctcagagccctatggccaaggcccacggcaccagctcttatacccctgataagagctccttcaacctggccaccgtggtggccgagacactgggcctgggcgtgcaggaggaaagcgagacacagggcccaatgagccctctgggagatgagctgtaccactgcctggaaggcaaccacaagaaacagccttttgagtccggctccgagactcctggaacaagcgagagcgctacacctgagggcagccctaagagaaaggtgtccagcgccgagggcgctgccaaggaagagcctaaacggagaagcgccagactgagcgccaagccccccgccaaggtggaagccaagcctaagaaggccgccgctaaggacaagagcagcgataagaaagtccagaccaagggcaagcggggcgccaaaggcaaacaggccgaggtggccaaccaggagacaaaggaagatctgcctgctgagaacggcgaaaccaagaccgaggaatctccagcttctgacgaggccggagagaaggaggccaaaagcgacagcggctctgagacacctggaacaagcgagagcgccaccccggaatcctatgaacaacttgcaccacaaccgtgtgtgggagaaactttacattctagcctcccacgagacagtgaactgtttgtgcctgaagaggggagcagcgagaaggagagcgaggacgcgccaaaaacatctcctccgacgcctgggaaacatggtttggaacagactggggaggaaaaagtgatggtgactgttcctgacaaaaatccaccttgtccttgctgtggtacccgggtaaactctgtgttgaatctgattgaacatctgaaagtgtcacacgggaaaaggggggtttgttttcggtgtgcaaaatgtggaaaggaaaatagtaactatcacagtgttgtttgtcattttaagaaatgcaggggtccagagacggagaaagccccagctggggagtggatttgtgaggtatgcaacagagattttacaaccaaaattggcctgggacaacacaagagattggcacacccagcagtgagaaatcaggaaaggatcgttgcttcccaaccgaaagaaacatcaaatagaggtgctcacaaaaggtgctggacaaaggaggaggaagaattactaataagactggaggctcagttcgagggaaacaaaaatattaataagcttattgcagaacacataaccaccaaaacagctaagcagatcagtgacaaaaggcgattgctgtccagaaagccagcagaggagccacgtgaggagcctggaacgtgtcatcacaccaggagagcagctgcgagcctgagaacggagcctgagatgagtcatcacgcccaggcagaggacagagataatggacctgggagacgccctctgccaggcagggcagctgccggagggagaacaatggacgagataagacgccaccctgataagggcaacggacagcagagacccaccaagcaaaaatcagaagaacagctgcaggcttactataaaaagacactagaggaacgactttcagctggggcacttaacaccttcccccgagcattcaagcaggtaatggaaggccgggatataaagctagtaatcaatcagacagcgcaggactgcttcggatgcctggaatccataagccaaataagaacggcaacccgagataaaaaggacacggtgacccgggagaaacacccaaagaaaccttttcagaagtggatgaagaagagagcaatcaaaaaaggtaattatcttcggttccagcgtttattttatcttgatagagggaaactggctaaaatcattttagatgatattgaatgcttgtcttgtgacataccactcagtgaaatttattcggtttttaaaacaagatgggaaacaactggtagctttaaaagccttggggactttaaaacttacgggaaggctgacaacactgccttcagagaattaattacggctaaagaaattgagaaaaatgtgcaggaaatgagcaaaggctcggctcccggtccagacgggattactcttggggacgtcgtaaagatggatcccgagttttcccggaccatggagattttcaatttatggttaacaactggtaaaatcccggacatggtgagggggtgcagaaccgttttgattccaaaatcatcaaagccggatcgtttgaaagacattaataactggagacctatcacgatcggttccatcttgctgagactgttctccaggattgtaacagctaggctgagcaaagcgtgccccctgaacccaaggcaaagaggctttatcagagcggcgggatgctctgaaaacttaaaactcctgcaaactataatttggtcggccaaaagagaacacagaccactgggtgttgtattcgtggacatcgccaaggcttttgacaccgtaagccaccagcacatcattcatgctttgcagcaaagagaggtggatccccacatcgtcggtctggtgagcaatatgtacgagaacatcagtacgtatatcaccacaaagaggaacacacacacagacaaaatccagatccgggttggagtaaagcagggtgacccgatgtcgccccttttatttaacctggcaatggaccctctattatgcaagctggaagagagtggcaaaggataccaccgaggacagagcagcatcacagcgatggcatttgcagacgatctggttttgctgagcgactcctgggaaaatatgaatacaaatattagcatactggagaccttctgcaatctgaccggactcaaaacacaggggcaaaagtgccacggcttttacatcaagccgacaaaggactcttacaccatcaatgactgcgctgcctggactatcaacggcacacccctgaacatgatcgaccccggcgaatctgagaaatacctcggcctgcagtttgacccgtggattggaatagcaaggtccggtctctccacaaaactagatttttggcttcagcggatcgatcaagcaccacttaaacctctgcagaaaactgatattctcaaaacatacaccatccctcggctgatctacatagctgaccactcagaagtgaaaagcgcactactcgaaacccttgaccagaagatccggacagcggtcaaggaatggcttcacctacctccgtgcacctgcgatgccatcctgtactcgagcacgagagacggcggtttgggcatcaccaaattggcaggactgatccccagcgtgcaggcccgtagactgcatcggatcgcacagtcatctgacgatacgatgaaatgcttcatggaaaaagagaaaatggaacagctgcataagaaattgtggattcaagctggaggggacagagagaacataccctcgatttgggaagcaccaccgtcgagtgaaccaccaaacaacgtgagcacaaattcggaatgggaagcaccgacccagaaagataaatttccaaagccttgcaattggaggaaaaacgaattcaaaaaatggaccaaattggcatcccaaggccgcggaattgtaaattttgaaagagacaaaattagtaaccattggatccaatactacagacgcatacctcacaggaaactcctcactgcactacaactcagggccaacgtttaccccacgaaagaatttctagccaggggtagacaagaccaatacatcaaggcgtgtaggcactgcgatgcggacaacgaatcctgcgcccacatcatcggcaactgcccagtgacacaggacgcccgaatcaagaggcacaattacatctgcgaactgcttctcgaggaggcgaagaagaaggactgggtagtgttcaaggaaccgcacataagggattccaacaaggaactgtacaaacctgacctgatatttgtgaaggatgggcgtgcacttgtcgtggatgtgacagtacggtatgaagcagccaaatcatcgctggaggaagccgctgcagagaaagtgagaaagtacaaacacctggaaacggaagtaagacatctcacgaatgcaaaggacgttacttttgtgggctttcccctaggagcgcgggggaaatggcaccaagataactttaaacttttgactgagcttggcctctccaaatcgaggcaagtgaaaatggcagagactttttccacagtagcgctcttttcatctgtggacattgtacatatgtttgccagtagggccagaaaatctatggttatgtgataataggctgccttctgcggggcttgccttctggccatgcccttcttctctcccttgcacctgtacctcttggtctttgaataaagcctgagtaggaaggaccggtaaaaaaaaaaaaaaaaaaaaaaaaaaaaaaacgttgactaaaaaaaaaaaaaaaaaaaaaaaaaaaaaaaaaaaaaaaaaaaaaaaaaaaaaaaaaaaaaaaaaaaaaa

SEQ ID NO: 11145 - DNA, 5264 bp, synthetic construct
  source 1..5264: mol_type = other DNA
gaaataagagagaaaagaagagtaagaagaaatataagagaattcgccaccatggcccctaagaaaaagcggaaggtgaatatcagcggctctagctgcggcagccccaacagcgccgacaccagcagcgacttcaaggacctgtggaccaagctgaaggaatgccacgaccgggaagtgcagggactccaggtgaaggtcaccaaactcaagcaagaaagaatcctggacgcccagagactggaagaattcttcaccaagaaccagcagctgagagagcagcagaaagtgctgcacgagacaatcaaggttctggaagatagactgcgggccggcctgtgcgacagatgcgccgtgaccgaggaacacatgcgcaaaaagcagcaggagttcgagaacattagacagcaaaatctgaaattgatcacagagctgatgaacgagagaaacacactgcaggaggagaacaagaagctgagcgagcagctgcaacagaagatcgagaatgatcagcaacaccaggccgctgagctggaatgtgaagaggacgtgatccccgacagcccaatcacagctttcagcttttctggcgtgaacagactgaggcggaaggaaaacccccacgtgcggtacatcgagcagacccataccaagctggaacacagcgtgtgtgccaacgagatgagaaaggtgtccaagtcctccacccatccccagcacaaccctaacgaaaatgagatcctggtggctgatacctacgaccagtctcagagccctatggccaaggcccacggcaccagctcttatacccctgataagagctccttcaacctggccaccgtggtggccgagacactgggcctgggcgtgcaggaggaaagcgagacacagggcccaatgagccctctgggagatgagctgtaccactgcctggaaggcaaccacaagaaacagccttttgagtccggctccgagactcctggaacaagcgagagcgctacacctgagggcagccctaagagaaaggtgtccagcgccgagggcgctgccaaggaagagcctaaacggagaagcgccagactgagcgccaagccccccgccaaggtggaagccaagcctaagaaggccgccgctaaggacaagagcagcgataagaaagtccagaccaagggcaagcggggcgccaaaggcaaacaggccgaggtggccaaccaggagacaaaggaagatctgcctgctgagaacggcgaaaccaagaccgaggaatctccagcttctgacgaggccggagagaaggaggccaaaagcgacagcggctctgagacacctggaacaagcgagagcgccaccccggaatcctatgaacaacttgcaccacaaccgtgtgtgggagaaactttacattctagcctcccacgagacagtgaactgtttgtgcctgaagaggggagcagcgagaaggagagcgaggacgcgccaaaaacatctcctccgacgcctgggaaacatggtttggaacagactggggaggaaaaagtgatggtgactgttcctgacaaaaatccaccttgtccttgctgtggtacccgggtaaactctgtgttgaatctgattgaacatctgaaagtgtcacacgggaaaaggggggtttgttttcggtgtgcaaaatgtggaaaggaaaatagtaactatcacagtgttgtttgtcattttaagaaatgcaggggtccagagacggagaaagccccagctggggagtggatttgtgaggtatgcaacagagattttacaaccaaaattggcctgggacaacacaagagattggcacacccagcagtgagaaatcaggaaaggatcgttgcttcccaaccgaaagaaacatcaaatagaggtgctcacaaaaggtgctggacaaaggaggaggaagaattactaataagactggaggctcagttcgagggaaacaaaaatattaataagcttattgcagaacacataaccaccaaaacagctaagcagatcagtgacaaaaggcgattgctgtccagaaagccagcagaggagccacgtgaggagcctggaacgtgtcatcacaccaggagagcagctgcgagcctgagaacggagcctgagatgagtcatcacgcccaggcagaggacagagataatggacctgggagacgccctctgccaggcagggcagctgccggagggagaacaatggacgagataagacgccaccctgataagggcaacggacagcagagacccaccaagcaaaaatcagaagaacagctgcaggcttactataaaaagacactagaggaacgactttcagctggggcacttaacaccttcccccgagcattcaagcaggtaatggaaggccgggatataaagctagtaatcaatcagacagcgcaggactgcttcggatgcctggaatccataagccaaataagaacggcaacccgagataaaaaggacacggtgacccgggagaaacacccaaagaaaccttttcagaagtggatgaagaagagagcaatcaaaaaaggtaattatcttcggttccagcgtttattttatcttgatagagggaaactggctaaaatcattttagatgatattgaatgcttgtcttgtgacataccactcagtgaaatttattcggtttttaaaacaagatgggaaacaactggtagctttaaaagccttggggactttaaaacttacgggaaggctgacaacactgccttcagagaattaattacggctaaagaaattgagaaaaatgtgcaggaaatgagcaaaggctcggctcccggtccagacgggattactcttggggacgtcgtaaagatggatcccgagttttcccggaccatggagattttcaatttatggttaacaactggtaaaatcccggacatggtgagggggtgcagaaccgttttgattccaaaatcatcaaagccggatcgtttgaaagacattaataactggagacctatcacgatcggttccatcttgctgagactgttctccaggattgtaacagctaggctgagcaaagcgtgccccctgaacccaaggcaaagaggctttatcagagcggcgggatgctctgaaaacttaaaactcctgcaaactataatttggtcggccaaaagagaacacagaccactgggtgttgtattcgtggacatcgccaaggcttttgacaccgtaagccaccagcacatcattcatgctttgcagcaaagagaggtggatccccacatcgtcggtctggtgagcaatatgtacgagaacatcagtacgtatatcaccacaaagaggaacacacacacagacaaaatccagatccgggttggagtaaagcagggtgacccgatgtcgccccttttatttaacctggcaatggaccctctattatgcaagctggaagagagtggcaaaggataccaccgaggacagagcagcatcacagcgatggcatttgcagacgatctggttttgctgagcgactcctgggaaaatatgaatacaaatattagcatactggagaccttctgcaatctgaccggactcaaaacacaggggcaaaagtgccacggcttttacatcaagccgacaaaggactcttacaccatcaatgactgcgctgcctggactatcaacggcacacccctgaacatgatcgaccccggcgaatctgagaaatacctcggcctgcagtttgacccgtggattggaatagcaaggtccggtctctccacaaaactagatttttggcttcagcggatcgatcaagcaccacttaaacctctgcagaaaactgatattctcaaaacatacaccatccctcggctgatctacatagctgaccactcagaagtgaaaagcgcactactcgaaacccttgaccagaagatccggacagcggtcaaggaatggcttcacctacctccgtgcacctgcgatgccatcctgtactcgagcacgagagacggcggtttgggcatcaccaaattggcaggactgatccccagcgtgcaggcccgtagactgcatcggatcgcacagtcatctgacgatacgatgaaatgcttcatggaaaaagagaaaatggaacagctgcataagaaattgtggattcaagctggaggggacagagagaacataccctcgatttgggaagcaccaccgtcgagtgaaccaccaaacaacgtgagcacaaattcggaatgggaagcaccgacccagaaagataaatttccaaagccttgcaattggaggaaaaacgaattcaaaaaatggaccaaattggcatcccaaggccgcggaattgtaaattttgaaagagacaaaattagtaaccattggatccaatactacagacgcatacctcacaggaaactcctcactgcactacaactcagggccaacgtttaccccacgaaagaatttatcgccaggggtagacaagaccaatacatcaaggcgtgtaggcactgcgatgcggacaacgaatcctgcgcccacatcatcggcaactgcccagtgacacaggacgcccgaatcaagaggcacaattacatctgcgaactgcttctcgaggaggcgaagaagaaggactgggtagtgttcaaggaaccgcacataagggattccaacaaggaactgtacaaacctgacctgatatttgtgaaggatgggcgtgcacttgtcgtggatgtgacagtacggtatgaagcagccaaatcatcgctggaggaagccgctgcagagaaagtgagaaagtacaaacacctggaaacggaagtaagacatctcacgaatgcaaaggacgttacttttgtgggctttcccctaggagcgcgggggaaatggcaccaagataactttaaacttttgactgagcttggcctctccaaatcgaggcaagtgaaaatggcagagactttttccacagtagcgctcttttcatctgtggacattgtacatatgtttgccagtagggccagaaaatctatggttatgtgataataggctgccttctgcggggcttgccttctggccatgcccttcttctctcccttgcacctgtacctcttggtctttgaataaagcctgagtaggaaggaccggtaaaaaaaaaaaaaaaaaaaaaaaaaaaaaaacgttgactaaaaaaaaaaaaaaaaaaaaaaaaaaaaaaaaaaaaaaaaaaaaaaaaaaaaaaaaaaaaaaaaaaaaaa

SEQ ID NO: 11146 - DNA, 5264 bp, synthetic construct
  source 1..5264: mol_type = other DNA
gaaataagagagaaaagaagagtaagaagaaatataagagaattcgccaccatggcccctaagaaaaagcggaaggtgaatatcagcggctctagctgcggcagccccaacagcgccgacaccagcagcgacttcaaggacctgtggaccaagctgaaggaatgccacgaccgggaagtgcagggactccaggtgaaggtcaccaaactcaagcaagaaagaatcctggacgcccagagactggaagaattcttcaccaagaaccagcagctgagagagcagcagaaagtgctgcacgagacaatcaaggttctggaagatagactgcgggccggcctgtgcgacagatgcgccgtgaccgaggaacacatgcgcaaaaagcagcaggagttcgagaacattagacagcaaaatctgaaattgatcacagagctgatgaacgagagaaacacactgcaggaggagaacaagaagctgagcgagcagctgcaacagaagatcgagaatgatcagcaacaccaggccgctgagctggaatgtgaagaggacgtgatccccgacagcccaatcacagctttcagcttttctggcgtgaacagactgaggcggaaggaaaacccccacgtgcggtacatcgagcagacccataccaagctggaacacagcgtgtgtgccaacgagatgagaaaggtgtccaagtcctccacccatccccagcacaaccctaacgaaaatgagatcctggtggctgatacctacgaccagtctcagagccctatggccaaggcccacggcaccagctcttatacccctgataagagctccttcaacctggccaccgtggtggccgagacactgggcctgggcgtgcaggaggaaagcgagacacagggcccaatgagccctctgggagatgagctgtaccactgcctggaaggcaaccacaagaaacagccttttgagtccggctccgagactcctggaacaagcgagagcgctacacctgagggcagccctaagagaaaggtgtccagcgccgagggcgctgccaaggaagagcctaaacggagaagcgccagactgagcgccaagccccccgccaaggtggaagccaagcctaagaaggccgccgctaaggacaagagcagcgataagaaagtccagaccaagggcaagcggggcgccaaaggcaaacaggccgaggtggccaaccaggagacaaaggaagatctgcctgctgagaacggcgaaaccaagaccgaggaatctccagcttctgacgaggccggagagaaggaggccaaaagcgacagcggctctgagacacctggaacaagcgagagcgccaccccggaatcctatgaacaacttgcaccacaaccgtgtgtgggagaaactttacattctagcctcccacgagacagtgaactgtttgtgcctgaagaggggagcagcgagaaggagagcgaggacgcgccaaaaacatctcctccgacgcctgggaaacatggtttggaacagactggggaggaaaaagtgatggtgactgttcctgacaaaaatccaccttgtccttgctgtggtacccgggtaaactctgtgttgaatctgattgaacatctgaaagtgtcacacgggaaaaggggggtttgttttcggtgtgcaaaatgtggaaaggaaaatagtaactatcacagtgttgtttgtcattttaagaaatgcaggggtccagagacggagaaagccccagctggggagtggatttgtgaggtatgcaacagagattttacaaccaaaattggcctgggacaacacaagagattggcacacccagcagtgagaaatcaggaaaggatcgttgcttcccaaccgaaagaaacatcaaatagaggtgctcacaaaaggtgctggacaaaggaggaggaagaattactaataagactggaggctcagttcgagggaaacaaaaatattaataagcttattgcagaacacataaccaccaaaacagctaagcagatcagtgacaaaaggcgattgctgtccagaaagccagcagaggagccacgtgaggagcctggaacgtgtcatcacaccaggagagcagctgcgagcctgagaacggagcctgagatgagtcatcacgcccaggcagaggacagagataatggacctgggagacgccctctgccaggcagggcagctgccggagggagaacaatggacgagataagacgccaccctgataagggcaacggacagcagagacccaccaagcaaaaatcagaagaacagctgcaggcttactataaaaagacactagaggaacgactttcagctggggcacttaacaccttcccccgagcattcaagcaggtaatggaaggccgggatataaagctagtaatcaatcagacagcgcaggactgcttcggatgcctggaatccataagccaaataagaacggcaacccgagataaaaaggacacggtgacccgggagaaacacccaaagaaaccttttcagaagtggatgaagaagagagcaatcaaaaaaggtaattatcttcggttccagcgtttattttatcttgatagagggaaactggctaaaatcattttagatgatattgaatgcttgtcttgtgacataccactcagtgaaatttattcggtttttaaaacaagatgggaaacaactggtagctttaaaagccttggggactttaaaacttacgggaaggctgacaacactgccttcagagaattaattacggctaaagaaattgagaaaaatgtgcaggaaatgagcaaaggctcggctcccggtccagacgggattactcttggggacgtcgtaaagatggatcccgagttttcccggaccatggagattttcaatttatggttaacaactggtaaaatcccggacatggtgagggggtgcagaaccgttttgattccaaaatcatcaaagccggatcgtttgaaagacattaataactggagacctatcacgatcggttccatcttgctgagactgttctccaggattgtaacagctaggctgagcaaagcgtgccccctgaacccaaggcaaagaggctttatcagagcggcgggatgctctgaaaacttaaaactcctgcaaactataatttggtcggccaaaagagaacacagaccactgggtgttgtattcgtggacatcgccaaggcttttgacaccgtaagccaccagcacatcattcatgctttgcagcaaagagaggtggatccccacatcgtcggtctggtgagcaatatgtacgagaacatcagtacgtatatcaccacaaagaggaacacacacacagacaaaatccagatccgggttggagtaaagcagggtgacccgatgtcgccccttttatttaacctggcaatggaccctctattatgcaagctggaagagagtggcaaaggataccaccgaggacagagcagcatcacagcgatggcatttgcagacgatctggttttgctgagcgactcctgggaaaatatgaatacaaatattagcatactggagaccttctgcaatctgaccggactcaaaacacaggggcaaaagtgccacggcttttacatcaagccgacaaaggactcttacaccatcaatgactgcgctgcctggactatcaacggcacacccctgaacatgatcgaccccggcgaatctgagaaatacctcggcctgcagtttgacccgtggattggaatagcaaggtccggtctctccacaaaactagatttttggcttcagcggatcgatcaagcaccacttaaacctctgcagaaaactgatattctcaaaacatacaccatccctcggctgatctacatagctgaccactcagaagtgaaaagcgcactactcgaaacccttgaccagaagatccggacagcggtcaaggaatggcttcacctacctccgtgcacctgcgatgccatcctgtactcgagcacgagagacggcggtttgggcatcaccaaattggcaggactgatccccagcgtgcaggcccgtagactgcatcggatcgcacagtcatctgacgatacgatgaaatgcttcatggaaaaagagaaaatggaacagctgcataagaaattgtggattcaagctggaggggacagagagaacataccctcgatttgggaagcaccaccgtcgagtgaaccaccaaacaacgtgagcacaaattcggaatgggaagcaccgacccagaaagataaatttccaaagccttgcaattggaggaaaaacgaattcaaaaaatggaccaaattggcatcccaaggccgcggaattgtaaattttgaaagagacaaaattagtaaccattggatccaatactacagacgcatacctcacaggaaactcctcactgcactacaactcagggccaacgtttaccccacgagagaatttctagccaggggtagacaagaccaatacatcaaggcgtgtaggcactgcgatgcggacaacgaatcctgcgcccacatcatcggcaactgcccagtgacacaggacgcccgaatcaagaggcacaattacatctgcgaactgcttctcgaggaggcgaagaagaaggactgggtagtgttcaaggaaccgcacataagggattccaacaaggaactgtacaaacctgacctgatatttgtgaaggatgggcgtgcacttgtcgtggatgtgacagtacggtatgaagcagccaaatcatcgctggaggaagccgctgcagagaaagtgagaaagtacaaacacctggaaacggaagtaagacatctcacgaatgcaaaggacgttacttttgtggcctttcccctaggagcgcgggggaaatggcaccaagataactttaaacttttgactgagcttggcctctccaaatcgaggcaagtgaaaatggcagagactttttccacagtagcgctcttttcatctgtggacattgtacatatgtttgccagtagggccagaaaatctatggttatgtgataataggctgccttctgcggggcttgccttctggccatgcccttcttctctcccttgcacctgtacctcttggtctttgaataaagcctgagtaggaaggaccggtaaaaaaaaaaaaaaaaaaaaaaaaaaaaaaacgttgactaaaaaaaaaaaaaaaaaaaaaaaaaaaaaaaaaaaaaaaaaaaaaaaaaaaaaaaaaaaaaaaaaaaaaa

SEQ ID NO: 11147 - DNA, 5264 bp, synthetic construct
  source 1..5264: mol_type = other DNA
gaaataagagagaaaagaagagtaagaagaaatataagagaattcgccaccatggcccctaagaaaaagcggaaggtgaatatcagcggctctagctgcggcagccccaacagcgccgacaccagcagcgacttcaaggacctgtggaccaagctgaaggaatgccacgaccgggaagtgcagggactccaggtgaaggtcaccaaactcaagcaagaaagaatcctggacgcccagagactggaagaattcttcaccaagaaccagcagctgagagagcagcagaaagtgctgcacgagacaatcaaggttctggaagatagactgcgggccggcctgtgcgacagatgcgccgtgaccgaggaacacatgcgcaaaaagcagcaggagttcgagaacattagacagcaaaatctgaaattgatcacagagctgatgaacgagagaaacacactgcaggaggagaacaagaagctgagcgagcagctgcaacagaagatcgagaatgatcagcaacaccaggccgctgagctggaatgtgaagaggacgtgatccccgacagcccaatcacagctttcagcttttctggcgtgaacagactgaggcggaaggaaaacccccacgtgcggtacatcgagcagacccataccaagctggaacacagcgtgtgtgccaacgagatgagaaaggtgtccaagtcctccacccatccccagcacaaccctaacgaaaatgagatcctggtggctgatacctacgaccagtctcagagccctatggccaaggcccacggcaccagctcttatacccctgataagagctccttcaacctggccaccgtggtggccgagacactgggcctgggcgtgcaggaggaaagcgagacacagggcccaatgagccctctgggagatgagctgtaccactgcctggaaggcaaccacaagaaacagccttttgagtccggctccgagactcctggaacaagcgagagcgctacacctgagggcagccctaagagaaaggtgtccagcgccgagggcgctgccaaggaagagcctaaacggagaagcgccagactgagcgccaagccccccgccaaggtggaagccaagcctaagaaggccgccgctaaggacaagagcagcgataagaaagtccagaccaagggcaagcggggcgccaaaggcaaacaggccgaggtggccaaccaggagacaaaggaagatctgcctgctgagaacggcgaaaccaagaccgaggaatctccagcttctgacgaggccggagagaaggaggccaaaagcgacagcggctctgagacacctggaacaagcgagagcgccaccccggaatcctatgaacaacttgcaccacaaccgtgtgtgggagaaactttacattctagcctcccacgagacagtgaactgtttgtgcctgaagaggggagcagcgagaaggagagcgaggacgcgccaaaaacatctcctccgacgcctgggaaacatggtttggaacagactggggaggaaaaagtgatggtgactgttcctgacaaaaatccaccttgtccttgctgtggtacccgggtaaactctgtgttgaatctgattgaacatctgaaagtgtcacacgggaaaaggggggtttgttttcggtgtgcaaaatgtggaaaggaaaatagtaactatcacagtgttgtttgtcattttaagaaatgcaggggtccagagacggagaaagccccagctggggagtggatttgtgaggtatgcaacagagattttacaaccaaaattggcctgggacaacacaagagattggcacacccagcagtgagaaatcaggaaaggatcgttgcttcccaaccgaaagaaacatcaaatagaggtgctcacaaaaggtgctggacaaaggaggaggaagaattactaataagactggaggctcagttcgagggaaacaaaaatattaataagcttattgcagaacacataaccaccaaaacagctaagcagatcagtgacaaaaggcgattgctgtccagaaagccagcagaggagccacgtgaggagcctggaacgtgtcatcacaccaggagagcagctgcgagcctgagaacggagcctgagatgagtcatcacgcccaggcagaggacagagataatggacctgggagacgccctctgccaggcagggcagctgccggagggagaacaatggacgagataagacgccaccctgataagggcaacggacagcagagacccaccaagcaaaaatcagaagaacagctgcaggcttactataaaaagacactagaggaacgactttcagctggggcacttaacaccttcccccgagcattcaagcaggtaatggaaggccgggatataaagctagtaatcaatcagacagcgcaggactgcttcggatgcctggaatccataagccaaataagaacggcaacccgagataaaaaggacacggtgacccgggagaaacacccaaagaaaccttttcagaagtggatgaagaagagagcaatcaaaaaaggtaattatcttcggttccagcgtttattttatcttgatagagggaaactggctaaaatcattttagatgatattgaatgcttgtcttgtgacataccactcagtgaaatttattcggtttttaaaacaagatgggaaacaactggtagctttaaaagccttggggactttaaaacttacgggaaggctgacaacactgccttcagagaattaattacggctaaagaaattgagaaaaatgtgcaggaaatgagcaaaggctcggctcccggtccagacgggattactcttggggacgtcgtaaagatggatcccgagttttcccggaccatggagattttcaatttatggttaacaactggtaaaatcccggacatggtgagggggtgcagaaccgttttgattccaaaatcatcaaagccggatcgtttgaaagacattaataactggagacctatcacgatcggttccatcttgctgagactgttctccaggattgtaacagctaggctgagcaaagcgtgccccctgaacccaaggcaaagaggctttatcagagcggcgggatgctctgaaaacttaaaactcctgcaaactataatttggtcggccaaaagagaacacagaccactgggtgttgtattcgtggacatcgccaaggcttttgacaccgtaagccaccagcacatcattcatgctttgcagcaaagagaggtggatccccacatcgtcggtctggtgagcaatatgtacgagaacatcagtacgtatatcaccacaaagaggaacacacacacagacaaaatccagatccgggttggagtaaagcagggtgacccgatgtcgccccttttatttaacctggcaatggaccctctattatgcaagctggaagagagtggcaaaggataccaccgaggacagagcagcatcacagcgatggcatttgcagacgatctggttttgctgagcgactcctgggaaaatatgaatacaaatattagcatactggagaccttctgcaatctgaccggactcaaaacacaggggcaaaagtgccacggcttttacatcaagccgacaaaggactcttacaccatcaatgactgcgctgcctggactatcaacggcacacccctgaacatgatcgaccccggcgaatctgagaaatacctcggcctgcagtttgacccgtggattggaatagcaaggtccggtctctccacaaaactagatttttggcttcagcggatcgatcaagcaccacttaaacctctgcagaaaactgatattctcaaaacatacaccatccctcggctgatctacatagctgaccactcagaagtgaaaagcgcactactcgaaacccttgaccagaagatccggacagcggtcaaggaatggcttcacctacctccgtgcacctgcgatgccatcctgtactcgagcacgagagacggcggtttgggcatcaccaaattggcaggactgatccccagcgtgcaggcccgtagactgcatcggatcgcacagtcatctgacgatacgatgaaatgcttcatggaaaaagagaaaatggaacagctgcataagaaattgtggattcaagctggaggggacagagagaacataccctcgatttgggaagcaccaccgtcgagtgaaccaccaaacaacgtgagcacaaattcggaatgggaagcaccgacccagaaagataaatttccaaagccttgcaattggaggaaaaacgaattcaaaaaatggaccaaattggcatcccaaggccgcggaattgtaaattttgaaagagacaaaattagtaaccattggatccaatactacagacgcatacctcacaggaaactcctcactgcactacaactcagggccaacgtttaccccacgagagaatttctagccaggggtagacaagaccaatacatcaaggcgtgtaggcactgcgatgcggacaacgaatcctgcgcccacatcatcggcaactgcccagtgacacaggacgcccgaatcaagaggcacaattacatctgcgaactgcttctcgaggaggcgaagaagaaggactgggtagtgttcaaggaaccgcacataagggattccaacaaggaactgtacaaacctgacctgatatttgtgaaggatgggcgtgcacttgtcgtggatgtgacagtacggtatgaagcagccaaatcatcgctggaggaagccgctgcagagaaagtgagaaagtacaaacacctggaaacggaagtaagacatctcacgaatgcaaaggacgttacttttgtgggctttcccctagccgcgcgggggaaatggcaccaagataactttaaacttttgactgagcttggcctctccaaatcgaggcaagtgaaaatggcagagactttttccacagtagcgctcttttcatctgtggacattgtacatatgtttgccagtagggccagaaaatctatggttatgtgataataggctgccttctgcggggcttgccttctggccatgcccttcttctctcccttgcacctgtacctcttggtctttgaataaagcctgagtaggaaggaccggtaaaaaaaaaaaaaaaaaaaaaaaaaaaaaaacgttgactaaaaaaaaaaaaaaaaaaaaaaaaaaaaaaaaaaaaaaaaaaaaaaaaaaaaaaaaaaaaaaaaaaaaaa

SEQ ID NO: 11148 - DNA, 5264 bp, synthetic construct
  source 1..5264: mol_type = other DNA
gaaataagagagaaaagaagagtaagaagaaatataagagaattcgccaccatggcccctaagaaaaagcggaaggtgaatatcagcggctctagctgcggcagccccaacagcgccgacaccagcagcgacttcaaggacctgtggaccaagctgaaggaatgccacgaccgggaagtgcagggactccaggtgaaggtcaccaaactcaagcaagaaagaatcctggacgcccagagactggaagaattcttcaccaagaaccagcagctgagagagcagcagaaagtgctgcacgagacaatcaaggttctggaagatagactgcgggccggcctgtgcgacagatgcgccgtgaccgaggaacacatgcgcaaaaagcagcaggagttcgagaacattagacagcaaaatctgaaattgatcacagagctgatgaacgagagaaacacactgcaggaggagaacaagaagctgagcgagcagctgcaacagaagatcgagaatgatcagcaacaccaggccgctgagctggaatgtgaagaggacgtgatccccgacagcccaatcacagctttcagcttttctggcgtgaacagactgaggcggaaggaaaacccccacgtgcggtacatcgagcagacccataccaagctggaacacagcgtgtgtgccaacgagatgagaaaggtgtccaagtcctccacccatccccagcacaaccctaacgaaaatgagatcctggtggctgatacctacgaccagtctcagagccctatggccaaggcccacggcaccagctcttatacccctgataagagctccttcaacctggccaccgtggtggccgagacactgggcctgggcgtgcaggaggaaagcgagacacagggcccaatgagccctctgggagatgagctgtaccactgcctggaaggcaaccacaagaaacagccttttgagtccggctccgagactcctggaacaagcgagagcgctacacctgagggcagccctaagagaaaggtgtccagcgccgagggcgctgccaaggaagagcctaaacggagaagcgccagactgagcgccaagccccccgccaaggtggaagccaagcctaagaaggccgccgctaaggacaagagcagcgataagaaagtccagaccaagggcaagcggggcgccaaaggcaaacaggccgaggtggccaaccaggagacaaaggaagatctgcctgctgagaacggcgaaaccaagaccgaggaatctccagcttctgacgaggccggagagaaggaggccaaaagcgacagcggctctgagacacctggaacaagcgagagcgccaccccggaatcctatgaacaacttgcaccacaaccgtgtgtgggagaaactttacattctagcctcccacgagacagtgaactgtttgtgcctgaagaggggagcagcgagaaggagagcgaggacgcgccaaaaacatctcctccgacgcctgggaaacatggtttggaacagactggggaggaaaaagtgatggtgactgttcctgacaaaaatccaccttgtccttgctgtggtacccgggtaaactctgtgttgaatctgattgaacatctgaaagtgtcacacgggaaaaggggggtttgttttcggtgtgcaaaatgtggaaaggaaaatagtaactatcacagtgttgtttgtcattttaagaaatgcaggggtccagagacggagaaagccccagctggggagtggatttgtgaggtatgcaacagagattttacaaccaaaattggcctgggacaacacaagagattggcacacccagcagtgagaaatcaggaaaggatcgttgcttcccaaccgaaagaaacatcaaatagaggtgctcacaaaaggtgctggacaaaggaggaggaagaattactaataagactggaggctcagttcgagggaaacaaaaatattaataagcttattgcagaacacataaccaccaaaacagctaagcagatcagtgacaaaaggcgattgctgtccagaaagccagcagaggagccacgtgaggagcctggaacgtgtcatcacaccaggagagcagctgcgagcctgagaacggagcctgagatgagtcatcacgcccaggcagaggacagagataatggacctgggagacgccctctgccaggcagggcagctgccggagggagaacaatggacgagataagacgccaccctgataagggcaacggacagcagagacccaccaagcaaaaatcagaagaacagctgcaggcttactataaaaagacactagaggaacgactttcagctggggcacttaacaccttcccccgagcattcaagcaggtaatggaaggccgggatataaagctagtaatcaatcagacagcgcaggactgcttcggatgcctggaatccataagccaaataagaacggcaacccgagataaaaaggacacggtgacccgggagaaacacccaaagaaaccttttcagaagtggatgaagaagagagcaatcaaaaaaggtaattatcttcggttccagcgtttattttatcttgatagagggaaactggctaaaatcattttagatgatattgaatgcttgtcttgtgacataccactcagtgaaatttattcggtttttaaaacaagatgggaaacaactggtagctttaaaagccttggggactttaaaacttacgggaaggctgacaacactgccttcagagaattaattacggctaaagaaattgagaaaaatgtgcaggaaatgagcaaaggctcggctcccggtccagacgggattactcttggggacgtcgtaaagatggatcccgagttttcccggaccatggagattttcaatttatggttaacaactggtaaaatcccggacatggtgagggggtgcagaaccgttttgattccaaaatcatcaaagccggatcgtttgaaagacattaataactggagacctatcacgatcggttccatcttgctgagactgttctccaggattgtaacagctaggctgagcaaagcgtgccccctgaacccaaggcaaagaggctttatcagagcggcgggatgctctgaaaacttaaaactcctgcaaactataatttggtcggccaaaagagaacacagaccactgggtgttgtattcgtggacatcgccaaggcttttgacaccgtaagccaccagcacatcattcatgctttgcagcaaagagaggtggatccccacatcgtcggtctggtgagcaatatgtacgagaacatcagtacgtatatcaccacaaagaggaacacacacacagacaaaatccagatccgggttggagtaaagcagggtgacccgatgtcgccccttttatttaacctggcaatggaccctctattatgcaagctggaagagagtggcaaaggataccaccgaggacagagcagcatcacagcgatggcatttgcagacgatctggttttgctgagcgactcctgggaaaatatgaatacaaatattagcatactggagaccttctgcaatctgaccggactcaaaacacaggggcaaaagtgccacggcttttacatcaagccgacaaaggactcttacaccatcaatgactgcgctgcctggactatcaacggcacacccctgaacatgatcgaccccggcgaatctgagaaatacctcggcctgcagtttgacccgtggattggaatagcaaggtccggtctctccacaaaactagatttttggcttcagcggatcgatcaagcaccacttaaacctctgcagaaaactgatattctcaaaacatacaccatccctcggctgatctacatagctgaccactcagaagtgaaaagcgcactactcgaaacccttgaccagaagatccggacagcggtcaaggaatggcttcacctacctccgtgcacctgcgatgccatcctgtactcgagcacgagagacggcggtttgggcatcaccaaattggcaggactgatccccagcgtgcaggcccgtagactgcatcggatcgcacagtcatctgacgatacgatgaaatgcttcatggaaaaagagaaaatggaacagctgcataagaaattgtggattcaagctggaggggacagagagaacataccctcgatttgggaagcaccaccgtcgagtgaaccaccaaacaacgtgagcacaaattcggaatgggaagcaccgacccagaaagataaatttccaaagccttgcaattggaggaaaaacgaattcaaaaaatggaccaaattggcatcccaaggccgcggaattgtaaattttgaaagagacaaaattagtaaccattggatccaatactacagacgcatacctcacaggaaactcctcactgcactacaactcagggccaacgtttaccccacgagagaatttctagccaggggtagacaagaccaatacatcaaggcgtgtaggcactgcgatgcggacaacgaatcctgcgcccacatcatcggcaactgcccagtgacacaggacgcccgaatcaagaggcacaattacatctgcgaactgcttctcgaggaggcgaagaagaaggactgggtagtgttcaaggaaccgcacataagggattccaacaaggaactgtacaaacctgacctgatatttgtgaaggatgggcgtgcacttgtcgtggatgtgacagtacggtatgaagcagccaaatcatcgctggaggaagccgctgcagagaaagtgagaaagtacaaacacctggaaacggaagtaagacatctcacgaatgcaaaggacgttacttttgtggcctttcccctagccgcgcgggggaaatggcaccaagataactttaaacttttgactgagcttggcctctccaaatcgaggcaagtgaaaatggcagagactttttccacagtagcgctcttttcatctgtggacattgtacatatgtttgccagtagggccagaaaatctatggttatgtgataataggctgccttctgcggggcttgccttctggccatgcccttcttctctcccttgcacctgtacctcttggtctttgaataaagcctgagtaggaaggaccggtaaaaaaaaaaaaaaaaaaaaaaaaaaaaaaacgttgactaaaaaaaaaaaaaaaaaaaaaaaaaaaaaaaaaaaaaaaaaaaaaaaaaaaaaaaaaaaaaaaaaaaaaa

SEQ ID NO: 11149 - DNA, 5264 bp, synthetic construct
  source 1..5264: mol_type = other DNA
gaaataagagagaaaagaagagtaagaagaaatataagagaattcgccaccatggcccctaagaaaaagcggaaggtgaatatcagcggctctagctgcggcagccccaacagcgccgacaccagcagcgacttcaaggacctgtggaccaagctgaaggaatgccacgaccgggaagtgcagggactccaggtgaaggtcaccaaactcaagcaagaaagaatcctggacgcccagagactggaagaattcttcaccaagaaccagcagctgagagagcagcagaaagtgctgcacgagacaatcaaggttctggaagatagactgcgggccggcctgtgcgacagatgcgccgtgaccgaggaacacatgcgcaaaaagcagcaggagttcgagaacattagacagcaaaatctgaaattgatcacagagctgatgaacgagagaaacacactgcaggaggagaacaagaagctgagcgagcagctgcaacagaagatcgagaatgatcagcaacaccaggccgctgagctggaatgtgaagaggacgtgatccccgacagcccaatcacagctttcagcttttctggcgtgaacagactgaggcggaaggaaaacccccacgtgcggtacatcgagcagacccataccaagctggaacacagcgtgtgtgccaacgagatgagaaaggtgtccaagtcctccacccatccccagcacaaccctaacgaaaatgagatcctggtggctgatacctacgaccagtctcagagccctatggccaaggcccacggcaccagctcttatacccctgataagagctccttcaacctggccaccgtggtggccgagacactgggcctgggcgtgcaggaggaaagcgagacacagggcccaatgagccctctgggagatgagctgtaccactgcctggaaggcaaccacaagaaacagccttttgagtccggctccgagactcctggaacaagcgagagcgctacacctgagggcagccctaagagaaaggtgtccagcgccgagggcgctgccaaggaagagcctaaacggagaagcgccagactgagcgccaagccccccgccaaggtggaagccaagcctaagaaggccgccgctaaggacaagagcagcgataagaaagtccagaccaagggcaagcggggcgccaaaggcaaacaggccgaggtggccaaccaggagacaaaggaagatctgcctgctgagaacggcgaaaccaagaccgaggaatctccagcttctgacgaggccggagagaaggaggccaaaagcgacagcggctctgagacacctggaacaagcgagagcgccaccccggaatcctatgaacaacttgcaccacaaccgtgtgtgggagaaactttacattctagcctcccacgagacagtgaactgtttgtgcctgaagaggggagcagcgagaaggagagcgaggacgcgccaaaaacatctcctccgacgcctgggaaacatggtttggaacagactggggaggaaaaagtgatggtgactgttcctgacaaaaatccaccttgtccttgctgtggtacccgggtaaactctgtgttgaatctgattgaacatctgaaagtgtcacacgggaaaaggggggtttgttttcggtgtgcaaaatgtggaaaggaaaatagtaactatcacagtgttgtttgtcattttaagaaatgcaggggtccagagacggagaaagccccagctggggagtggatttgtgaggtatgcaacagagattttacaaccaaaattggcctgggacaacacaagagattggcacacccagcagtgagaaatcaggaaaggatcgttgcttcccaaccgaaagaaacatcaaatagaggtgctcacaaaaggtgctggacaaaggaggaggaagaattactaataagactggaggctcagttcgagggaaacaaaaatattaataagcttattgcagaacacataaccaccaaaacagctaagcagatcagtgacaaaaggcgattgctgtccagaaagccagcagaggagccacgtgaggagcctggaacgtgtcatcacaccaggagagcagctgcgagcctgagaacggagcctgagatgagtcatcacgcccaggcagaggacagagataatggacctgggagacgccctctgccaggcagggcagctgccggagggagaacaatggacgagataagacgccaccctgataagggcaacggacagcagagacccaccaagcaaaaatcagaagaacagctgcaggcttactataaaaagacactagaggaacgactttcagctggggcacttaacaccttcccccgagcattcaagcaggtaatggaaggccgggatataaagctagtaatcaatcagacagcgcaggactgcttcggatgcctggaatccataagccaaataagaacggcaacccgagataaaaaggacacggtgacccgggagaaacacccaaagaaaccttttcagaagtggatgaagaagagagcaatcaaaaaaggtaattatcttcggttccagcgtttattttatcttgatagagggaaactggctaaaatcattttagatgatattgaatgcttgtcttgtgacataccactcagtgaaatttattcggtttttaaaacaagatgggaaacaactggtagctttaaaagccttggggactttaaaacttacgggaaggctgacaacactgccttcagagaattaattacggctaaagaaattgagaaaaatgtgcaggaaatgagcaaaggctcggctcccggtccagacgggattactcttggggacgtcgtaaagatggatcccgagttttcccggaccatggagattttcaatttatggttaacaactggtaaaatcccggacatggtgagggggtgcagaaccgttttgattccaaaatcatcaaagccggatcgtttgaaagacattaataactggagacctatcacgatcggttccatcttgctgagactgttctccaggattgtaacagctaggctgagcaaagcgtgccccctgaacccaaggcaaagaggctttatcagagcggcgggatgctctgaaaacttaaaactcctgcaaactataatttggtcggccaaaagagaacacagaccactgggtgttgtattcgtggacatcgccaaggcttttgacaccgtaagccaccagcacatcattcatgctttgcagcaaagagaggtggatccccacatcgtcggtctggtgagcaatatgtacgagaacatcagtacgtatatcaccacaaagaggaacacacacacagacaaaatccagatccgggttggagtaaagcagggtgacccgatgtcgccccttttatttaacctggcaatggaccctctattatgcgccctggaagaggccggcaaaggataccaccgaggacagagcagcatcacagcgatggcatttgcagacgatctggttttgctgagcgactcctgggaaaatatgaatacaaatattagcatactggagaccttctgcaatctgaccggactcaaaacacaggggcaaaagtgccacggcttttacatcaagccgacaaaggactcttacaccatcaatgactgcgctgcctggactatcaacggcacacccctgaacatgatcgaccccggcgaatctgagaaatacctcggcctgcagtttgacccgtggattggaatagcaaggtccggtctctccacaaaactagatttttggcttcagcggatcgatcaagcaccacttaaacctctgcagaaaactgatattctcaaaacatacaccatccctcggctgatctacatagctgaccactcagaagtgaaaagcgcactactcgaaacccttgaccagaagatccggacagcggtcaaggaatggcttcacctacctccgtgcacctgcgatgccatcctgtactcgagcacgagagacggcggtttgggcatcaccaaattggcaggactgatccccagcgtgcaggcccgtagactgcatcggatcgcacagtcatctgacgatacgatgaaatgcttcatggaaaaagagaaaatggaacagctgcataagaaattgtggattcaagctggaggggacagagagaacataccctcgatttgggaagcaccaccgtcgagtgaaccaccaaacaacgtgagcacaaattcggaatgggaagcaccgacccagaaagataaatttccaaagccttgcaattggaggaaaaacgaattcaaaaaatggaccaaattggcatcccaaggccgcggaattgtaaattttgaaagagacaaaattagtaaccattggatccaatactacagacgcatacctcacaggaaactcctcactgcactacaactcagggccaacgtttaccccacgagagaatttctagccaggggtagacaagaccaatacatcaaggcgtgtaggcactgcgatgcggacaacgaatcctgcgcccacatcatcggcaactgcccagtgacacaggacgcccgaatcaagaggcacaattacatctgcgaactgcttctcgaggaggcgaagaagaaggactgggtagtgttcaaggaaccgcacataagggattccaacaaggaactgtacaaacctgacctgatatttgtgaaggatgggcgtgcacttgtcgtggatgtgacagtacggtatgaagcagccaaatcatcgctggaggaagccgctgcagagaaagtgagaaagtacaaacacctggaaacggaagtaagacatctcacgaatgcaaaggacgttacttttgtgggctttcccctaggagcgcgggggaaatggcaccaagataactttaaacttttgactgagcttggcctctccaaatcgaggcaagtgaaaatggcagagactttttccacagtagcgctcttttcatctgtggacattgtacatatgtttgccagtagggccagaaaatctatggttatgtgataataggctgccttctgcggggcttgccttctggccatgcccttcttctctcccttgcacctgtacctcttggtctttgaataaagcctgagtaggaaggaccggtaaaaaaaaaaaaaaaaaaaaaaaaaaaaaaacgttgactaaaaaaaaaaaaaaaaaaaaaaaaaaaaaaaaaaaaaaaaaaaaaaaaaaaaaaaaaaaaaaaaaaaaaa

SEQ ID NO: 11150 - DNA, 5264 bp, synthetic construct
  source 1..5264: mol_type = other DNA
gaaataagagagaaaagaagagtaagaagaaatataagagaattcgccaccatggcccctaagaaaaagcggaaggtgaatatcagcggctctagctgcggcagccccaacagcgccgacaccagcagcgacttcaaggacctgtggaccaagctgaaggaatgccacgaccgggaagtgcagggactccaggtgaaggtcaccaaactcaagcaagaaagaatcctggacgcccagagactggaagaattcttcaccaagaaccagcagctgagagagcagcagaaagtgctgcacgagacaatcaaggttctggaagatagactgcgggccggcctgtgcgacagatgcgccgtgaccgaggaacacatgcgcaaaaagcagcaggagttcgagaacattagacagcaaaatctgaaattgatcacagagctgatgaacgagagaaacacactgcaggaggagaacaagaagctgagcgagcagctgcaacagaagatcgagaatgatcagcaacaccaggccgctgagctggaatgtgaagaggacgtgatccccgacagcccaatcacagctttcagcttttctggcgtgaacagactgaggcggaaggaaaacccccacgtgcggtacatcgagcagacccataccaagctggaacacagcgtgtgtgccaacgagatgagaaaggtgtccaagtcctccacccatccccagcacaaccctaacgaaaatgagatcctggtggctgatacctacgaccagtctcagagccctatggccaaggcccacggcaccagctcttatacccctgataagagctccttcaacctggccaccgtggtggccgagacactgggcctgggcgtgcaggaggaaagcgagacacagggcccaatgagccctctgggagatgagctgtaccactgcctggaaggcaaccacaagaaacagccttttgagtccggctccgagactcctggaacaagcgagagcgctacacctgagggcagccctaagagaaaggtgtccagcgccgagggcgctgccaaggaagagcctaaacggagaagcgccagactgagcgccaagccccccgccaaggtggaagccaagcctaagaaggccgccgctaaggacaagagcagcgataagaaagtccagaccaagggcaagcggggcgccaaaggcaaacaggccgaggtggccaaccaggagacaaaggaagatctgcctgctgagaacggcgaaaccaagaccgaggaatctccagcttctgacgaggccggagagaaggaggccaaaagcgacagcggctctgagacacctggaacaagcgagagcgccaccccggaatcctatgaacaacttgcaccacaaccgtgtgtgggagaaactttacattctagcctcccacgagacagtgaactgtttgtgcctgaagaggggagcagcgagaaggagagcgaggacgcgccaaaaacatctcctccgacgcctgggaaacatggtttggaacagactggggaggaaaaagtgatggtgactgttcctgacaaaaatccaccttgtccttgctgtggtacccgggtaaactctgtgttgaatctgattgaacatctgaaagtgtcacacgggaaaaggggggtttgttttcggtgtgcaaaatgtggaaaggaaaatagtaactatcacagtgttgtttgtcattttaagaaatgcaggggtccagagacggagaaagccccagctggggagtggatttgtgaggtatgcaacagagattttacaaccaaaattggcctgggacaacacaagagattggcacacccagcagtgagaaatcaggaaaggatcgttgcttcccaaccgaaagaaacatcaaatagaggtgctcacaaaaggtgctggacaaaggaggaggaagaattactaataagactggaggctcagttcgagggaaacaaaaatattaataagcttattgcagaacacataaccaccaaaacagctaagcagatcagtgacaaaaggcgattgctgtccagaaagccagcagaggagccacgtgaggagcctggaacgtgtcatcacaccaggagagcagctgcgagcctgagaacggagcctgagatgagtcatcacgcccaggcagaggacagagataatggacctgggagacgccctctgccaggcagggcagctgccggagggagaacaatggacgagataagacgccaccctgataagggcaacggacagcagagacccaccaagcaaaaatcagaagaacagctgcaggcttactataaaaagacactagaggaacgactttcagctggggcacttaacaccttcccccgagcattcaagcaggtaatggaaggccgggatataaagctagtaatcaatcagacagcgcaggactgcttcggatgcctggaatccataagccaaataagaacggcaacccgagataaaaaggacacggtgacccgggagaaacacccaaagaaaccttttcagaagtggatgaagaagagagcaatcaaaaaaggtaattatcttcggttccagcgtttattttatcttgatagagggaaactggctaaaatcattttagatgatattgaatgcttgtcttgtgacataccactcagtgaaatttattcggtttttaaaacaagatgggaaacaactggtagctttaaaagccttggggactttaaaacttacgggaaggctgacaacactgccttcagagaattaattacggctaaagaaattgagaaaaatgtgcaggaaatgagcaaaggctcggctcccggtccagacgggattactcttggggacgtcgtaaagatggatcccgagttttcccggaccatggagattttcaatttatggttaacaactggtaaaatcccggacatggtgagggggtgcagaaccgttttgattccaaaatcatcaaagccggatcgtttgaaagacattaataactggagacctatcacgatcggttccatcttgctgagactgttctccaggattgtaacagctaggctgagcaaagcgtgccccctgaacccaaggcaaagaggctttatcagagcggcgggatgctctgaaaacttaaaactcctgcaaactataatttggtcggccaaaagagaacacagaccactgggtgttgtattcgtggacatcgccaaggcttttgacaccgtaagccaccagcacatcattcatgctttgcagcaaagagaggtggatccccacatcgtcggtctggtgagcaatatgtacgagaacatcagtacgtatatcaccacaaagaggaacacacacacagacaaaatccagatccgggttggagtaaagcagggtgacccgatgtcgccccttttatttaacctggcaatggaccctctattatgcaagctggaagagagtggcaaaggataccaccgaggacagagcagcatcacagcgatggcatttgcagacgatctggttttgctgagcgactcctgggaaaatatgagcgtgaatattgtgatactggagaccttctgcaatctgaccggactcaaaacacaggggcaaaagtgccacggcttttacatcaagccgacaaaggactcttacaccatcaatgactgcgctgcctggactatcaacggcacacccctgaacatgatcgaccccggcgaatctgagaaatacctcggcctgcagtttgacccgtggattggaatagcaaggtccggtctctccacaaaactagatttttggcttcagcggatcgatcaagcaccacttaaacctctgcagaaaactgatattctcaaaacatacaccatccctcggctgatctacatagctgaccactcagaagtgaaaagcgcactactcgaaacccttgaccagaagatccggacagcggtcaaggaatggcttcacctacctccgtgcacctgcgatgccatcctgtactcgagcacgagagacggcggtttgggcatcaccaaattggcaggactgatccccagcgtgcaggcccgtagactgcatcggatcgcacagtcatctgacgatacgatgaaatgcttcatggaaaaagagaaaatggaacagctgcataagaaattgtggattcaagctggaggggacagagagaacataccctcgatttgggaagcaccaccgtcgagtgaaccaccaaacaacgtgagcacaaattcggaatgggaagcaccgacccagaaagataaatttccaaagccttgcaattggaggaaaaacgaattcaaaaaatggaccaaattggcatcccaaggccgcggaattgtaaattttgaaagagacaaaattagtaaccattggatccaatactacagacgcatacctcacaggaaactcctcactgcactacaactcagggccaacgtttaccccacgagagaatttctagccaggggtagacaagaccaatacatcaaggcgtgtaggcactgcgatgcggacaacgaatcctgcgcccacatcatcggcaactgcccagtgacacaggacgcccgaatcaagaggcacaattacatctgcgaactgcttctcgaggaggcgaagaagaaggactgggtagtgttcaaggaaccgcacataagggattccaacaaggaactgtacaaacctgacctgatatttgtgaaggatgggcgtgcacttgtcgtggatgtgacagtacggtatgaagcagccaaatcatcgctggaggaagccgctgcagagaaagtgagaaagtacaaacacctggaaacggaagtaagacatctcacgaatgcaaaggacgttacttttgtgggctttcccctaggagcgcgggggaaatggcaccaagataactttaaacttttgactgagcttggcctctccaaatcgaggcaagtgaaaatggcagagactttttccacagtagcgctcttttcatctgtggacattgtacatatgtttgccagtagggccagaaaatctatggttatgtgataataggctgccttctgcggggcttgccttctggccatgcccttcttctctcccttgcacctgtacctcttggtctttgaataaagcctgagtaggaaggaccggtaaaaaaaaaaaaaaaaaaaaaaaaaaaaaaacgttgactaaaaaaaaaaaaaaaaaaaaaaaaaaaaaaaaaaaaaaaaaaaaaaaaaaaaaaaaaaaaaaaaaaaaaa

SEQ ID NO: 11151 - DNA, 5264 bp, synthetic construct
  source 1..5264: mol_type = other DNA
gaaataagagagaaaagaagagtaagaagaaatataagagaattcgccaccatggcccctaagaaaaagcggaaggtgaatatcagcggctctagctgcggcagccccaacagcgccgacaccagcagcgacttcaaggacctgtggaccaagctgaaggaatgccacgaccgggaagtgcagggactccaggtgaaggtcaccaaactcaagcaagaaagaatcctggacgcccagagactggaagaattcttcaccaagaaccagcagctgagagagcagcagaaagtgctgcacgagacaatcaaggttctggaagatagactgcgggccggcctgtgcgacagatgcgccgtgaccgaggaacacatgcgcaaaaagcagcaggagttcgagaacattagacagcaaaatctgaaattgatcacagagctgatgaacgagagaaacacactgcaggaggagaacaagaagctgagcgagcagctgcaacagaagatcgagaatgatcagcaacaccaggccgctgagctggaatgtgaagaggacgtgatccccgacagcccaatcacagctttcagcttttctggcgtgaacagactgaggcggaaggaaaacccccacgtgcggtacatcgagcagacccataccaagctggaacacagcgtgtgtgccaacgagatgagaaaggtgtccaagtcctccacccatccccagcacaaccctaacgaaaatgagatcctggtggctgatacctacgaccagtctcagagccctatggccaaggcccacggcaccagctcttatacccctgataagagctccttcaacctggccaccgtggtggccgagacactgggcctgggcgtgcaggaggaaagcgagacacagggcccaatgagccctctgggagatgagctgtaccactgcctggaaggcaaccacaagaaacagccttttgagtccggctccgagactcctggaacaagcgagagcgctacacctgagggcagccctaagagaaaggtgtccagcgccgagggcgctgccaaggaagagcctaaacggagaagcgccagactgagcgccaagccccccgccaaggtggaagccaagcctaagaaggccgccgctaaggacaagagcagcgataagaaagtccagaccaagggcaagcggggcgccaaaggcaaacaggccgaggtggccaaccaggagacaaaggaagatctgcctgctgagaacggcgaaaccaagaccgaggaatctccagcttctgacgaggccggagagaaggaggccaaaagcgacagcggctctgagacacctggaacaagcgagagcgccaccccggaatcctatgaacaacttgcaccacaaccgtgtgtgggagaaactttacattctagcctcccacgagacagtgaactgtttgtgcctgaagaggggagcagcgagaaggagagcgaggacgcgccaaaaacatctcctccgacgcctgggaaacatggtttggaacagactggggaggaaaaagtgatggtgactgttcctgacaaaaatccaccttgtccttgctgtggtacccgggtaaactctgtgttgaatctgattgaacatctgaaagtgtcacacgggaaaaggggggtttgttttcggtgtgcaaaatgtggaaaggaaaatagtaactatcacagtgttgtttgtcattttaagaaatgcaggggtccagagacggagaaagccccagctggggagtggatttgtgaggtatgcaacagagattttacaaccaaaattggcctgggacaacacaagagattggcacacccagcagtgagaaatcaggaaaggatcgttgcttcccaaccgaaagaaacatcaaatagaggtgctcacaaaaggtgctggacaaaggaggaggaagaattactaataagactggaggctcagttcgagggaaacaaaaatattaataagcttattgcagaacacataaccaccaaaacagctaagcagatcagtgacaaaaggcgattgctgtccagaaagccagcagaggagccacgtgaggagcctggaacgtgtcatcacaccaggagagcagctgcgagcctgagaacggagcctgagatgagtcatcacgcccaggcagaggacagagataatggacctgggagacgccctctgccaggcagggcagctgccggagggagaacaatggacgagataagacgccaccctgataagggcaacggacagcagagacccaccaagcaaaaatcagaagaacagctgcaggcttactataaaaagacactagaggaacgactttcagctggggcacttaacaccttcccccgagcattcaagcaggtaatggaaggccgggatataaagctagtaatcaatcagacagcgcaggactgcttcggatgcctggaatccataagccaaataagaacggcaacccgagataaaaaggacacggtgacccgggagaaacacccaaagaaaccttttcagaagtggatgaagaagagagcaatcaaaaaaggtaattatcttcggttccagcgtttattttatcttgatagagggaaactggctaaaatcattttagatgatattgaatgcttgtcttgtgacataccactcagtgaaatttattcggtttttaaaacaagatgggaaacaactggtagctttaaaagccttggggactttaaaacttacgggaaggctgacaacactgccttcagagaattaattacggctaaagaaattgagaaaaatgtgcaggaaatgagcaaaggctcggctcccggtccagacgggattactcttggggacgtcgtaaagatggatcccgagttttcccggaccatggagattttcaatttatggttaacaactggtaaaatcccggacatggtgagggggtgcagaaccgttttgattccaaaatcatcaaagccggatcgtttgaaagacattaataactggagacctatcacgatcggttccatcttgctgagactgttctccaggattgtaacagctaggctgagcaaagcgtgccccctgaacccaaggcaaagaggctttatcagagcggcgggatgctctgaaaacttaaaactcctgcaaactataatttggtcggccaaaagagaacacagaccactgggtgttgtattcgtggacatcgccaaggcttttgacaccgtaagccaccagcacatcattcatgctttgcagcaaagagaggtggatccccacatcgtcggtctggtgagcaatatgtacgagaacatcagtacgtatatcaccacaaagaggaacacacacacagacaaaatccagatccgggttggagtaaagcagggtgacccgatgtcgccccttttatttaacctggcaatggaccctctattatgcaagctggaagagagtggcaaaggataccaccgaggacagagcagcatcacagcgatggcatttgcagacgatctggttttgctgagcgactcctgggaaaatatggccgccaatattgccatactggagaccttctgcaatctgaccggactcaaaacacaggggcaaaagtgccacggcttttacatcaagccgacaaaggactcttacaccatcaatgactgcgctgcctggactatcaacggcacacccctgaacatgatcgaccccggcgaatctgagaaatacctcggcctgcagtttgacccgtggattggaatagcaaggtccggtctctccacaaaactagatttttggcttcagcggatcgatcaagcaccacttaaacctctgcagaaaactgatattctcaaaacatacaccatccctcggctgatctacatagctgaccactcagaagtgaaaagcgcactactcgaaacccttgaccagaagatccggacagcggtcaaggaatggcttcacctacctccgtgcacctgcgatgccatcctgtactcgagcacgagagacggcggtttgggcatcaccaaattggcaggactgatccccagcgtgcaggcccgtagactgcatcggatcgcacagtcatctgacgatacgatgaaatgcttcatggaaaaagagaaaatggaacagctgcataagaaattgtggattcaagctggaggggacagagagaacataccctcgatttgggaagcaccaccgtcgagtgaaccaccaaacaacgtgagcacaaattcggaatgggaagcaccgacccagaaagataaatttccaaagccttgcaattggaggaaaaacgaattcaaaaaatggaccaaattggcatcccaaggccgcggaattgtaaattttgaaagagacaaaattagtaaccattggatccaatactacagacgcatacctcacaggaaactcctcactgcactacaactcagggccaacgtttaccccacgagagaatttctagccaggggtagacaagaccaatacatcaaggcgtgtaggcactgcgatgcggacaacgaatcctgcgcccacatcatcggcaactgcccagtgacacaggacgcccgaatcaagaggcacaattacatctgcgaactgcttctcgaggaggcgaagaagaaggactgggtagtgttcaaggaaccgcacataagggattccaacaaggaactgtacaaacctgacctgatatttgtgaaggatgggcgtgcacttgtcgtggatgtgacagtacggtatgaagcagccaaatcatcgctggaggaagccgctgcagagaaagtgagaaagtacaaacacctggaaacggaagtaagacatctcacgaatgcaaaggacgttacttttgtgggctttcccctaggagcgcgggggaaatggcaccaagataactttaaacttttgactgagcttggcctctccaaatcgaggcaagtgaaaatggcagagactttttccacagtagcgctcttttcatctgtggacattgtacatatgtttgccagtagggccagaaaatctatggttatgtgataataggctgccttctgcggggcttgccttctggccatgcccttcttctctcccttgcacctgtacctcttggtctttgaataaagcctgagtaggaaggaccggtaaaaaaaaaaaaaaaaaaaaaaaaaaaaaaacgttgactaaaaaaaaaaaaaaaaaaaaaaaaaaaaaaaaaaaaaaaaaaaaaaaaaaaaaaaaaaaaaaaaaaaaaa

SEQ ID NO: 11152 - DNA, 5264 bp, synthetic construct
  source 1..5264: mol_type = other DNA
gaaataagagagaaaagaagagtaagaagaaatataagagaattcgccaccatggcccctaagaaaaagcggaaggtgaatatcagcggctctagctgcggcagccccaacagcgccgacaccagcagcgacttcaaggacctgtggaccaagctgaaggaatgccacgaccgggaagtgcagggactccaggtgaaggtcaccaaactcaagcaagaaagaatcctggacgcccagagactggaagaattcttcaccaagaaccagcagctgagagagcagcagaaagtgctgcacgagacaatcaaggttctggaagatagactgcgggccggcctgtgcgacagatgcgccgtgaccgaggaacacatgcgcaaaaagcagcaggagttcgagaacattagacagcaaaatctgaaattgatcacagagctgatgaacgagagaaacacactgcaggaggagaacaagaagctgagcgagcagctgcaacagaagatcgagaatgatcagcaacaccaggccgctgagctggaatgtgaagaggacgtgatccccgacagcccaatcacagctttcagcttttctggcgtgaacagactgaggcggaaggaaaacccccacgtgcggtacatcgagcagacccataccaagctggaacacagcgtgtgtgccaacgagatgagaaaggtgtccaagtcctccacccatccccagcacaaccctaacgaaaatgagatcctggtggctgatacctacgaccagtctcagagccctatggccaaggcccacggcaccagctcttatacccctgataagagctccttcaacctggccaccgtggtggccgagacactgggcctgggcgtgcaggaggaaagcgagacacagggcccaatgagccctctgggagatgagctgtaccactgcctggaaggcaaccacaagaaacagccttttgagtccggctccgagactcctggaacaagcgagagcgctacacctgagggcagccctaagagaaaggtgtccagcgccgagggcgctgccaaggaagagcctaaacggagaagcgccagactgagcgccaagccccccgccaaggtggaagccaagcctaagaaggccgccgctaaggacaagagcagcgataagaaagtccagaccaagggcaagcggggcgccaaaggcaaacaggccgaggtggccaaccaggagacaaaggaagatctgcctgctgagaacggcgaaaccaagaccgaggaatctccagcttctgacgaggccggagagaaggaggccaaaagcgacagcggctctgagacacctggaacaagcgagagcgccaccccggaatcctatgaacaacttgcaccacaaccgtgtgtgggagaaactttacattctagcctcccacgagacagtgaactgtttgtgcctgaagaggggagcagcgagaaggagagcgaggacgcgccaaaaacatctcctccgacgcctgggaaacatggtttggaacagactggggaggaaaaagtgatggtgactgttcctgacaaaaatccaccttgtccttgctgtggtacccgggtaaactctgtgttgaatctgattgaacatctgaaagtgtcacacgggaaaaggggggtttgttttcggtgtgcaaaatgtggaaaggaaaatagtaactatcacagtgttgtttgtcattttaagaaatgcaggggtccagagacggagaaagccccagctggggagtggatttgtgaggtatgcaacagagattttacaaccaaaattggcctgggacaacacaagagattggcacacccagcagtgagaaatcaggaaaggatcgttgcttcccaaccgaaagaaacatcaaatagaggtgctcacaaaaggtgctggacaaaggaggaggaagaattactaataagactggaggctcagttcgagggaaacaaaaatattaataagcttattgcagaacacataaccaccaaaacagctaagcagatcagtgacaaaaggcgattgctgtccagaaagccagcagaggagccacgtgaggagcctggaacgtgtcatcacaccaggagagcagctgcgagcctgagaacggagcctgagatgagtcatcacgcccaggcagaggacagagataatggacctgggagacgccctctgccaggcagggcagctgccggagggagaacaatggacgagataagacgccaccctgataagggcaacggacagcagagacccaccaagcaaaaatcagaagaacagctgcaggcttactataaaaagacactagaggaacgactttcagctggggcacttaacaccttcccccgagcattcaagcaggtaatggaaggccgggatataaagctagtaatcaatcagacagcgcaggactgcttcggatgcctggaatccataagccaaataagaacggcaacccgagataaaaaggacacggtgacccgggagaaacacccaaagaaaccttttcagaagtggatgaagaagagagcaatcaaaaaaggtaattatcttcggttccagcgtttattttatcttgatagagggaaactggctaaaatcattttagatgatattgaatgcttgtcttgtgacataccactcagtgaaatttattcggtttttaaaacaagatgggaaacaactggtagctttaaaagccttggggactttaaaacttacgggaaggctgacaacactgccttcagagaattaattacggctaaagaaattgagaaaaatgtgcaggaaatgagcaaaggctcggctcccggtccagacgggattactcttggggacgtcgtaaagatggatcccgagttttcccggaccatggagattttcaatttatggttaacaactggtaaaatcccggacatggtgagggggtgcagaaccgttttgattccaaaatcatcaaagccggatcgtttgaaagacattaataactggagacctatcacgatcggttccatcttgctgagactgttctccaggattgtaacagctaggctgagcaaagcgtgccccctgaacccaaggcaaagaggctttatcagagcggcgggatgctctgaaaacttaaaactcctgcaaactataatttggtcggccaaaagagaacacagaccactgggtgttgtattcgtggacatcgccaaggcttttgacaccgtaagccaccagcacatcattcatgctttgcagcaaagagaggtggatccccacatcgtcggtctggtgagcaatatgtacgagaacatcagtacgtatatcaccacaaagaggaacacacacacagacaaaatccagatccgggttggagtaaagcagggtgacccgatgtcgccccttttatttaacctggcaatggaccctctattatgcaagctggaagagagtggcaaaggataccaccgaggacagagcagcatcacagcgatggcatttgcagacgatctggttttgctgagcgactcctgggaaaatatgaatacaaatattagcatactgagcgtgttctgcagcctgaccggactcaaaacacaggggcaaaagtgccacggcttttacatcaagccgacaaaggactcttacaccatcaatgactgcgctgcctggactatcaacggcacacccctgaacatgatcgaccccggcgaatctgagaaatacctcggcctgcagtttgacccgtggattggaatagcaaggtccggtctctccacaaaactagatttttggcttcagcggatcgatcaagcaccacttaaacctctgcagaaaactgatattctcaaaacatacaccatccctcggctgatctacatagctgaccactcagaagtgaaaagcgcactactcgaaacccttgaccagaagatccggacagcggtcaaggaatggcttcacctacctccgtgcacctgcgatgccatcctgtactcgagcacgagagacggcggtttgggcatcaccaaattggcaggactgatccccagcgtgcaggcccgtagactgcatcggatcgcacagtcatctgacgatacgatgaaatgcttcatggaaaaagagaaaatggaacagctgcataagaaattgtggattcaagctggaggggacagagagaacataccctcgatttgggaagcaccaccgtcgagtgaaccaccaaacaacgtgagcacaaattcggaatgggaagcaccgacccagaaagataaatttccaaagccttgcaattggaggaaaaacgaattcaaaaaatggaccaaattggcatcccaaggccgcggaattgtaaattttgaaagagacaaaattagtaaccattggatccaatactacagacgcatacctcacaggaaactcctcactgcactacaactcagggccaacgtttaccccacgagagaatttctagccaggggtagacaagaccaatacatcaaggcgtgtaggcactgcgatgcggacaacgaatcctgcgcccacatcatcggcaactgcccagtgacacaggacgcccgaatcaagaggcacaattacatctgcgaactgcttctcgaggaggcgaagaagaaggactgggtagtgttcaaggaaccgcacataagggattccaacaaggaactgtacaaacctgacctgatatttgtgaaggatgggcgtgcacttgtcgtggatgtgacagtacggtatgaagcagccaaatcatcgctggaggaagccgctgcagagaaagtgagaaagtacaaacacctggaaacggaagtaagacatctcacgaatgcaaaggacgttacttttgtgggctttcccctaggagcgcgggggaaatggcaccaagataactttaaacttttgactgagcttggcctctccaaatcgaggcaagtgaaaatggcagagactttttccacagtagcgctcttttcatctgtggacattgtacatatgtttgccagtagggccagaaaatctatggttatgtgataataggctgccttctgcggggcttgccttctggccatgcccttcttctctcccttgcacctgtacctcttggtctttgaataaagcctgagtaggaaggaccggtaaaaaaaaaaaaaaaaaaaaaaaaaaaaaaacgttgactaaaaaaaaaaaaaaaaaaaaaaaaaaaaaaaaaaaaaaaaaaaaaaaaaaaaaaaaaaaaaaaaaaaaaa

SEQ ID NO: 11153 - DNA, 5264 bp, synthetic construct
  source 1..5264: mol_type = other DNA
gaaataagagagaaaagaagagtaagaagaaatataagagaattcgccaccatggcccctaagaaaaagcggaaggtgaatatcagcggctctagctgcggcagccccaacagcgccgacaccagcagcgacttcaaggacctgtggaccaagctgaaggaatgccacgaccgggaagtgcagggactccaggtgaaggtcaccaaactcaagcaagaaagaatcctggacgcccagagactggaagaattcttcaccaagaaccagcagctgagagagcagcagaaagtgctgcacgagacaatcaaggttctggaagatagactgcgggccggcctgtgcgacagatgcgccgtgaccgaggaacacatgcgcaaaaagcagcaggagttcgagaacattagacagcaaaatctgaaattgatcacagagctgatgaacgagagaaacacactgcaggaggagaacaagaagctgagcgagcagctgcaacagaagatcgagaatgatcagcaacaccaggccgctgagctggaatgtgaagaggacgtgatccccgacagcccaatcacagctttcagcttttctggcgtgaacagactgaggcggaaggaaaacccccacgtgcggtacatcgagcagacccataccaagctggaacacagcgtgtgtgccaacgagatgagaaaggtgtccaagtcctccacccatccccagcacaaccctaacgaaaatgagatcctggtggctgatacctacgaccagtctcagagccctatggccaaggcccacggcaccagctcttatacccctgataagagctccttcaacctggccaccgtggtggccgagacactgggcctgggcgtgcaggaggaaagcgagacacagggcccaatgagccctctgggagatgagctgtaccactgcctggaaggcaaccacaagaaacagccttttgagtccggctccgagactcctggaacaagcgagagcgctacacctgagggcagccctaagagaaaggtgtccagcgccgagggcgctgccaaggaagagcctaaacggagaagcgccagactgagcgccaagccccccgccaaggtggaagccaagcctaagaaggccgccgctaaggacaagagcagcgataagaaagtccagaccaagggcaagcggggcgccaaaggcaaacaggccgaggtggccaaccaggagacaaaggaagatctgcctgctgagaacggcgaaaccaagaccgaggaatctccagcttctgacgaggccggagagaaggaggccaaaagcgacagcggctctgagacacctggaacaagcgagagcgccaccccggaatcctatgaacaacttgcaccacaaccgtgtgtgggagaaactttacattctagcctcccacgagacagtgaactgtttgtgcctgaagaggggagcagcgagaaggagagcgaggacgcgccaaaaacatctcctccgacgcctgggaaacatggtttggaacagactggggaggaaaaagtgatggtgactgttcctgacaaaaatccaccttgtccttgctgtggtacccgggtaaactctgtgttgaatctgattgaacatctgaaagtgtcacacgggaaaaggggggtttgttttcggtgtgcaaaatgtggaaaggaaaatagtaactatcacagtgttgtttgtcattttaagaaatgcaggggtccagagacggagaaagccccagctggggagtggatttgtgaggtatgcaacagagattttacaaccaaaattggcctgggacaacacaagagattggcacacccagcagtgagaaatcaggaaaggatcgttgcttcccaaccgaaagaaacatcaaatagaggtgctcacaaaaggtgctggacaaaggaggaggaagaattactaataagactggaggctcagttcgagggaaacaaaaatattaataagcttattgcagaacacataaccaccaaaacagctaagcagatcagtgacaaaaggcgattgctgtccagaaagccagcagaggagccacgtgaggagcctggaacgtgtcatcacaccaggagagcagctgcgagcctgagaacggagcctgagatgagtcatcacgcccaggcagaggacagagataatggacctgggagacgccctctgccaggcagggcagctgccggagggagaacaatggacgagataagacgccaccctgataagggcaacggacagcagagacccaccaagcaaaaatcagaagaacagctgcaggcttactataaaaagacactagaggaacgactttcagctggggcacttaacaccttcccccgagcattcaagcaggtaatggaaggccgggatataaagctagtaatcaatcagacagcgcaggactgcttcggatgcctggaatccataagccaaataagaacggcaacccgagataaaaaggacacggtgacccgggagaaacacccaaagaaaccttttcagaagtggatgaagaagagagcaatcaaaaaaggtaattatcttcggttccagcgtttattttatcttgatagagggaaactggctaaaatcattttagatgatattgaatgcttgtcttgtgacataccactcagtgaaatttattcggtttttaaaacaagatgggaaacaactggtagctttaaaagccttggggactttaaaacttacgggaaggctgacaacactgccttcagagaattaattacggctaaagaaattgagaaaaatgtgcaggaaatgagcaaaggctcggctcccggtccagacgggattactcttggggacgtcgtaaagatggatcccgagttttcccggaccatggagattttcaatttatggttaacaactggtaaaatcccggacatggtgagggggtgcagaaccgttttgattccaaaatcatcaaagccggatcgtttgaaagacattaataactggagacctatcacgatcggttccatcttgctgagactgttctccaggattgtaacagctaggctgagcaaagcgtgccccctgaacccaaggcaaagaggctttatcagagcggcgggatgctctgaaaacttaaaactcctgcaaactataatttggtcggccaaaagagaacacagaccactgggtgttgtattcgtggacatcgccaaggcttttgacaccgtaagccaccagcacatcattcatgctttgcagcaaagagaggtggatccccacatcgtcggtctggtgagcaatatgtacgagaacatcagtacgtatatcaccacaaagaggaacacacacacagacaaaatccagatccgggttggagtaaagcagggtgacccgatgtcgccccttttatttaacctggcaatggaccctctattatgcaagctggaagagagtggcaaaggataccaccgaggacagagcagcatcacagcgatggcatttgcagacgatctggttttgctgagcgactcctgggaaaatatgaatacaaatattagcatactggccgccttctgcgccctgaccggactcaaaacacaggggcaaaagtgccacggcttttacatcaagccgacaaaggactcttacaccatcaatgactgcgctgcctggactatcaacggcacacccctgaacatgatcgaccccggcgaatctgagaaatacctcggcctgcagtttgacccgtggattggaatagcaaggtccggtctctccacaaaactagatttttggcttcagcggatcgatcaagcaccacttaaacctctgcagaaaactgatattctcaaaacatacaccatccctcggctgatctacatagctgaccactcagaagtgaaaagcgcactactcgaaacccttgaccagaagatccggacagcggtcaaggaatggcttcacctacctccgtgcacctgcgatgccatcctgtactcgagcacgagagacggcggtttgggcatcaccaaattggcaggactgatccccagcgtgcaggcccgtagactgcatcggatcgcacagtcatctgacgatacgatgaaatgcttcatggaaaaagagaaaatggaacagctgcataagaaattgtggattcaagctggaggggacagagagaacataccctcgatttgggaagcaccaccgtcgagtgaaccaccaaacaacgtgagcacaaattcggaatgggaagcaccgacccagaaagataaatttccaaagccttgcaattggaggaaaaacgaattcaaaaaatggaccaaattggcatcccaaggccgcggaattgtaaattttgaaagagacaaaattagtaaccattggatccaatactacagacgcatacctcacaggaaactcctcactgcactacaactcagggccaacgtttaccccacgagagaatttctagccaggggtagacaagaccaatacatcaaggcgtgtaggcactgcgatgcggacaacgaatcctgcgcccacatcatcggcaactgcccagtgacacaggacgcccgaatcaagaggcacaattacatctgcgaactgcttctcgaggaggcgaagaagaaggactgggtagtgttcaaggaaccgcacataagggattccaacaaggaactgtacaaacctgacctgatatttgtgaaggatgggcgtgcacttgtcgtggatgtgacagtacggtatgaagcagccaaatcatcgctggaggaagccgctgcagagaaagtgagaaagtacaaacacctggaaacggaagtaagacatctcacgaatgcaaaggacgttacttttgtgggctttcccctaggagcgcgggggaaatggcaccaagataactttaaacttttgactgagcttggcctctccaaatcgaggcaagtgaaaatggcagagactttttccacagtagcgctcttttcatctgtggacattgtacatatgtttgccagtagggccagaaaatctatggttatgtgataataggctgccttctgcggggcttgccttctggccatgcccttcttctctcccttgcacctgtacctcttggtctttgaataaagcctgagtaggaaggaccggtaaaaaaaaaaaaaaaaaaaaaaaaaaaaaaacgttgactaaaaaaaaaaaaaaaaaaaaaaaaaaaaaaaaaaaaaaaaaaaaaaaaaaaaaaaaaaaaaaaaaaaaaa

SEQ ID NO: 11154 - DNA, 5264 bp, synthetic construct
  source 1..5264: mol_type = other DNA
gaaataagagagaaaagaagagtaagaagaaatataagagaattcgccaccatggcccctaagaaaaagcggaaggtgaatatcagcggctctagctgcggcagccccaacagcgccgacaccagcagcgacttcaaggacctgtggaccaagctgaaggaatgccacgaccgggaagtgcagggactccaggtgaaggtcaccaaactcaagcaagaaagaatcctggacgcccagagactggaagaattcttcaccaagaaccagcagctgagagagcagcagaaagtgctgcacgagacaatcaaggttctggaagatagactgcgggccggcctgtgcgacagatgcgccgtgaccgaggaacacatgcgcaaaaagcagcaggagttcgagaacattagacagcaaaatctgaaattgatcacagagctgatgaacgagagaaacacactgcaggaggagaacaagaagctgagcgagcagctgcaacagaagatcgagaatgatcagcaacaccaggccgctgagctggaatgtgaagaggacgtgatccccgacagcccaatcacagctttcagcttttctggcgtgaacagactgaggcggaaggaaaacccccacgtgcggtacatcgagcagacccataccaagctggaacacagcgtgtgtgccaacgagatgagaaaggtgtccaagtcctccacccatccccagcacaaccctaacgaaaatgagatcctggtggctgatacctacgaccagtctcagagccctatggccaaggcccacggcaccagctcttatacccctgataagagctccttcaacctggccaccgtggtggccgagacactgggcctgggcgtgcaggaggaaagcgagacacagggcccaatgagccctctgggagatgagctgtaccactgcctggaaggcaaccacaagaaacagccttttgagtccggctccgagactcctggaacaagcgagagcgctacacctgagggcagccctaagagaaaggtgtccagcgccgagggcgctgccaaggaagagcctaaacggagaagcgccagactgagcgccaagccccccgccaaggtggaagccaagcctaagaaggccgccgctaaggacaagagcagcgataagaaagtccagaccaagggcaagcggggcgccaaaggcaaacaggccgaggtggccaaccaggagacaaaggaagatctgcctgctgagaacggcgaaaccaagaccgaggaatctccagcttctgacgaggccggagagaaggaggccaaaagcgacagcggctctgagacacctggaacaagcgagagcgccaccccggaatcctatgaacaacttgcaccacaaccgtgtgtgggagaaactttacattctagcctcccacgagacagtgaactgtttgtgcctgaagaggggagcagcgagaaggagagcgaggacgcgccaaaaacatctcctccgacgcctgggaaacatggtttggaacagactggggaggaaaaagtgatggtgactgttcctgacaaaaatccaccttgtccttgctgtggtacccgggtaaactctgtgttgaatctgattgaacatctgaaagtgtcacacgggaaaaggggggtttgttttcggtgtgcaaaatgtggaaaggaaaatagtaactatcacagtgttgtttgtcattttaagaaatgcaggggtccagagacggagaaagccccagctggggagtggatttgtgaggtatgcaacagagattttacaaccaaaattggcctgggacaacacaagagattggcacacccagcagtgagaaatcaggaaaggatcgttgcttcccaaccgaaagaaacatcaaatagaggtgctcacaaaaggtgctggacaaaggaggaggaagaattactaataagactggaggctcagttcgagggaaacaaaaatattaataagcttattgcagaacacataaccaccaaaacagctaagcagatcagtgacaaaaggcgattgctgtccagaaagccagcagaggagccacgtgaggagcctggaacgtgtcatcacaccaggagagcagctgcgagcctgagaacggagcctgagatgagtcatcacgcccaggcagaggacagagataatggacctgggagacgccctctgccaggcagggcagctgccggagggagaacaatggacgagataagacgccaccctgataagggcaacggacagcagagacccaccaagcaaaaatcagaagaacagctgcaggcttactataaaaagacactagaggaacgactttcagctggggcacttaacaccttcccccgagcattcaagcaggtaatggaaggccgggatataaagctagtaatcaatcagacagcgcaggactgcttcggatgcctggaatccataagccaaataagaacggcaacccgagataaaaaggacacggtgacccgggagaaacacccaaagaaaccttttcagaagtggatgaagaagagagcaatcaaaaaaggtaattatcttcggttccagcgtttattttatcttgatagagggaaactggctaaaatcattttagatgatattgaatgcttgtcttgtgacataccactcagtgaaatttattcggtttttaaaacaagatgggaaacaactggtagctttaaaagccttggggactttaaaacttacgggaaggctgacaacactgccttcagagaattaattacggctaaagaaattgagaaaaatgtgcaggaaatgagcaaaggctcggctcccggtccagacgggattactcttggggacgtcgtaaagatggatcccgagttttcccggaccatggagattttcaatttatggttaacaactggtaaaatcccggacatggtgagggggtgcagaaccgttttgattccaaaatcatcaaagccggatcgtttgaaagacattaataactggagacctatcacgatcggttccatcttgctgagactgttctccaggattgtaacagctaggctgagcaaagcgtgccccctgaacccaaggcaaagaggctttatcagagcggcgggatgctctgaaaacttaaaactcctgcaaactataatttggtcggccaaaagagaacacagaccactgggtgttgtattcgtggacatcgccaaggcttttgacaccgtaagccaccagcacatcattcatgctttgcagcaaagagaggtggatccccacatcgtcggtctggtgagcaatatgtacgagaacatcagtacgtatatcaccacaaagaggaacacacacacagacaaaatccagatccgggttggagtaaagcagggtgacccgatgtcgccccttttatttaacctggcaatggaccctctattatgcaagctggaagagagtggcaaaggataccaccgaggacagagcagcatcacagcgatggcatttgcagacgatctggttttgctgagcgactcctgggaaaatatgaatacaaatattagcatactggagaccttctgcaatctgaccggactcaaaacacaggggcaaaagtgccacggcttttacatcaagccgacaaaggactcttacaccatcaatgactgcgctgcctgggtgatcaaccccacacccctgaacatgatcgaccccggcgaatctgagaaatacctcggcctgcagtttgacccgtggattggaatagcaaggtccggtctctccacaaaactagatttttggcttcagcggatcgatcaagcaccacttaaacctctgcagaaaactgatattctcaaaacatacaccatccctcggctgatctacatagctgaccactcagaagtgaaaagcgcactactcgaaacccttgaccagaagatccggacagcggtcaaggaatggcttcacctacctccgtgcacctgcgatgccatcctgtactcgagcacgagagacggcggtttgggcatcaccaaattggcaggactgatccccagcgtgcaggcccgtagactgcatcggatcgcacagtcatctgacgatacgatgaaatgcttcatggaaaaagagaaaatggaacagctgcataagaaattgtggattcaagctggaggggacagagagaacataccctcgatttgggaagcaccaccgtcgagtgaaccaccaaacaacgtgagcacaaattcggaatgggaagcaccgacccagaaagataaatttccaaagccttgcaattggaggaaaaacgaattcaaaaaatggaccaaattggcatcccaaggccgcggaattgtaaattttgaaagagacaaaattagtaaccattggatccaatactacagacgcatacctcacaggaaactcctcactgcactacaactcagggccaacgtttaccccacgagagaatttctagccaggggtagacaagaccaatacatcaaggcgtgtaggcactgcgatgcggacaacgaatcctgcgcccacatcatcggcaactgcccagtgacacaggacgcccgaatcaagaggcacaattacatctgcgaactgcttctcgaggaggcgaagaagaaggactgggtagtgttcaaggaaccgcacataagggattccaacaaggaactgtacaaacctgacctgatatttgtgaaggatgggcgtgcacttgtcgtggatgtgacagtacggtatgaagcagccaaatcatcgctggaggaagccgctgcagagaaagtgagaaagtacaaacacctggaaacggaagtaagacatctcacgaatgcaaaggacgttacttttgtgggctttcccctaggagcgcgggggaaatggcaccaagataactttaaacttttgactgagcttggcctctccaaatcgaggcaagtgaaaatggcagagactttttccacagtagcgctcttttcatctgtggacattgtacatatgtttgccagtagggccagaaaatctatggttatgtgataataggctgccttctgcggggcttgccttctggccatgcccttcttctctcccttgcacctgtacctcttggtctttgaataaagcctgagtaggaaggaccggtaaaaaaaaaaaaaaaaaaaaaaaaaaaaaaacgttgactaaaaaaaaaaaaaaaaaaaaaaaaaaaaaaaaaaaaaaaaaaaaaaaaaaaaaaaaaaaaaaaaaaaaaa

SEQ ID NO: 11155 - DNA, 5264 bp, synthetic construct
  source 1..5264: mol_type = other DNA
gaaataagagagaaaagaagagtaagaagaaatataagagaattcgccaccatggcccctaagaaaaagcggaaggtgaatatcagcggctctagctgcggcagccccaacagcgccgacaccagcagcgacttcaaggacctgtggaccaagctgaaggaatgccacgaccgggaagtgcagggactccaggtgaaggtcaccaaactcaagcaagaaagaatcctggacgcccagagactggaagaattcttcaccaagaaccagcagctgagagagcagcagaaagtgctgcacgagacaatcaaggttctggaagatagactgcgggccggcctgtgcgacagatgcgccgtgaccgaggaacacatgcgcaaaaagcagcaggagttcgagaacattagacagcaaaatctgaaattgatcacagagctgatgaacgagagaaacacactgcaggaggagaacaagaagctgagcgagcagctgcaacagaagatcgagaatgatcagcaacaccaggccgctgagctggaatgtgaagaggacgtgatccccgacagcccaatcacagctttcagcttttctggcgtgaacagactgaggcggaaggaaaacccccacgtgcggtacatcgagcagacccataccaagctggaacacagcgtgtgtgccaacgagatgagaaaggtgtccaagtcctccacccatccccagcacaaccctaacgaaaatgagatcctggtggctgatacctacgaccagtctcagagccctatggccaaggcccacggcaccagctcttatacccctgataagagctccttcaacctggccaccgtggtggccgagacactgggcctgggcgtgcaggaggaaagcgagacacagggcccaatgagccctctgggagatgagctgtaccactgcctggaaggcaaccacaagaaacagccttttgagtccggctccgagactcctggaacaagcgagagcgctacacctgagggcagccctaagagaaaggtgtccagcgccgagggcgctgccaaggaagagcctaaacggagaagcgccagactgagcgccaagccccccgccaaggtggaagccaagcctaagaaggccgccgctaaggacaagagcagcgataagaaagtccagaccaagggcaagcggggcgccaaaggcaaacaggccgaggtggccaaccaggagacaaaggaagatctgcctgctgagaacggcgaaaccaagaccgaggaatctccagcttctgacgaggccggagagaaggaggccaaaagcgacagcggctctgagacacctggaacaagcgagagcgccaccccggaatcctatgaacaacttgcaccacaaccgtgtgtgggagaaactttacattctagcctcccacgagacagtgaactgtttgtgcctgaagaggggagcagcgagaaggagagcgaggacgcgccaaaaacatctcctccgacgcctgggaaacatggtttggaacagactggggaggaaaaagtgatggtgactgttcctgacaaaaatccaccttgtccttgctgtggtacccgggtaaactctgtgttgaatctgattgaacatctgaaagtgtcacacgggaaaaggggggtttgttttcggtgtgcaaaatgtggaaaggaaaatagtaactatcacagtgttgtttgtcattttaagaaatgcaggggtccagagacggagaaagccccagctggggagtggatttgtgaggtatgcaacagagattttacaaccaaaattggcctgggacaacacaagagattggcacacccagcagtgagaaatcaggaaaggatcgttgcttcccaaccgaaagaaacatcaaatagaggtgctcacaaaaggtgctggacaaaggaggaggaagaattactaataagactggaggctcagttcgagggaaacaaaaatattaataagcttattgcagaacacataaccaccaaaacagctaagcagatcagtgacaaaaggcgattgctgtccagaaagccagcagaggagccacgtgaggagcctggaacgtgtcatcacaccaggagagcagctgcgagcctgagaacggagcctgagatgagtcatcacgcccaggcagaggacagagataatggacctgggagacgccctctgccaggcagggcagctgccggagggagaacaatggacgagataagacgccaccctgataagggcaacggacagcagagacccaccaagcaaaaatcagaagaacagctgcaggcttactataaaaagacactagaggaacgactttcagctggggcacttaacaccttcccccgagcattcaagcaggtaatggaaggccgggatataaagctagtaatcaatcagacagcgcaggactgcttcggatgcctggaatccataagccaaataagaacggcaacccgagataaaaaggacacggtgacccgggagaaacacccaaagaaaccttttcagaagtggatgaagaagagagcaatcaaaaaaggtaattatcttcggttccagcgtttattttatcttgatagagggaaactggctaaaatcattttagatgatattgaatgcttgtcttgtgacataccactcagtgaaatttattcggtttttaaaacaagatgggaaacaactggtagctttaaaagccttggggactttaaaacttacgggaaggctgacaacactgccttcagagaattaattacggctaaagaaattgagaaaaatgtgcaggaaatgagcaaaggctcggctcccggtccagacgggattactcttggggacgtcgtaaagatggatcccgagttttcccggaccatggagattttcaatttatggttaacaactggtaaaatcccggacatggtgagggggtgcagaaccgttttgattccaaaatcatcaaagccggatcgtttgaaagacattaataactggagacctatcacgatcggttccatcttgctgagactgttctccaggattgtaacagctaggctgagcaaagcgtgccccctgaacccaaggcaaagaggctttatcagagcggcgggatgctctgaaaacttaaaactcctgcaaactataatttggtcggccaaaagagaacacagaccactgggtgttgtattcgtggacatcgccaaggcttttgacaccgtaagccaccagcacatcattcatgctttgcagcaaagagaggtggatccccacatcgtcggtctggtgagcaatatgtacgagaacatcagtacgtatatcaccacaaagaggaacacacacacagacaaaatccagatccgggttggagtaaagcagggtgacccgatgtcgccccttttatttaacctggcaatggaccctctattatgcaagctggaagagagtggcaaaggataccaccgaggacagagcagcatcacagcgatggcatttgcagacgatctggttttgctgagcgactcctgggaaaatatgaatacaaatattagcatactggagaccttctgcaatctgaccggactcaaaacacaggggcaaaagtgccacggcttttacatcaagccgacaaaggactcttacaccatcaatgactgcgctgcctgggccatcaacgccacacccctgaacatgatcgaccccggcgaatctgagaaatacctcggcctgcagtttgacccgtggattggaatagcaaggtccggtctctccacaaaactagatttttggcttcagcggatcgatcaagcaccacttaaacctctgcagaaaactgatattctcaaaacatacaccatccctcggctgatctacatagctgaccactcagaagtgaaaagcgcactactcgaaacccttgaccagaagatccggacagcggtcaaggaatggcttcacctacctccgtgcacctgcgatgccatcctgtactcgagcacgagagacggcggtttgggcatcaccaaattggcaggactgatccccagcgtgcaggcccgtagactgcatcggatcgcacagtcatctgacgatacgatgaaatgcttcatggaaaaagagaaaatggaacagctgcataagaaattgtggattcaagctggaggggacagagagaacataccctcgatttgggaagcaccaccgtcgagtgaaccaccaaacaacgtgagcacaaattcggaatgggaagcaccgacccagaaagataaatttccaaagccttgcaattggaggaaaaacgaattcaaaaaatggaccaaattggcatcccaaggccgcggaattgtaaattttgaaagagacaaaattagtaaccattggatccaatactacagacgcatacctcacaggaaactcctcactgcactacaactcagggccaacgtttaccccacgagagaatttctagccaggggtagacaagaccaatacatcaaggcgtgtaggcactgcgatgcggacaacgaatcctgcgcccacatcatcggcaactgcccagtgacacaggacgcccgaatcaagaggcacaattacatctgcgaactgcttctcgaggaggcgaagaagaaggactgggtagtgttcaaggaaccgcacataagggattccaacaaggaactgtacaaacctgacctgatatttgtgaaggatgggcgtgcacttgtcgtggatgtgacagtacggtatgaagcagccaaatcatcgctggaggaagccgctgcagagaaagtgagaaagtacaaacacctggaaacggaagtaagacatctcacgaatgcaaaggacgttacttttgtgggctttcccctaggagcgcgggggaaatggcaccaagataactttaaacttttgactgagcttggcctctccaaatcgaggcaagtgaaaatggcagagactttttccacagtagcgctcttttcatctgtggacattgtacatatgtttgccagtagggccagaaaatctatggttatgtgataataggctgccttctgcggggcttgccttctggccatgcccttcttctctcccttgcacctgtacctcttggtctttgaataaagcctgagtaggaaggaccggtaaaaaaaaaaaaaaaaaaaaaaaaaaaaaaacgttgactaaaaaaaaaaaaaaaaaaaaaaaaaaaaaaaaaaaaaaaaaaaaaaaaaaaaaaaaaaaaaaaaaaaaaa

SEQ ID NO: 11156 - DNA, 5264 bp, synthetic construct
  source 1..5264: mol_type = other DNA
gaaataagagagaaaagaagagtaagaagaaatataagagaattcgccaccatggcccctaagaaaaagcggaaggtgaatatcagcggctctagctgcggcagccccaacagcgccgacaccagcagcgacttcaaggacctgtggaccaagctgaaggaatgccacgaccgggaagtgcagggactccaggtgaaggtcaccaaactcaagcaagaaagaatcctggacgcccagagactggaagaattcttcaccaagaaccagcagctgagagagcagcagaaagtgctgcacgagacaatcaaggttctggaagatagactgcgggccggcctgtgcgacagatgcgccgtgaccgaggaacacatgcgcaaaaagcagcaggagttcgagaacattagacagcaaaatctgaaattgatcacagagctgatgaacgagagaaacacactgcaggaggagaacaagaagctgagcgagcagctgcaacagaagatcgagaatgatcagcaacaccaggccgctgagctggaatgtgaagaggacgtgatccccgacagcccaatcacagctttcagcttttctggcgtgaacagactgaggcggaaggaaaacccccacgtgcggtacatcgagcagacccataccaagctggaacacagcgtgtgtgccaacgagatgagaaaggtgtccaagtcctccacccatccccagcacaaccctaacgaaaatgagatcctggtggctgatacctacgaccagtctcagagccctatggccaaggcccacggcaccagctcttatacccctgataagagctccttcaacctggccaccgtggtggccgagacactgggcctgggcgtgcaggaggaaagcgagacacagggcccaatgagccctctgggagatgagctgtaccactgcctggaaggcaaccacaagaaacagccttttgagtccggctccgagactcctggaacaagcgagagcgctacacctgagggcagccctaagagaaaggtgtccagcgccgagggcgctgccaaggaagagcctaaacggagaagcgccagactgagcgccaagccccccgccaaggtggaagccaagcctaagaaggccgccgctaaggacaagagcagcgataagaaagtccagaccaagggcaagcggggcgccaaaggcaaacaggccgaggtggccaaccaggagacaaaggaagatctgcctgctgagaacggcgaaaccaagaccgaggaatctccagcttctgacgaggccggagagaaggaggccaaaagcgacagcggctctgagacacctggaacaagcgagagcgccaccccggaatcctatgaacaacttgcaccacaaccgtgtgtgggagaaactttacattctagcctcccacgagacagtgaactgtttgtgcctgaagaggggagcagcgagaaggagagcgaggacgcgccaaaaacatctcctccgacgcctgggaaacatggtttggaacagactggggaggaaaaagtgatggtgactgttcctgacaaaaatccaccttgtccttgctgtggtacccgggtaaactctgtgttgaatctgattgaacatctgaaagtgtcacacgggaaaaggggggtttgttttcggtgtgcaaaatgtggaaaggaaaatagtaactatcacagtgttgtttgtcattttaagaaatgcaggggtccagagacggagaaagccccagctggggagtggatttgtgaggtatgcaacagagattttacaaccaaaattggcctgggacaacacaagagattggcacacccagcagtgagaaatcaggaaaggatcgttgcttcccaaccgaaagaaacatcaaatagaggtgctcacaaaaggtgctggacaaaggaggaggaagaattactaataagactggaggctcagttcgagggaaacaaaaatattaataagcttattgcagaacacataaccaccaaaacagctaagcagatcagtgacaaaaggcgattgctgtccagaaagccagcagaggagccacgtgaggagcctggaacgtgtcatcacaccaggagagcagctgcgagcctgagaacggagcctgagatgagtcatcacgcccaggcagaggacagagataatggacctgggagacgccctctgccaggcagggcagctgccggagggagaacaatggacgagataagacgccaccctgataagggcaacggacagcagagacccaccaagcaaaaatcagaagaacagctgcaggcttactataaaaagacactagaggaacgactttcagctggggcacttaacaccttcccccgagcattcaagcaggtaatggaaggccgggatataaagctagtaatcaatcagacagcgcaggactgcttcggatgcctggaatccataagccaaataagaacggcaacccgagataaaaaggacacggtgacccgggagaaacacccaaagaaaccttttcagaagtggatgaagaagagagcaatcaaaaaaggtaattatcttcggttccagcgtttattttatcttgatagagggaaactggctaaaatcattttagatgatattgaatgcttgtcttgtgacataccactcagtgaaatttattcggtttttaaaacaagatgggaaacaactggtagctttaaaagccttggggactttaaaacttacgggaaggctgacaacactgccttcagagaattaattacggctaaagaaattgagaaaaatgtgcaggaaatgagcaaaggctcggctcccggtccagacgggattactcttggggacgtcgtaaagatggatcccgagttttcccggaccatggagattttcaatttatggttaacaactggtaaaatcccggacatggtgagggggtgcagaaccgttttgattccaaaatcatcaaagccggatcgtttgaaagacattaataactggagacctatcacgatcggttccatcttgctgagactgttctccaggattgtaacagctaggctgagcaaagcgtgccccctgaacccaaggcaaagaggctttatcagagcggcgggatgctctgaaaacttaaaactcctgcaaactataatttggtcggccaaaagagaacacagaccactgggtgttgtattcgtggacatcgccaaggcttttgacaccgtaagccaccagcacatcattcatgctttgcagcaaagagaggtggatccccacatcgtcggtctggtgagcaatatgtacgagaacatcagtacgtatatcaccacaaagaggaacacacacacagacaaaatccagatccgggttggagtaaagcagggtgacccgatgtcgccccttttatttaacctggcaatggaccctctattatgcaagctggaagagagtggcaaaggataccaccgaggacagagcagcatcacagcgatggcatttgcagacgatctggttttgctgagcgactcctgggaaaatatgaatacaaatattagcatactggagaccttctgcaatctgaccggactcaaaacacaggggcaaaagtgccacggcttttacatcaagccgacaaaggactcttacaccatcaatgactgcgctgcctggactatcaacggcacacccctgaacatgatcgaccccggcgaatctgagaaatacctcggcctgcagtttgacccgtggattggaatagcaaggtccggtctctccacaaaactagatttttggcttcagcggatcgatcaagcaccacttaaacctctgcagaaaactgatattctcaaaacatacaccatccctcggctgatctacatagctgaccactcagaagtgaaaagcgcactactcgaaacccttgaccagaagatccggacagcggtcaaggaatggcttcacctacctccgtgcacctgcgatgccatcctgtactcgagcacgagagacggcggtttgggcatcaccaaattggcaggactgatccccagcgtgcaggcccgtagactgcatcggatcgcacagtcatctgacgatacgatgaaatgcttcatggaaaaagagaaaatggaacagctgcataagaaattgtggattcaagctggaggggacagagagaacataccctcgatttgggaagcaccaccgtcgagtgaaccaccaaacaacgtgagcacaaattcggaatgggaagcaccgacccagaaagataaatttccaaagccttgcaattggaggaaaaacgaattcaaaaaatggaccaaattggcatcccaaggccgcggaattgtaaattttgaaagagacaaaattagtaaccattggatccaatactacagacgcatacctcacaggaaactcctcactgcactacaactcagggccaacgtttaccccacgagagaatttctagccaggggtagacaagaccaatacatcaaggcgtgtaggcactgcgatgcggacaacgaatcctgcgcccacatcatcggcaactgcccagtgacacaggacgcccgaatcaagaggcacaattacatctgcgaactgcttctcgaggaggcggacaagaagaaaggcgtagtgttcaaggaaccgcacataagggattccaacaaggaactgtacaaacctgacctgatatttgtgaaggatgggcgtgcacttgtcgtggatgtgacagtacggtatgaagcagccaaatcatcgctggaggaagccgctgcagagaaagtgagaaagtacaaacacctggaaacggaagtaagacatctcacgaatgcaaaggacgttacttttgtgggctttcccctaggagcgcgggggaaatggcaccaagataactttaaacttttgactgagcttggcctctccaaatcgaggcaagtgaaaatggcagagactttttccacagtagcgctcttttcatctgtggacattgtacatatgtttgccagtagggccagaaaatctatggttatgtgataataggctgccttctgcggggcttgccttctggccatgcccttcttctctcccttgcacctgtacctcttggtctttgaataaagcctgagtaggaaggaccggtaaaaaaaaaaaaaaaaaaaaaaaaaaaaaaacgttgactaaaaaaaaaaaaaaaaaaaaaaaaaaaaaaaaaaaaaaaaaaaaaaaaaaaaaaaaaaaaaaaaaaaaaa

SEQ ID NO: 11157 - DNA, 5264 bp, synthetic construct
  source 1..5264: mol_type = other DNA
gaaataagagagaaaagaagagtaagaagaaatataagagaattcgccaccatggcccctaagaaaaagcggaaggtgaatatcagcggctctagctgcggcagccccaacagcgccgacaccagcagcgacttcaaggacctgtggaccaagctgaaggaatgccacgaccgggaagtgcagggactccaggtgaaggtcaccaaactcaagcaagaaagaatcctggacgcccagagactggaagaattcttcaccaagaaccagcagctgagagagcagcagaaagtgctgcacgagacaatcaaggttctggaagatagactgcgggccggcctgtgcgacagatgcgccgtgaccgaggaacacatgcgcaaaaagcagcaggagttcgagaacattagacagcaaaatctgaaattgatcacagagctgatgaacgagagaaacacactgcaggaggagaacaagaagctgagcgagcagctgcaacagaagatcgagaatgatcagcaacaccaggccgctgagctggaatgtgaagaggacgtgatccccgacagcccaatcacagctttcagcttttctggcgtgaacagactgaggcggaaggaaaacccccacgtgcggtacatcgagcagacccataccaagctggaacacagcgtgtgtgccaacgagatgagaaaggtgtccaagtcctccacccatccccagcacaaccctaacgaaaatgagatcctggtggctgatacctacgaccagtctcagagccctatggccaaggcccacggcaccagctcttatacccctgataagagctccttcaacctggccaccgtggtggccgagacactgggcctgggcgtgcaggaggaaagcgagacacagggcccaatgagccctctgggagatgagctgtaccactgcctggaaggcaaccacaagaaacagccttttgagtccggctccgagactcctggaacaagcgagagcgctacacctgagggcagccctaagagaaaggtgtccagcgccgagggcgctgccaaggaagagcctaaacggagaagcgccagactgagcgccaagccccccgccaaggtggaagccaagcctaagaaggccgccgctaaggacaagagcagcgataagaaagtccagaccaagggcaagcggggcgccaaaggcaaacaggccgaggtggccaaccaggagacaaaggaagatctgcctgctgagaacggcgaaaccaagaccgaggaatctccagcttctgacgaggccggagagaaggaggccaaaagcgacagcggctctgagacacctggaacaagcgagagcgccaccccggaatcctatgaacaacttgcaccacaaccgtgtgtgggagaaactttacattctagcctcccacgagacagtgaactgtttgtgcctgaagaggggagcagcgagaaggagagcgaggacgcgccaaaaacatctcctccgacgcctgggaaacatggtttggaacagactggggaggaaaaagtgatggtgactgttcctgacaaaaatccaccttgtccttgctgtggtacccgggtaaactctgtgttgaatctgattgaacatctgaaagtgtcacacgggaaaaggggggtttgttttcggtgtgcaaaatgtggaaaggaaaatagtaactatcacagtgttgtttgtcattttaagaaatgcaggggtccagagacggagaaagccccagctggggagtggatttgtgaggtatgcaacagagattttacaaccaaaattggcctgggacaacacaagagattggcacacccagcagtgagaaatcaggaaaggatcgttgcttcccaaccgaaagaaacatcaaatagaggtgctcacaaaaggtgctggacaaaggaggaggaagaattactaataagactggaggctcagttcgagggaaacaaaaatattaataagcttattgcagaacacataaccaccaaaacagctaagcagatcagtgacaaaaggcgattgctgtccagaaagccagcagaggagccacgtgaggagcctggaacgtgtcatcacaccaggagagcagctgcgagcctgagaacggagcctgagatgagtcatcacgcccaggcagaggacagagataatggacctgggagacgccctctgccaggcagggcagctgccggagggagaacaatggacgagataagacgccaccctgataagggcaacggacagcagagacccaccaagcaaaaatcagaagaacagctgcaggcttactataaaaagacactagaggaacgactttcagctggggcacttaacaccttcccccgagcattcaagcaggtaatggaaggccgggatataaagctagtaatcaatcagacagcgcaggactgcttcggatgcctggaatccataagccaaataagaacggcaacccgagataaaaaggacacggtgacccgggagaaacacccaaagaaaccttttcagaagtggatgaagaagagagcaatcaaaaaaggtaattatcttcggttccagcgtttattttatcttgatagagggaaactggctaaaatcattttagatgatattgaatgcttgtcttgtgacataccactcagtgaaatttattcggtttttaaaacaagatgggaaacaactggtagctttaaaagccttggggactttaaaacttacgggaaggctgacaacactgccttcagagaattaattacggctaaagaaattgagaaaaatgtgcaggaaatgagcaaaggctcggctcccggtccagacgggattactcttggggacgtcgtaaagatggatcccgagttttcccggaccatggagattttcaatttatggttaacaactggtaaaatcccggacatggtgagggggtgcagaaccgttttgattccaaaatcatcaaagccggatcgtttgaaagacattaataactggagacctatcacgatcggttccatcttgctgagactgttctccaggattgtaacagctaggctgagcaaagcgtgccccctgaacccaaggcaaagaggctttatcagagcggcgggatgctctgaaaacttaaaactcctgcaaactataatttggtcggccaaaagagaacacagaccactgggtgttgtattcgtggacatcgccaaggcttttgacaccgtaagccaccagcacatcattcatgctttgcagcaaagagaggtggatccccacatcgtcggtctggtgagcaatatgtacgagaacatcagtacgtatatcaccacaaagaggaacacacacacagacaaaatccagatccgggttggagtaaagcagggtgacccgatgtcgccccttttatttaacctggcaatggaccctctattatgcaagctggaagagagtggcaaaggataccaccgaggacagagcagcatcacagcgatggcatttgcagacgatctggttttgctgagcgactcctgggaaaatatgaatacaaatattagcatactggagaccttctgcaatctgaccggactcaaaacacaggggcaaaagtgccacggcttttacatcaagccgacaaaggactcttacaccatcaatgactgcgctgcctggactatcaacggcacacccctgaacatgatcgaccccggcgaatctgagaaatacctcggcctgcagtttgacccgtggattggaatagcaaggtccggtctctccacaaaactagatttttggcttcagcggatcgatcaagcaccacttaaacctctgcagaaaactgatattctcaaaacatacaccatccctcggctgatctacatagctgaccactcagaagtgaaaagcgcactactcgaaacccttgaccagaagatccggacagcggtcaaggaatggcttcacctacctccgtgcacctgcgatgccatcctgtactcgagcacgagagacggcggtttgggcatcaccaaattggcaggactgatccccagcgtgcaggcccgtagactgcatcggatcgcacagtcatctgacgatacgatgaaatgcttcatggaaaaagagaaaatggaacagctgcataagaaattgtggattcaagctggaggggacagagagaacataccctcgatttgggaagcaccaccgtcgagtgaaccaccaaacaacgtgagcacaaattcggaatgggaagcaccgacccagaaagataaatttccaaagccttgcaattggaggaaaaacgaattcaaaaaatggaccaaattggcatcccaaggccgcggaattgtaaattttgaaagagacaaaattagtaaccattggatccaatactacagacgcatacctcacaggaaactcctcactgcactacaactcagggccaacgtttaccccacgagagaatttctagccaggggtagacaagaccaatacatcaaggcgtgtaggcactgcgatgcggacaacgaatcctgcgcccacatcatcggcaactgcccagtgacacaggacgcccgaatcaagaggcacaattacatctgcgaactgcttctcgaggaggcggccaagaaggccgccgtagtgttcaaggaaccgcacataagggattccaacaaggaactgtacaaacctgacctgatatttgtgaaggatgggcgtgcacttgtcgtggatgtgacagtacggtatgaagcagccaaatcatcgctggaggaagccgctgcagagaaagtgagaaagtacaaacacctggaaacggaagtaagacatctcacgaatgcaaaggacgttacttttgtgggctttcccctaggagcgcgggggaaatggcaccaagataactttaaacttttgactgagcttggcctctccaaatcgaggcaagtgaaaatggcagagactttttccacagtagcgctcttttcatctgtggacattgtacatatgtttgccagtagggccagaaaatctatggttatgtgataataggctgccttctgcggggcttgccttctggccatgcccttcttctctcccttgcacctgtacctcttggtctttgaataaagcctgagtaggaaggaccggtaaaaaaaaaaaaaaaaaaaaaaaaaaaaaaacgttgactaaaaaaaaaaaaaaaaaaaaaaaaaaaaaaaaaaaaaaaaaaaaaaaaaaaaaaaaaaaaaaaaaaaaaa

SEQ ID NO: 11158 - DNA, 5264 bp, synthetic construct
  source 1..5264: mol_type = other DNA
gaaataagagagaaaagaagagtaagaagaaatataagagaattcgccaccatggcccctaagaaaaagcggaaggtgaatatcagcggctctagctgcggcagccccaacagcgccgacaccagcagcgacttcaaggacctgtggaccaagctgaaggaatgccacgaccgggaagtgcagggactccaggtgaaggtcaccaaactcaagcaagaaagaatcctggacgcccagagactggaagaattcttcaccaagaaccagcagctgagagagcagcagaaagtgctgcacgagacaatcaaggttctggaagatagactgcgggccggcctgtgcgacagatgcgccgtgaccgaggaacacatgcgcaaaaagcagcaggagttcgagaacattagacagcaaaatctgaaattgatcacagagctgatgaacgagagaaacacactgcaggaggagaacaagaagctgagcgagcagctgcaacagaagatcgagaatgatcagcaacaccaggccgctgagctggaatgtgaagaggacgtgatccccgacagcccaatcacagctttcagcttttctggcgtgaacagactgaggcggaaggaaaacccccacgtgcggtacatcgagcagacccataccaagctggaacacagcgtgtgtgccaacgagatgagaaaggtgtccaagtcctccacccatccccagcacaaccctaacgaaaatgagatcctggtggctgatacctacgaccagtctcagagccctatggccaaggcccacggcaccagctcttatacccctgataagagctccttcaacctggccaccgtggtggccgagacactgggcctgggcgtgcaggaggaaagcgagacacagggcccaatgagccctctgggagatgagctgtaccactgcctggaaggcaaccacaagaaacagccttttgagtccggctccgagactcctggaacaagcgagagcgctacacctgagggcagccctaagagaaaggtgtccagcgccgagggcgctgccaaggaagagcctaaacggagaagcgccagactgagcgccaagccccccgccaaggtggaagccaagcctaagaaggccgccgctaaggacaagagcagcgataagaaagtccagaccaagggcaagcggggcgccaaaggcaaacaggccgaggtggccaaccaggagacaaaggaagatctgcctgctgagaacggcgaaaccaagaccgaggaatctccagcttctgacgaggccggagagaaggaggccaaaagcgacagcggctctgagacacctggaacaagcgagagcgccaccccggaatcctatgaacaacttgcaccacaaccgtgtgtgggagaaactttacattctagcctcccacgagacagtgaactgtttgtgcctgaagaggggagcagcgagaaggagagcgaggacgcgccaaaaacatctcctccgacgcctgggaaacatggtttggaacagactggggaggaaaaagtgatggtgactgttcctgacaaaaatccaccttgtccttgctgtggtacccgggtaaactctgtgttgaatctgattgaacatctgaaagtgtcacacgggaaaaggggggtttgttttcggtgtgcaaaatgtggaaaggaaaatagtaactatcacagtgttgtttgtcattttaagaaatgcaggggtccagagacggagaaagccccagctggggagtggatttgtgaggtatgcaacagagattttacaaccaaaattggcctgggacaacacaagagattggcacacccagcagtgagaaatcaggaaaggatcgttgcttcccaaccgaaagaaacatcaaatagaggtgctcacaaaaggtgctggacaaaggaggaggaagaattactaataagactggaggctcagttcgagggaaacaaaaatattaataagcttattgcagaacacataaccaccaaaacagctaagcagatcagtgacaaaaggcgattgctgtccagaaagccagcagaggagccacgtgaggagcctggaacgtgtcatcacaccaggagagcagctgcgagcctgagaacggagcctgagatgagtcatcacgcccaggcagaggacagagataatggacctgggagacgccctctgccaggcagggcagctgccggagggagaacaatggacgagataagacgccaccctgataagggcaacggacagcagagacccaccaagcaaaaatcagaagaacagctgcaggcttactataaaaagacactagaggaacgactttcagctggggcacttaacaccttcccccgagcattcaagcaggtaatggaaggccgggatataaagctagtaatcaatcagacagcgcaggactgcttcggatgcctggaatccataagccaaataagaacggcaacccgagataaaaaggacacggtgacccgggagaaacacccaaagaaaccttttcagaagtggatgaagaagagagcaatcaaaaaaggtaattatcttcggttccagcgtttattttatcttgatagagggaaactggctaaaatcattttagatgatattgaatgcttgtcttgtgacataccactcagtgaaatttattcggtttttaaaacaagatgggaaacaactggtagctttgacagccttgggaaatttaaaacttacgggaaggctgacaacactgccttcagagaattaattacggctaaagaaattgagaaaaatgtgcaggaaatgagcaaaggctcggctcccggtccagacgggattactcttggggacgtcgtaaagatggatcccgagttttcccggaccatggagattttcaatttatggttaacaactggtaaaatcccggacatggtgagggggtgcagaaccgttttgattccaaaatcatcaaagccggatcgtttgaaagacattaataactggagacctatcacgatcggttccatcttgctgagactgttctccaggattgtaacagctaggctgagcaaagcgtgccccctgaacccaaggcaaagaggctttatcagagcggcgggatgctctgaaaacttaaaactcctgcaaactataatttggtcggccaaaagagaacacagaccactgggtgttgtattcgtggacatcgccaaggcttttgacaccgtaagccaccagcacatcattcatgctttgcagcaaagagaggtggatccccacatcgtcggtctggtgagcaatatgtacgagaacatcagtacgtatatcaccacaaagaggaacacacacacagacaaaatccagatccgggttggagtaaagcagggtgacccgatgtcgccccttttatttaacctggcaatggaccctctattatgcaagctggaagagagtggcaaaggataccaccgaggacagagcagcatcacagcgatggcatttgcagacgatctggttttgctgagcgactcctgggaaaatatgaatacaaatattagcatactggagaccttctgcaatctgaccggactcaaaacacaggggcaaaagtgccacggcttttacatcaagccgacaaaggactcttacaccatcaatgactgcgctgcctggactatcaacggcacacccctgaacatgatcgaccccggcgaatctgagaaatacctcggcctgcagtttgacccgtggattggaatagcaaggtccggtctctccacaaaactagatttttggcttcagcggatcgatcaagcaccacttaaacctctgcagaaaactgatattctcaaaacatacaccatccctcggctgatctacatagctgaccactcagaagtgaaaagcgcactactcgaaacccttgaccagaagatccggacagcggtcaaggaatggcttcacctacctccgtgcacctgcgatgccatcctgtactcgagcacgagagacggcggtttgggcatcaccaaattggcaggactgatccccagcgtgcaggcccgtagactgcatcggatcgcacagtcatctgacgatacgatgaaatgcttcatggaaaaagagaaaatggaacagctgcataagaaattgtggattcaagctggaggggacagagagaacataccctcgatttgggaagcaccaccgtcgagtgaaccaccaaacaacgtgagcacaaattcggaatgggaagcaccgacccagaaagataaatttccaaagccttgcaattggaggaaaaacgaattcaaaaaatggaccaaattggcatcccaaggccgcggaattgtaaattttgaaagagacaaaattagtaaccattggatccaatactacagacgcatacctcacaggaaactcctcactgcactacaactcagggccaacgtttaccccacgagagaatttctagccaggggtagacaagaccaatacatcaaggcgtgtaggcactgcgatgcggacaacgaatcctgcgcccacatcatcggcaactgcccagtgacacaggacgcccgaatcaagaggcacaattacatctgcgaactgcttctcgaggaggcgaagaagaaggactgggtagtgttcaaggaaccgcacataagggattccaacaaggaactgtacaaacctgacctgatatttgtgaaggatgggcgtgcacttgtcgtggatgtgacagtacggtatgaagcagccaaatcatcgctggaggaagccgctgcagagaaagtgagaaagtacaaacacctggaaacggaagtaagacatctcacgaatgcaaaggacgttacttttgtgggctttcccctaggagcgcgggggaaatggcaccaagataactttaaacttttgactgagcttggcctctccaaatcgaggcaagtgaaaatggcagagactttttccacagtagcgctcttttcatctgtggacattgtacatatgtttgccagtagggccagaaaatctatggttatgtgataataggctgccttctgcggggcttgccttctggccatgcccttcttctctcccttgcacctgtacctcttggtctttgaataaagcctgagtaggaaggaccggtaaaaaaaaaaaaaaaaaaaaaaaaaaaaaaacgttgactaaaaaaaaaaaaaaaaaaaaaaaaaaaaaaaaaaaaaaaaaaaaaaaaaaaaaaaaaaaaaaaaaaaaaa

SEQ ID NO: 11159 - DNA, 5264 bp, synthetic construct
  source 1..5264: mol_type = other DNA
gaaataagagagaaaagaagagtaagaagaaatataagagaattcgccaccatggcccctaagaaaaagcggaaggtgaatatcagcggctctagctgcggcagccccaacagcgccgacaccagcagcgacttcaaggacctgtggaccaagctgaaggaatgccacgaccgggaagtgcagggactccaggtgaaggtcaccaaactcaagcaagaaagaatcctggacgcccagagactggaagaattcttcaccaagaaccagcagctgagagagcagcagaaagtgctgcacgagacaatcaaggttctggaagatagactgcgggccggcctgtgcgacagatgcgccgtgaccgaggaacacatgcgcaaaaagcagcaggagttcgagaacattagacagcaaaatctgaaattgatcacagagctgatgaacgagagaaacacactgcaggaggagaacaagaagctgagcgagcagctgcaacagaagatcgagaatgatcagcaacaccaggccgctgagctggaatgtgaagaggacgtgatccccgacagcccaatcacagctttcagcttttctggcgtgaacagactgaggcggaaggaaaacccccacgtgcggtacatcgagcagacccataccaagctggaacacagcgtgtgtgccaacgagatgagaaaggtgtccaagtcctccacccatccccagcacaaccctaacgaaaatgagatcctggtggctgatacctacgaccagtctcagagccctatggccaaggcccacggcaccagctcttatacccctgataagagctccttcaacctggccaccgtggtggccgagacactgggcctgggcgtgcaggaggaaagcgagacacagggcccaatgagccctctgggagatgagctgtaccactgcctggaaggcaaccacaagaaacagccttttgagtccggctccgagactcctggaacaagcgagagcgctacacctgagggcagccctaagagaaaggtgtccagcgccgagggcgctgccaaggaagagcctaaacggagaagcgccagactgagcgccaagccccccgccaaggtggaagccaagcctaagaaggccgccgctaaggacaagagcagcgataagaaagtccagaccaagggcaagcggggcgccaaaggcaaacaggccgaggtggccaaccaggagacaaaggaagatctgcctgctgagaacggcgaaaccaagaccgaggaatctccagcttctgacgaggccggagagaaggaggccaaaagcgacagcggctctgagacacctggaacaagcgagagcgccaccccggaatcctatgaacaacttgcaccacaaccgtgtgtgggagaaactttacattctagcctcccacgagacagtgaactgtttgtgcctgaagaggggagcagcgagaaggagagcgaggacgcgccaaaaacatctcctccgacgcctgggaaacatggtttggaacagactggggaggaaaaagtgatggtgactgttcctgacaaaaatccaccttgtccttgctgtggtacccgggtaaactctgtgttgaatctgattgaacatctgaaagtgtcacacgggaaaaggggggtttgttttcggtgtgcaaaatgtggaaaggaaaatagtaactatcacagtgttgtttgtcattttaagaaatgcaggggtccagagacggagaaagccccagctggggagtggatttgtgaggtatgcaacagagattttacaaccaaaattggcctgggacaacacaagagattggcacacccagcagtgagaaatcaggaaaggatcgttgcttcccaaccgaaagaaacatcaaatagaggtgctcacaaaaggtgctggacaaaggaggaggaagaattactaataagactggaggctcagttcgagggaaacaaaaatattaataagcttattgcagaacacataaccaccaaaacagctaagcagatcagtgacaaaaggcgattgctgtccagaaagccagcagaggagccacgtgaggagcctggaacgtgtcatcacaccaggagagcagctgcgagcctgagaacggagcctgagatgagtcatcacgcccaggcagaggacagagataatggacctgggagacgccctctgccaggcagggcagctgccggagggagaacaatggacgagataagacgccaccctgataagggcaacggacagcagagacccaccaagcaaaaatcagaagaacagctgcaggcttactataaaaagacactagaggaacgactttcagctggggcacttaacaccttcccccgagcattcaagcaggtaatggaaggccgggatataaagctagtaatcaatcagacagcgcaggactgcttcggatgcctggaatccataagccaaataagaacggcaacccgagataaaaaggacacggtgacccgggagaaacacccaaagaaaccttttcagaagtggatgaagaagagagcaatcaaaaaaggtaattatcttcggttccagcgtttattttatcttgatagagggaaactggctaaaatcattttagatgatattgaatgcttgtcttgtgacataccactcagtgaaatttattcggtttttaaaacaagatgggaaacaactggtagctttgccagccttggggcctttaaaacttacgggaaggctgacaacactgccttcagagaattaattacggctaaagaaattgagaaaaatgtgcaggaaatgagcaaaggctcggctcccggtccagacgggattactcttggggacgtcgtaaagatggatcccgagttttcccggaccatggagattttcaatttatggttaacaactggtaaaatcccggacatggtgagggggtgcagaaccgttttgattccaaaatcatcaaagccggatcgtttgaaagacattaataactggagacctatcacgatcggttccatcttgctgagactgttctccaggattgtaacagctaggctgagcaaagcgtgccccctgaacccaaggcaaagaggctttatcagagcggcgggatgctctgaaaacttaaaactcctgcaaactataatttggtcggccaaaagagaacacagaccactgggtgttgtattcgtggacatcgccaaggcttttgacaccgtaagccaccagcacatcattcatgctttgcagcaaagagaggtggatccccacatcgtcggtctggtgagcaatatgtacgagaacatcagtacgtatatcaccacaaagaggaacacacacacagacaaaatccagatccgggttggagtaaagcagggtgacccgatgtcgccccttttatttaacctggcaatggaccctctattatgcaagctggaagagagtggcaaaggataccaccgaggacagagcagcatcacagcgatggcatttgcagacgatctggttttgctgagcgactcctgggaaaatatgaatacaaatattagcatactggagaccttctgcaatctgaccggactcaaaacacaggggcaaaagtgccacggcttttacatcaagccgacaaaggactcttacaccatcaatgactgcgctgcctggactatcaacggcacacccctgaacatgatcgaccccggcgaatctgagaaatacctcggcctgcagtttgacccgtggattggaatagcaaggtccggtctctccacaaaactagatttttggcttcagcggatcgatcaagcaccacttaaacctctgcagaaaactgatattctcaaaacatacaccatccctcggctgatctacatagctgaccactcagaagtgaaaagcgcactactcgaaacccttgaccagaagatccggacagcggtcaaggaatggcttcacctacctccgtgcacctgcgatgccatcctgtactcgagcacgagagacggcggtttgggcatcaccaaattggcaggactgatccccagcgtgcaggcccgtagactgcatcggatcgcacagtcatctgacgatacgatgaaatgcttcatggaaaaagagaaaatggaacagctgcataagaaattgtggattcaagctggaggggacagagagaacataccctcgatttgggaagcaccaccgtcgagtgaaccaccaaacaacgtgagcacaaattcggaatgggaagcaccgacccagaaagataaatttccaaagccttgcaattggaggaaaaacgaattcaaaaaatggaccaaattggcatcccaaggccgcggaattgtaaattttgaaagagacaaaattagtaaccattggatccaatactacagacgcatacctcacaggaaactcctcactgcactacaactcagggccaacgtttaccccacgagagaatttctagccaggggtagacaagaccaatacatcaaggcgtgtaggcactgcgatgcggacaacgaatcctgcgcccacatcatcggcaactgcccagtgacacaggacgcccgaatcaagaggcacaattacatctgcgaactgcttctcgaggaggcgaagaagaaggactgggtagtgttcaaggaaccgcacataagggattccaacaaggaactgtacaaacctgacctgatatttgtgaaggatgggcgtgcacttgtcgtggatgtgacagtacggtatgaagcagccaaatcatcgctggaggaagccgctgcagagaaagtgagaaagtacaaacacctggaaacggaagtaagacatctcacgaatgcaaaggacgttacttttgtgggctttcccctaggagcgcgggggaaatggcaccaagataactttaaacttttgactgagcttggcctctccaaatcgaggcaagtgaaaatggcagagactttttccacagtagcgctcttttcatctgtggacattgtacatatgtttgccagtagggccagaaaatctatggttatgtgataataggctgccttctgcggggcttgccttctggccatgcccttcttctctcccttgcacctgtacctcttggtctttgaataaagcctgagtaggaaggaccggtaaaaaaaaaaaaaaaaaaaaaaaaaaaaaaacgttgactaaaaaaaaaaaaaaaaaaaaaaaaaaaaaaaaaaaaaaaaaaaaaaaaaaaaaaaaaaaaaaaaaaaaaa

SEQ ID NO: 11160 - DNA, 5264 bp, synthetic construct
  source 1..5264: mol_type = other DNA
gaaataagagagaaaagaagagtaagaagaaatataagagaattcgccaccatggcccctaagaaaaagcggaaggtgaatatcagcggctctagctgcggcagccccaacagcgccgacaccagcagcgacttcaaggacctgtggaccaagctgaaggaatgccacgaccgggaagtgcagggactccaggtgaaggtcaccaaactcaagcaagaaagaatcctggacgcccagagactggaagaattcttcaccaagaaccagcagctgagagagcagcagaaagtgctgcacgagacaatcaaggttctggaagatagactgcgggccggcctgtgcgacagatgcgccgtgaccgaggaacacatgcgcaaaaagcagcaggagttcgagaacattagacagcaaaatctgaaattgatcacagagctgatgaacgagagaaacacactgcaggaggagaacaagaagctgagcgagcagctgcaacagaagatcgagaatgatcagcaacaccaggccgctgagctggaatgtgaagaggacgtgatccccgacagcccaatcacagctttcagcttttctggcgtgaacagactgaggcggaaggaaaacccccacgtgcggtacatcgagcagacccataccaagctggaacacagcgtgtgtgccaacgagatgagaaaggtgtccaagtcctccacccatccccagcacaaccctaacgaaaatgagatcctggtggctgatacctacgaccagtctcagagccctatggccaaggcccacggcaccagctcttatacccctgataagagctccttcaacctggccaccgtggtggccgagacactgggcctgggcgtgcaggaggaaagcgagacacagggcccaatgagccctctgggagatgagctgtaccactgcctggaaggcaaccacaagaaacagccttttgagtccggctccgagactcctggaacaagcgagagcgctacacctgagggcagccctaagagaaaggtgtccagcgccgagggcgctgccaaggaagagcctaaacggagaagcgccagactgagcgccaagccccccgccaaggtggaagccaagcctaagaaggccgccgctaaggacaagagcagcgataagaaagtccagaccaagggcaagcggggcgccaaaggcaaacaggccgaggtggccaaccaggagacaaaggaagatctgcctgctgagaacggcgaaaccaagaccgaggaatctccagcttctgacgaggccggagagaaggaggccaaaagcgacagcggctctgagacacctggaacaagcgagagcgccaccccggaatcctatgaacaacttgcaccacaaccgtgtgtgggagaaactttacattctagcctcccacgagacagtgaactgtttgtgcctgaagaggggagcagcgagaaggagagcgaggacgcgccaaaaacatctcctccgacgcctgggaaacatggtttggaacagactggggaggaaaaagtgatggtgactgttcctgacaaaaatccaccttgtccttgctgtggtacccgggtaaactctgtgttgaatctgattgaacatctgaaagtgtcacacgggaaaaggggggtttgttttcggtgtgcaaaatgtggaaaggaaaatagtaactatcacagtgttgtttgtcattttaagaaatgcaggggtccagagacggagaaagccccagctggggagtggatttgtgaggtatgcaacagagattttacaaccaaaattggcctgggacaacacaagagattggcacacccagcagtgagaaatcaggaaaggatcgttgcttcccaaccgaaagaaacatcaaatagaggtgctcacaaaaggtgctggacaaaggaggaggaagaattactaataagactggaggctcagttcgagggaaacaaaaatattaataagcttattgcagaacacataaccaccaaaacagctaagcagatcagtgacaaaaggcgattgctgtccagaaagccagcagaggagccacgtgaggagcctggaacgtgtcatcacaccaggagagcagctgcgagcctgagaacggagcctgagatgagtcatcacgcccaggcagaggacagagataatggacctgggagacgccctctgccaggcagggcagctgccggagggagaacaatggacgagataagacgccaccctgataagggcaacggacagcagagacccaccaagcaaaaatcagaagaacagctgcaggcttactataaaaagacactagaggaacgactttcagctggggcacttaacaccttcccccgagcattcaagcaggtaatggaaggccgggatataaagctagtaatcaatcagacagcgcaggactgcttcggatgcctggaatccataagccaaataagaacggcaacccgagataaaaaggacacggtgacccgggagaaacacccaaagaaaccttttcagaagtggatgaagaagagagcaatcaaaaaaggtaattatcttcggttccagcgtttattttatcttgatagagggaaactggctaaaatcattttagatgatattgaatgcttgtcttgtgacataccactcagtgaaatttattcggtttttaaaacaagatgggaaacaactggtagctttaaaagccttggggactttaaaacttacgggaaggctgacaacactgccttcagagaattaattacggctaaagaaattgagaaaaatgtgcaggaaatgagcaaaggctcggctcccggtccagacgggattactcttggggacgtcgtaaagatggatcccgagttttcccggaccatggagattttcaatttatggttaacaactggtaaaatcccggacatggtgagggggtgcagaaccgttttgattccaaaatcatcaaagccggatcgtttgaaagacattaataactggagacctatcacgatcggttccatcttgctgagactgttctccaggattgtaacagctaggctgagcaaagcgtgccccctgaacccaaggcaaagaggctttatcagagcggcgggatgctctgaaaacttaaaactcctgcaaactataatttggtcggccaaaagagaacacagaccactgggtgttgtattcgtggacatcgccaaggcttttgacaccgtaagccaccagcacatcattcatgctttgcagcaaagagaggtggatccccacatcgtcggtctggtgagcaatatgtacgagaacatcagtacgtatatcaccacaaagaggaacacacacacagacaaaatccagatccgggttggagtaaagcagggtgacccgatgtcgccccttttatttaacctggcaatggaccctctattatgcgacctggaagagaaaggcaaaggataccaccgaggacagagcagcatcacagcgatggcatttgcagacgatctggttttgctgagcgactcctgggaaaatatgaatacaaatattagcatactggagaccttctgcaatctgaccggactcaaaacacaggggcaaaagtgccacggcttttacatcaagccgacaaaggactcttacaccatcaatgactgcgctgcctggactatcaacggcacacccctgaacatgatcgaccccggcgaatctgagaaatacctcggcctgcagtttgacccgtggattggaatagcaaggtccggtctctccacaaaactagatttttggcttcagcggatcgatcaagcaccacttaaacctctgcagaaaactgatattctcaaaacatacaccatccctcggctgatctacatagctgaccactcagaagtgaaaagcgcactactcgaaacccttgaccagaagatccggacagcggtcaaggaatggcttcacctacctccgtgcacctgcgatgccatcctgtactcgagcacgagagacggcggtttgggcatcaccaaattggcaggactgatccccagcgtgcaggcccgtagactgcatcggatcgcacagtcatctgacgatacgatgaaatgcttcatggaaaaagagaaaatggaacagctgcataagaaattgtggattcaagctggaggggacagagagaacataccctcgatttgggaagcaccaccgtcgagtgaaccaccaaacaacgtgagcacaaattcggaatgggaagcaccgacccagaaagataaatttccaaagccttgcaattggaggaaaaacgaattcaaaaaatggaccaaattggcatcccaaggccgcggaattgtaaattttgaaagagacaaaattagtaaccattggatccaatactacagacgcatacctcacaggaaactcctcactgcactacaactcagggccaacgtttaccccacgagagaatttctagccaggggtagacaagaccaatacatcaaggcgtgtaggcactgcgatgcggacaacgaatcctgcgcccacatcatcggcaactgcccagtgacacaggacgcccgaatcaagaggcacaattacatctgcgaactgcttctcgaggaggcgaagaagaaggactgggtagtgttcaaggaaccgcacataagggattccaacaaggaactgtacaaacctgacctgatatttgtgaaggatgggcgtgcacttgtcgtggatgtgacagtacggtatgaagcagccaaatcatcgctggaggaagccgctgcagagaaagtgagaaagtacaaacacctggaaacggaagtaagacatctcacgaatgcaaaggacgttacttttgtgggctttcccctaggagcgcgggggaaatggcaccaagataactttaaacttttgactgagcttggcctctccaaatcgaggcaagtgaaaatggcagagactttttccacagtagcgctcttttcatctgtggacattgtacatatgtttgccagtagggccagaaaatctatggttatgtgataataggctgccttctgcggggcttgccttctggccatgcccttcttctctcccttgcacctgtacctcttggtctttgaataaagcctgagtaggaaggaccggtaaaaaaaaaaaaaaaaaaaaaaaaaaaaaaacgttgactaaaaaaaaaaaaaaaaaaaaaaaaaaaaaaaaaaaaaaaaaaaaaaaaaaaaaaaaaaaaaaaaaaaaaa

SEQ ID NO: 11161 - DNA, 5264 bp, synthetic construct
  source 1..5264: mol_type = other DNA
gaaataagagagaaaagaagagtaagaagaaatataagagaattcgccaccatggcccctaagaaaaagcggaaggtgaatatcagcggctctagctgcggcagccccaacagcgccgacaccagcagcgacttcaaggacctgtggaccaagctgaaggaatgccacgaccgggaagtgcagggactccaggtgaaggtcaccaaactcaagcaagaaagaatcctggacgcccagagactggaagaattcttcaccaagaaccagcagctgagagagcagcagaaagtgctgcacgagacaatcaaggttctggaagatagactgcgggccggcctgtgcgacagatgcgccgtgaccgaggaacacatgcgcaaaaagcagcaggagttcgagaacattagacagcaaaatctgaaattgatcacagagctgatgaacgagagaaacacactgcaggaggagaacaagaagctgagcgagcagctgcaacagaagatcgagaatgatcagcaacaccaggccgctgagctggaatgtgaagaggacgtgatccccgacagcccaatcacagctttcagcttttctggcgtgaacagactgaggcggaaggaaaacccccacgtgcggtacatcgagcagacccataccaagctggaacacagcgtgtgtgccaacgagatgagaaaggtgtccaagtcctccacccatccccagcacaaccctaacgaaaatgagatcctggtggctgatacctacgaccagtctcagagccctatggccaaggcccacggcaccagctcttatacccctgataagagctccttcaacctggccaccgtggtggccgagacactgggcctgggcgtgcaggaggaaagcgagacacagggcccaatgagccctctgggagatgagctgtaccactgcctggaaggcaaccacaagaaacagccttttgagtccggctccgagactcctggaacaagcgagagcgctacacctgagggcagccctaagagaaaggtgtccagcgccgagggcgctgccaaggaagagcctaaacggagaagcgccagactgagcgccaagccccccgccaaggtggaagccaagcctaagaaggccgccgctaaggacaagagcagcgataagaaagtccagaccaagggcaagcggggcgccaaaggcaaacaggccgaggtggccaaccaggagacaaaggaagatctgcctgctgagaacggcgaaaccaagaccgaggaatctccagcttctgacgaggccggagagaaggaggccaaaagcgacagcggctctgagacacctggaacaagcgagagcgccaccccggaatcctatgaacaacttgcaccacaaccgtgtgtgggagaaactttacattctagcctcccacgagacagtgaactgtttgtgcctgaagaggggagcagcgagaaggagagcgaggacgcgccaaaaacatctcctccgacgcctgggaaacatggtttggaacagactggggaggaaaaagtgatggtgactgttcctgacaaaaatccaccttgtccttgctgtggtacccgggtaaactctgtgttgaatctgattgaacatctgaaagtgtcacacgggaaaaggggggtttgttttcggtgtgcaaaatgtggaaaggaaaatagtaactatcacagtgttgtttgtcattttaagaaatgcaggggtccagagacggagaaagccccagctggggagtggatttgtgaggtatgcaacagagattttacaaccaaaattggcctgggacaacacaagagattggcacacccagcagtgagaaatcaggaaaggatcgttgcttcccaaccgaaagaaacatcaaatagaggtgctcacaaaaggtgctggacaaaggaggaggaagaattactaataagactggaggctcagttcgagggaaacaaaaatattaataagcttattgcagaacacataaccaccaaaacagctaagcagatcagtgacaaaaggcgattgctgtccagaaagccagcagaggagccacgtgaggagcctggaacgtgtcatcacaccaggagagcagctgcgagcctgagaacggagcctgagatgagtcatcacgcccaggcagaggacagagataatggacctgggagacgccctctgccaggcagggcagctgccggagggagaacaatggacgagataagacgccaccctgataagggcaacggacagcagagacccaccaagcaaaaatcagaagaacagctgcaggcttactataaaaagacactagaggaacgactttcagctggggcacttaacaccttcccccgagcattcaagcaggtaatggaaggccgggatataaagctagtaatcaatcagacagcgcaggactgcttcggatgcctggaatccataagccaaataagaacggcaacccgagataaaaaggacacggtgacccgggagaaacacccaaagaaaccttttcagaagtggatgaagaagagagcaatcaaaaaaggtaattatcttcggttccagcgtttattttatcttgatagagggaaactggctaaaatcattttagatgatattgaatgcttgtcttgtgacataggcctcgtgagcatttatgtggtttttaaaacaagatgggaaacaactggtagctttaaaagccttggggactttaaaacttacgggaaggctgacaacactgccttcagagaattaattacggctaaagaaattgagaaaaatgtgcaggaaatgagcaaaggctcggctcccggtccagacgggattactcttggggacgtcgtaaagatggatcccgagttttcccggaccatggagattttcaatttatggttaacaactggtaaaatcccggacatggtgagggggtgcagaaccgttttgattccaaaatcatcaaagccggatcgtttgaaagacattaataactggagacctatcacgatcggttccatcttgctgagactgttctccaggattgtaacagctaggctgagcaaagcgtgccccctgaacccaaggcaaagaggctttatcagagcggcgggatgctctgaaaacttaaaactcctgcaaactataatttggtcggccaaaagagaacacagaccactgggtgttgtattcgtggacatcgccaaggcttttgacaccgtaagccaccagcacatcattcatgctttgcagcaaagagaggtggatccccacatcgtcggtctggtgagcaatatgtacgagaacatcagtacgtatatcaccacaaagaggaacacacacacagacaaaatccagatccgggttggagtaaagcagggtgacccgatgtcgccccttttatttaacctggcaatggaccctctattatgcaagctggaagagagtggcaaaggataccaccgaggacagagcagcatcacagcgatggcatttgcagacgatctggttttgctgagcgactcctgggaaaatatgaatacaaatattagcatactggagaccttctgcaatctgaccggactcaaaacacaggggcaaaagtgccacggcttttacatcaagccgacaaaggactcttacaccatcaatgactgcgctgcctggactatcaacggcacacccctgaacatgatcgaccccggcgaatctgagaaatacctcggcctgcagtttgacccgtggattggaatagcaaggtccggtctctccacaaaactagatttttggcttcagcggatcgatcaagcaccacttaaacctctgcagaaaactgatattctcaaaacatacaccatccctcggctgatctacatagctgaccactcagaagtgaaaagcgcactactcgaaacccttgaccagaagatccggacagcggtcaaggaatggcttcacctacctccgtgcacctgcgatgccatcctgtactcgagcacgagagacggcggtttgggcatcaccaaattggcaggactgatccccagcgtgcaggcccgtagactgcatcggatcgcacagtcatctgacgatacgatgaaatgcttcatggaaaaagagaaaatggaacagctgcataagaaattgtggattcaagctggaggggacagagagaacataccctcgatttgggaagcaccaccgtcgagtgaaccaccaaacaacgtgagcacaaattcggaatgggaagcaccgacccagaaagataaatttccaaagccttgcaattggaggaaaaacgaattcaaaaaatggaccaaattggcatcccaaggccgcggaattgtaaattttgaaagagacaaaattagtaaccattggatccaatactacagacgcatacctcacaggaaactcctcactgcactacaactcagggccaacgtttaccccacgagagaatttctagccaggggtagacaagaccaatacatcaaggcgtgtaggcactgcgatgcggacaacgaatcctgcgcccacatcatcggcaactgcccagtgacacaggacgcccgaatcaagaggcacaattacatctgcgaactgcttctcgaggaggcgaagaagaaggactgggtagtgttcaaggaaccgcacataagggattccaacaaggaactgtacaaacctgacctgatatttgtgaaggatgggcgtgcacttgtcgtggatgtgacagtacggtatgaagcagccaaatcatcgctggaggaagccgctgcagagaaagtgagaaagtacaaacacctggaaacggaagtaagacatctcacgaatgcaaaggacgttacttttgtgggctttcccctaggagcgcgggggaaatggcaccaagataactttaaacttttgactgagcttggcctctccaaatcgaggcaagtgaaaatggcagagactttttccacagtagcgctcttttcatctgtggacattgtacatatgtttgccagtagggccagaaaatctatggttatgtgataataggctgccttctgcggggcttgccttctggccatgcccttcttctctcccttgcacctgtacctcttggtctttgaataaagcctgagtaggaaggaccggtaaaaaaaaaaaaaaaaaaaaaaaaaaaaaaacgttgactaaaaaaaaaaaaaaaaaaaaaaaaaaaaaaaaaaaaaaaaaaaaaaaaaaaaaaaaaaaaaaaaaaaaaa

SEQ ID NO: 11162 - DNA, 5264 bp, synthetic construct
  source 1..5264: mol_type = other DNA
gaaataagagagaaaagaagagtaagaagaaatataagagaattcgccaccatggcccctaagaaaaagcggaaggtgaatatcagcggctctagctgcggcagccccaacagcgccgacaccagcagcgacttcaaggacctgtggaccaagctgaaggaatgccacgaccgggaagtgcagggactccaggtgaaggtcaccaaactcaagcaagaaagaatcctggacgcccagagactggaagaattcttcaccaagaaccagcagctgagagagcagcagaaagtgctgcacgagacaatcaaggttctggaagatagactgcgggccggcctgtgcgacagatgcgccgtgaccgaggaacacatgcgcaaaaagcagcaggagttcgagaacattagacagcaaaatctgaaattgatcacagagctgatgaacgagagaaacacactgcaggaggagaacaagaagctgagcgagcagctgcaacagaagatcgagaatgatcagcaacaccaggccgctgagctggaatgtgaagaggacgtgatccccgacagcccaatcacagctttcagcttttctggcgtgaacagactgaggcggaaggaaaacccccacgtgcggtacatcgagcagacccataccaagctggaacacagcgtgtgtgccaacgagatgagaaaggtgtccaagtcctccacccatccccagcacaaccctaacgaaaatgagatcctggtggctgatacctacgaccagtctcagagccctatggccaaggcccacggcaccagctcttatacccctgataagagctccttcaacctggccaccgtggtggccgagacactgggcctgggcgtgcaggaggaaagcgagacacagggcccaatgagccctctgggagatgagctgtaccactgcctggaaggcaaccacaagaaacagccttttgagtccggctccgagactcctggaacaagcgagagcgctacacctgagggcagccctaagagaaaggtgtccagcgccgagggcgctgccaaggaagagcctaaacggagaagcgccagactgagcgccaagccccccgccaaggtggaagccaagcctaagaaggccgccgctaaggacaagagcagcgataagaaagtccagaccaagggcaagcggggcgccaaaggcaaacaggccgaggtggccaaccaggagacaaaggaagatctgcctgctgagaacggcgaaaccaagaccgaggaatctccagcttctgacgaggccggagagaaggaggccaaaagcgacagcggctctgagacacctggaacaagcgagagcgccaccccggaatcctatgaacaacttgcaccacaaccgtgtgtgggagaaactttacattctagcctcccacgagacagtgaactgtttgtgcctgaagaggggagcagcgagaaggagagcgaggacgcgccaaaaacatctcctccgacgcctgggaaacatggtttggaacagactggggaggaaaaagtgatggtgactgttcctgacaaaaatccaccttgtccttgctgtggtacccgggtaaactctgtgttgaatctgattgaacatctgaaagtgtcacacgggaaaaggggggtttgttttcggtgtgcaaaatgtggaaaggaaaatagtaactatcacagtgttgtttgtcattttaagaaatgcaggggtccagagacggagaaagccccagctggggagtggatttgtgaggtatgcaacagagattttacaaccaaaattggcctgggacaacacaagagattggcacacccagcagtgagaaatcaggaaaggatcgttgcttcccaaccgaaagaaacatcaaatagaggtgctcacaaaaggtgctggacaaaggaggaggaagaattactaataagactggaggctcagttcgagggaaacaaaaatattaataagcttattgcagaacacataaccaccaaaacagctaagcagatcagtgacaaaaggcgattgctgtccagaaagccagcagaggagccacgtgaggagcctggaacgtgtcatcacaccaggagagcagctgcgagcctgagaacggagcctgagatgagtcatcacgcccaggcagaggacagagataatggacctgggagacgccctctgccaggcagggcagctgccggagggagaacaatggacgagataagacgccaccctgataagggcaacggacagcagagacccaccaagcaaaaatcagaagaacagctgcaggcttactataaaaagacactagaggaacgactttcagctggggcacttaacaccttcccccgagcattcaagcaggtaatggaaggccgggatataaagctagtaatcaatcagacagcgcaggactgcttcggatgcctggaatccataagccaaataagaacggcaacccgagataaaaaggacacggtgacccgggagaaacacccaaagaaaccttttcagaagtggatgaagaagagagcaatcaaaaaaggtaattatcttcggttccagcgtttattttatcttgatagagggaaactggctaaaatcattttagatgatattgaatgcttgtcttgtgacatagccctcgccgccatttatgccgtttttaaaacaagatgggaaacaactggtagctttaaaagccttggggactttaaaacttacgggaaggctgacaacactgccttcagagaattaattacggctaaagaaattgagaaaaatgtgcaggaaatgagcaaaggctcggctcccggtccagacgggattactcttggggacgtcgtaaagatggatcccgagttttcccggaccatggagattttcaatttatggttaacaactggtaaaatcccggacatggtgagggggtgcagaaccgttttgattccaaaatcatcaaagccggatcgtttgaaagacattaataactggagacctatcacgatcggttccatcttgctgagactgttctccaggattgtaacagctaggctgagcaaagcgtgccccctgaacccaaggcaaagaggctttatcagagcggcgggatgctctgaaaacttaaaactcctgcaaactataatttggtcggccaaaagagaacacagaccactgggtgttgtattcgtggacatcgccaaggcttttgacaccgtaagccaccagcacatcattcatgctttgcagcaaagagaggtggatccccacatcgtcggtctggtgagcaatatgtacgagaacatcagtacgtatatcaccacaaagaggaacacacacacagacaaaatccagatccgggttggagtaaagcagggtgacccgatgtcgccccttttatttaacctggcaatggaccctctattatgcaagctggaagagagtggcaaaggataccaccgaggacagagcagcatcacagcgatggcatttgcagacgatctggttttgctgagcgactcctgggaaaatatgaatacaaatattagcatactggagaccttctgcaatctgaccggactcaaaacacaggggcaaaagtgccacggcttttacatcaagccgacaaaggactcttacaccatcaatgactgcgctgcctggactatcaacggcacacccctgaacatgatcgaccccggcgaatctgagaaatacctcggcctgcagtttgacccgtggattggaatagcaaggtccggtctctccacaaaactagatttttggcttcagcggatcgatcaagcaccacttaaacctctgcagaaaactgatattctcaaaacatacaccatccctcggctgatctacatagctgaccactcagaagtgaaaagcgcactactcgaaacccttgaccagaagatccggacagcggtcaaggaatggcttcacctacctccgtgcacctgcgatgccatcctgtactcgagcacgagagacggcggtttgggcatcaccaaattggcaggactgatccccagcgtgcaggcccgtagactgcatcggatcgcacagtcatctgacgatacgatgaaatgcttcatggaaaaagagaaaatggaacagctgcataagaaattgtggattcaagctggaggggacagagagaacataccctcgatttgggaagcaccaccgtcgagtgaaccaccaaacaacgtgagcacaaattcggaatgggaagcaccgacccagaaagataaatttccaaagccttgcaattggaggaaaaacgaattcaaaaaatggaccaaattggcatcccaaggccgcggaattgtaaattttgaaagagacaaaattagtaaccattggatccaatactacagacgcatacctcacaggaaactcctcactgcactacaactcagggccaacgtttaccccacgagagaatttctagccaggggtagacaagaccaatacatcaaggcgtgtaggcactgcgatgcggacaacgaatcctgcgcccacatcatcggcaactgcccagtgacacaggacgcccgaatcaagaggcacaattacatctgcgaactgcttctcgaggaggcgaagaagaaggactgggtagtgttcaaggaaccgcacataagggattccaacaaggaactgtacaaacctgacctgatatttgtgaaggatgggcgtgcacttgtcgtggatgtgacagtacggtatgaagcagccaaatcatcgctggaggaagccgctgcagagaaagtgagaaagtacaaacacctggaaacggaagtaagacatctcacgaatgcaaaggacgttacttttgtgggctttcccctaggagcgcgggggaaatggcaccaagataactttaaacttttgactgagcttggcctctccaaatcgaggcaagtgaaaatggcagagactttttccacagtagcgctcttttcatctgtggacattgtacatatgtttgccagtagggccagaaaatctatggttatgtgataataggctgccttctgcggggcttgccttctggccatgcccttcttctctcccttgcacctgtacctcttggtctttgaataaagcctgagtaggaaggaccggtaaaaaaaaaaaaaaaaaaaaaaaaaaaaaaacgttgactaaaaaaaaaaaaaaaaaaaaaaaaaaaaaaaaaaaaaaaaaaaaaaaaaaaaaaaaaaaaaaaaaaaaaa

SEQ ID NO: 11163 - DNA, 5264 bp, synthetic construct
  source 1..5264: mol_type = other DNA
gaaataagagagaaaagaagagtaagaagaaatataagagaattcgccaccatggcccctaagaaaaagcggaaggtgaatatcagcggctctagctgcggcagccccaacagcgccgacaccagcagcgacttcaaggacctgtggaccaagctgaaggaatgccacgaccgggaagtgcagggactccaggtgaaggtcaccaaactcaagcaagaaagaatcctggacgcccagagactggaagaattcttcaccaagaaccagcagctgagagagcagcagaaagtgctgcacgagacaatcaaggttctggaagatagactgcgggccggcctgtgcgacagatgcgccgtgaccgaggaacacatgcgcaaaaagcagcaggagttcgagaacattagacagcaaaatctgaaattgatcacagagctgatgaacgagagaaacacactgcaggaggagaacaagaagctgagcgagcagctgcaacagaagatcgagaatgatcagcaacaccaggccgctgagctggaatgtgaagaggacgtgatccccgacagcccaatcacagctttcagcttttctggcgtgaacagactgaggcggaaggaaaacccccacgtgcggtacatcgagcagacccataccaagctggaacacagcgtgtgtgccaacgagatgagaaaggtgtccaagtcctccacccatccccagcacaaccctaacgaaaatgagatcctggtggctgatacctacgaccagtctcagagccctatggccaaggcccacggcaccagctcttatacccctgataagagctccttcaacctggccaccgtggtggccgagacactgggcctgggcgtgcaggaggaaagcgagacacagggcccaatgagccctctgggagatgagctgtaccactgcctggaaggcaaccacaagaaacagccttttgagtccggctccgagactcctggaacaagcgagagcgctacacctgagggcagccctaagagaaaggtgtccagcgccgagggcgctgccaaggaagagcctaaacggagaagcgccagactgagcgccaagccccccgccaaggtggaagccaagcctaagaaggccgccgctaaggacaagagcagcgataagaaagtccagaccaagggcaagcggggcgccaaaggcaaacaggccgaggtggccaaccaggagacaaaggaagatctgcctgctgagaacggcgaaaccaagaccgaggaatctccagcttctgacgaggccggagagaaggaggccaaaagcgacagcggctctgagacacctggaacaagcgagagcgccaccccggaatcctatgaacaacttgcaccacaaccgtgtgtgggagaaactttacattctagcctcccacgagacagtgaactgtttgtgcctgaagaggggagcagcgagaaggagagcgaggacgcgccaaaaacatctcctccgacgcctgggaaacatggtttggaacagactggggaggaaaaagtgatggtgactgttcctgacaaaaatccaccttgtccttgctgtggtacccgggtaaactctgtgttgaatctgattgaacatctgaaagtgtcacacgggaaaaggggggtttgttttcggtgtgcaaaatgtggaaaggaaaatagtaactatcacagtgttgtttgtcattttaagaaatgcaggggtccagagacggagaaagccccagctggggagtggatttgtgaggtatgcaacagagattttacaaccaaaattggcctgggacaacacaagagattggcacacccagcagtgagaaatcaggaaaggatcgttgcttcccaaccgaaagaaacatcaaatagaggtgctcacaaaaggtgctggacaaaggaggaggaagaattactaataagactggaggctcagttcgagggaaacaaaaatattaataagcttattgcagaacacataaccaccaaaacagctaagcagatcagtgacaaaaggcgattgctgtccagaaagccagcagaggagccacgtgaggagcctggaacgtgtcatcacaccaggagagcagctgcgagcctgagaacggagcctgagatgagtcatcacgcccaggcagaggacagagataatggacctgggagacgccctctgccaggcagggcagctgccggagggagaacaatggacgagataagacgccaccctgataagggcaacggacagcagagacccaccaagcaaaaatcagaagaacagctgcaggcttactataaaaagacactagaggaacgactttcagctggggcacttaacaccttcccccgagcattcaagcaggtaatggaaggccgggatataaagctagtaatcaatcagacagcgcaggactgcttcggatgcctggaatccataagccaaataagaacggcaacccgagataaaaaggacacggtgacccgggagaaacacccaaagaaaccttttcagaagtggatgaagaagagagcaatcaaaaaaggtaattatcttcggttccagcgtttattttatcttgatagagggaaactggctaaaatcattttagatgatattgaatgcttgtcttgtgacataccactcagtgaaatttattcggtttttaaaacaagatgggaaacaactggtagctttaaaagccttggggactttaaaacttacgggaaggctgacaacactgccttcagagaattaattacggctaaagaaattgagaaaaatgtgcaggaaatgagcaaaggctcggctcccggtccagacgggattactcttggggacgtcgtaaagatggatcccgagttttcccggaccatggagattttcaatttatggttaacaactggtaaaatcccggacatggtgagggggtgcagaaccgttttgattccaaaatcatcaaagccggatcgtttgaaagacattaataactggagacctatcacgatcggttccatcttgctgagactgttctccaggattgtaacagctaggctgagcaaagcgtgccccctgaacccaaggcaaagaggctttatcagagcggcgggatgctctgaaaacttaaaactcctgcaaactataatttggtcggccaaaagagaacacagaccactgggtgttgtattcgtggacatcgccaaggcttttgacaccgtaagccaccagcacatcattcatgctttgcagcaaagagaggtggatccccacatcgtcggtctggtgagcaatatgtacgagaacatcagtacgtatatcaccacaaagaggaacacacacacagacaaaatccagatccgggttggagtaaagcagggtgacccgatgtcgccccttttatttaacctggcaatggaccctctattatgcaagctggaagagagtggcaaaggataccaccgaggacagagcagcatcacagcgatggcatttgcagacgatctggttttgctgagcgactcctgggaaaatatgaatacaaatattagcatactggagaccttctgcaatctgaccggactcaaaacacaggggcaaaagtgccacggcttttacatcaagccgacaaaggactcttacaccatcaatgactgcgctgcctggactatcaacggcacacccctgaacatgatcgaccccggcgaatctgagaaatacctcggcctgcagtttgacccgtggattggaatagcaaggtccggtctctccacaaaactagatttttggcttcagcggatcgatcaagcaccacttaaacctctgcagaaaactgatattctcaaaacatacaccatccctcggctgatctacatagctgaccactcagaagtgaaaagcgcactactcgaaacccttgaccagaagatccggacagcggtcaaggaatggcttcacctacctccgtgcacctgcgatgccatcctgtactcgagcacgagagacggcggtttgggcatcaccaaattggcaggactgatccccagcgtgcaggcccgtagactgcatcggatcgcacagtcatctgacgatacgatgaaatgcttcatggaaaaagagaaaatggaacagctgcataagaaattgtggattcaagctggaggggacagagagaacataccctcgatttgggaagcaccaccgtcgagtgaaccaccaaacaacgtgagcacaaattcggaatgggaagcaccgacccagaaagataaatttccaaagccttgcaattggaggaaaaacgaattcaaaaaatggaccaaattggcatcccaaggccgcggaattgtaaattttgaaagagacaaaattagtaaccattggatccaatactacagacgcatacctcacaggaaactcctcactgcactacaactcagggccaacgtttaccccacgagagaatttatcgccaggggtagacaagaccaatacatcaaggcgtgtaggcactgcgatgcggacaacgaatcctgcgcccacatcatcggcaactgcccagtgacacaggacgcccgaatcaagaggcacaattacatctgcgaactgcttctcgaggaggcgaagaagaaggactgggtagtgttcaaggaaccgcacataagggattccaacaaggaactgtacaaacctgacctgatatttgtgaaggatgggcgtgcacttgtcgtggatgtgacagtacggtatgaagcagccaaatcatcgctggaggaagccgctgcagagaaagtgagaaagtacaaacacctggaaacggaagtaagacatctcacgaatgcaaaggacgttacttttgtgggctttcccctaggagcgcgggggaaatggcaccaagataactttaaacttttgactgagcttggcctctccaaatcgaggcaagtgaaaatggcagagactttttccacagtagcgctcttttcatctgtggacattgtacatatgtttgccagtagggccagaaaatctatggttatgtgataataggctgccttctgcggggcttgccttctggccatgcccttcttctctcccttgcacctgtacctcttggtctttgaataaagcctgagtaggaaggaccggtaaaaaaaaaaaaaaaaaaaaaaaaaaaaaaacgttgactaaaaaaaaaaaaaaaaaaaaaaaaaaaaaaaaaaaaaaaaaaaaaaaaaaaaaaaaaaaaaaaaaaaaaa

SEQ ID NO: 11164 - DNA, 5264 bp, synthetic construct
  source 1..5264: mol_type = other DNA
gaaataagagagaaaagaagagtaagaagaaatataagagaattcgccaccatggcccctaagaaaaagcggaaggtgaatatcagcggctctagctgcggcagccccaacagcgccgacaccagcagcgacttcaaggacctgtggaccaagctgaaggaatgccacgaccgggaagtgcagggactccaggtgaaggtcaccaaactcaagcaagaaagaatcctggacgcccagagactggaagaattcttcaccaagaaccagcagctgagagagcagcagaaagtgctgcacgagacaatcaaggttctggaagatagactgcgggccggcctgtgcgacagatgcgccgtgaccgaggaacacatgcgcaaaaagcagcaggagttcgagaacattagacagcaaaatctgaaattgatcacagagctgatgaacgagagaaacacactgcaggaggagaacaagaagctgagcgagcagctgcaacagaagatcgagaatgatcagcaacaccaggccgctgagctggaatgtgaagaggacgtgatccccgacagcccaatcacagctttcagcttttctggcgtgaacagactgaggcggaaggaaaacccccacgtgcggtacatcgagcagacccataccaagctggaacacagcgtgtgtgccaacgagatgagaaaggtgtccaagtcctccacccatccccagcacaaccctaacgaaaatgagatcctggtggctgatacctacgaccagtctcagagccctatggccaaggcccacggcaccagctcttatacccctgataagagctccttcaacctggccaccgtggtggccgagacactgggcctgggcgtgcaggaggaaagcgagacacagggcccaatgagccctctgggagatgagctgtaccactgcctggaaggcaaccacaagaaacagccttttgagtccggctccgagactcctggaacaagcgagagcgctacacctgagggcagccctaagagaaaggtgtccagcgccgagggcgctgccaaggaagagcctaaacggagaagcgccagactgagcgccaagccccccgccaaggtggaagccaagcctaagaaggccgccgctaaggacaagagcagcgataagaaagtccagaccaagggcaagcggggcgccaaaggcaaacaggccgaggtggccaaccaggagacaaaggaagatctgcctgctgagaacggcgaaaccaagaccgaggaatctccagcttctgacgaggccggagagaaggaggccaaaagcgacagcggctctgagacacctggaacaagcgagagcgccaccccggaatcctatgaacaacttgcaccacaaccgtgtgtgggagaaactttacattctagcctcccacgagacagtgaactgtttgtgcctgaagaggggagcagcgagaaggagagcgaggacgcgccaaaaacatctcctccgacgcctgggaaacatggtttggaacagactggggaggaaaaagtgatggtgactgttcctgacaaaaatccaccttgtccttgctgtggtacccgggtaaactctgtgttgaatctgattgaacatctgaaagtgtcacacgggaaaaggggggtttgttttcggtgtgcaaaatgtggaaaggaaaatagtaactatcacagtgttgtttgtcattttaagaaatgcaggggtccagagacggagaaagccccagctggggagtggatttgtgaggtatgcaacagagattttacaaccaaaattggcctgggacaacacaagagattggcacacccagcagtgagaaatcaggaaaggatcgttgcttcccaaccgaaagaaacatcaaatagaggtgctcacaaaaggtgctggacaaaggaggaggaagaattactaataagactggaggctcagttcgagggaaacaaaaatattaataagcttattgcagaacacataaccaccaaaacagctaagcagatcagtgacaaaaggcgattgctgtccagaaagccagcagaggagccacgtgaggagcctggaacgtgtcatcacaccaggagagcagctgcgagcctgagaacggagcctgagatgagtcatcacgcccaggcagaggacagagataatggacctgggagacgccctctgccaggcagggcagctgccggagggagaacaatggacgagataagacgccaccctgataagggcaacggacagcagagacccaccaagcaaaaatcagaagaacagctgcaggcttactataaaaagacactagaggaacgactttcagctggggcacttaacaccttcccccgagcattcaagcaggtaatggaaggccgggatataaagctagtaatcaatcagacagcgcaggactgcttcggatgcctggaatccataagccaaataagaacggcaacccgagataaaaaggacacggtgacccgggagaaacacccaaagaaaccttttcagaagtggatgaagaagagagcaatcaaaaaaggtaattatcttcggttccagcgtttattttatcttgatagagggaaactggctaaaatcattttagatgatattgaatgcttgtcttgtgacataccactcagtgaaatttattcggtttttaaaacaagatgggaaacaactggtagctttaaaagccttggggactttaaaacttacgggaaggctgacaacactgccttcagagaattaattacggctaaagaaattgagaaaaatgtgcaggaaatgagcaaaggctcggctcccggtccagacgggattactcttggggacgtcgtaaagatggatcccgagttttcccggaccatggagattttcaatttatggttaacaactggtaaaatcccggacatggtgagggggtgcagaaccgttttgattccaaaatcatcaaagccggatcgtttgaaagacattaataactggagacctatcacgatcggttccatcttgctgagactgttctccaggattgtaacagctaggctgagcaaagcgtgccccctgaacccaaggcaaagaggctttatcagagcggcgggatgctctgaaaacttaaaactcctgcaaactataatttggtcggccaaaagagaacacagaccactgggtgttgtattcgtggacatcgccaaggcttttgacaccgtaagccaccagcacatcattcatgctttgcagcaaagagaggtggatccccacatcgtcggtctggtgagcaatatgtacgagaacatcagtacgtatatcaccacaaagaggaacacacacacagacaaaatccagatccgggttggagtaaagcagggtgacccgatgtcgccccttttatttaacctggcaatggaccctctattatgcaagctggaagagagtggcaaaggataccaccgaggacagagcagcatcacagcgatggcatttgcagacgatctggttttgctgagcgactcctggagcaatatgagcgtgaatattgtgatactgagcgtgttctgcagcctgaccggactcaaaacacaggggcaaaagtgccacggcttttacatcaagccgacaaaggactcttacaccatcaatgactgcgctgcctggactatcaacggcacacccctgaacatgatcgaccccggcgaatctgagaaatacctcggcctgcagtttgacccgtggattggaatagcaaggtccggtctctccacaaaactagatttttggcttcagcggatcgatcaagcaccacttaaacctctgcagaaaactgatattctcaaaacatacaccatccctcggctgatctacatagctgaccactcagaagtgaaaagcgcactactcgaaacccttgaccagaagatccggacagcggtcaaggaatggcttcacctacctccgtgcacctgcgatgccatcctgtactcgagcacgagagacggcggtttgggcatcaccaaattggcaggactgatccccagcgtgcaggcccgtagactgcatcggatcgcacagtcatctgacgatacgatgaaatgcttcatggaaaaagagaaaatggaacagctgcataagaaattgtggattcaagctggaggggacagagagaacataccctcgatttgggaagcaccaccgtcgagtgaaccaccaaacaacgtgagcacaaattcggaatgggaagcaccgacccagaaagataaatttccaaagccttgcaattggaggaaaaacgaattcaaaaaatggaccaaattggcatcccaaggccgcggaattgtaaattttgaaagagacaaaattagtaaccattggatccaatactacagacgcatacctcacaggaaactcctcactgcactacaactcagggccaacgtttaccccacgagagaatttctagccaggggtagacaagaccaatacatcaaggcgtgtaggcactgcgatgcggacaacgaatcctgcgcccacatcatcggcaactgcccagtgacacaggacgcccgaatcaagaggcacaattacatctgcgaactgcttctcgaggaggcgaagaagaaggactgggtagtgttcaaggaaccgcacataagggattccaacaaggaactgtacaaacctgacctgatatttgtgaaggatgggcgtgcacttgtcgtggatgtgacagtacggtatgaagcagccaaatcatcgctggaggaagccgctgcagagaaagtgagaaagtacaaacacctggaaacggaagtaagacatctcacgaatgcaaaggacgttacttttgtgggctttcccctaggagcgcgggggaaatggcaccaagataactttaaacttttgactgagcttggcctctccaaatcgaggcaagtgaaaatggcagagactttttccacagtagcgctcttttcatctgtggacattgtacatatgtttgccagtagggccagaaaatctatggttatgtgataataggctgccttctgcggggcttgccttctggccatgcccttcttctctcccttgcacctgtacctcttggtctttgaataaagcctgagtaggaaggaccggtaaaaaaaaaaaaaaaaaaaaaaaaaaaaaaacgttgactaaaaaaaaaaaaaaaaaaaaaaaaaaaaaaaaaaaaaaaaaaaaaaaaaaaaaaaaaaaaaaaaaaaaaa

SEQ ID NO: 11165 - DNA, 5264 bp, synthetic construct
  source 1..5264: mol_type = other DNA
gaaataagagagaaaagaagagtaagaagaaatataagagaattcgccaccatggcccctaagaaaaagcggaaggtgaatatcagcggctctagctgcggcagccccaacagcgccgacaccagcagcgacttcaaggacctgtggaccaagctgaaggaatgccacgaccgggaagtgcagggactccaggtgaaggtcaccaaactcaagcaagaaagaatcctggacgcccagagactggaagaattcttcaccaagaaccagcagctgagagagcagcagaaagtgctgcacgagacaatcaaggttctggaagatagactgcgggccggcctgtgcgacagatgcgccgtgaccgaggaacacatgcgcaaaaagcagcaggagttcgagaacattagacagcaaaatctgaaattgatcacagagctgatgaacgagagaaacacactgcaggaggagaacaagaagctgagcgagcagctgcaacagaagatcgagaatgatcagcaacaccaggccgctgagctggaatgtgaagaggacgtgatccccgacagcccaatcacagctttcagcttttctggcgtgaacagactgaggcggaaggaaaacccccacgtgcggtacatcgagcagacccataccaagctggaacacagcgtgtgtgccaacgagatgagaaaggtgtccaagtcctccacccatccccagcacaaccctaacgaaaatgagatcctggtggctgatacctacgaccagtctcagagccctatggccaaggcccacggcaccagctcttatacccctgataagagctccttcaacctggccaccgtggtggccgagacactgggcctgggcgtgcaggaggaaagcgagacacagggcccaatgagccctctgggagatgagctgtaccactgcctggaaggcaaccacaagaaacagccttttgagtccggctccgagactcctggaacaagcgagagcgctacacctgagggcagccctaagagaaaggtgtccagcgccgagggcgctgccaaggaagagcctaaacggagaagcgccagactgagcgccaagccccccgccaaggtggaagccaagcctaagaaggccgccgctaaggacaagagcagcgataagaaagtccagaccaagggcaagcggggcgccaaaggcaaacaggccgaggtggccaaccaggagacaaaggaagatctgcctgctgagaacggcgaaaccaagaccgaggaatctccagcttctgacgaggccggagagaaggaggccaaaagcgacagcggctctgagacacctggaacaagcgagagcgccaccccggaatcctatgaacaacttgcaccacaaccgtgtgtgggagaaactttacattctagcctcccacgagacagtgaactgtttgtgcctgaagaggggagcagcgagaaggagagcgaggacgcgccaaaaacatctcctccgacgcctgggaaacatggtttggaacagactggggaggaaaaagtgatggtgactgttcctgacaaaaatccaccttgtccttgctgtggtacccgggtaaactctgtgttgaatctgattgaacatctgaaagtgtcacacgggaaaaggggggtttgttttcggtgtgcaaaatgtggaaaggaaaatagtaactatcacagtgttgtttgtcattttaagaaatgcaggggtccagagacggagaaagccccagctggggagtggatttgtgaggtatgcaacagagattttacaaccaaaattggcctgggacaacacaagagattggcacacccagcagtgagaaatcaggaaaggatcgttgcttcccaaccgaaagaaacatcaaatagaggtgctcacaaaaggtgctggacaaaggaggaggaagaattactaataagactggaggctcagttcgagggaaacaaaaatattaataagcttattgcagaacacataaccaccaaaacagctaagcagatcagtgacaaaaggcgattgctgtccagaaagccagcagaggagccacgtgaggagcctggaacgtgtcatcacaccaggagagcagctgcgagcctgagaacggagcctgagatgagtcatcacgcccaggcagaggacagagataatggacctgggagacgccctctgccaggcagggcagctgccggagggagaacaatggacgagataagacgccaccctgataagggcaacggacagcagagacccaccaagcaaaaatcagaagaacagctgcaggcttactataaaaagacactagaggaacgactttcagctggggcacttaacaccttcccccgagcattcaagcaggtaatggaaggccgggatataaagctagtaatcaatcagacagcgcaggactgcttcggatgcctggaatccataagccaaataagaacggcaacccgagataaaaaggacacggtgacccgggagaaacacccaaagaaaccttttcagaagtggatgaagaagagagcaatcaaaaaaggtaattatcttcggttccagcgtttattttatcttgatagagggaaactggctaaaatcattttagatgatattgaatgcttgtcttgtgacataccactcagtgaaatttattcggtttttaaaacaagatgggaaacaactggtagctttaaaagccttggggactttaaaacttacgggaaggctgacaacactgccttcagagaattaattacggctaaagaaattgagaaaaatgtgcaggaaatgagcaaaggctcggctcccggtccagacgggattactcttggggacgtcgtaaagatggatcccgagttttcccggaccatggagattttcaatttatggttaacaactggtaaaatcccggacatggtgagggggtgcagaaccgttttgattccaaaatcatcaaagccggatcgtttgaaagacattaataactggagacctatcacgatcggttccatcttgctgagactgttctccaggattgtaacagctaggctgagcaaagcgtgccccctgaacccaaggcaaagaggctttatcagagcggcgggatgctctgaaaacttaaaactcctgcaaactataatttggtcggccaaaagagaacacagaccactgggtgttgtattcgtggacatcgccaaggcttttgacaccgtaagccaccagcacatcattcatgctttgcagcaaagagaggtggatccccacatcgtcggtctggtgagcaatatgtacgagaacatcagtacgtatatcaccacaaagaggaacacacacacagacaaaatccagatccgggttggagtaaagcagggtgacccgatgtcgccccttttatttaacctggcaatggaccctctattatgcaagctggaagagagtggcaaaggataccaccgaggacagagcagcatcacagcgatggcatttgcagacgatctggttttgctgagcgactcctgggccaatatggccgccaatattgccatactggccgccttctgcgccctgaccggactcaaaacacaggggcaaaagtgccacggcttttacatcaagccgacaaaggactcttacaccatcaatgactgcgctgcctggactatcaacggcacacccctgaacatgatcgaccccggcgaatctgagaaatacctcggcctgcagtttgacccgtggattggaatagcaaggtccggtctctccacaaaactagatttttggcttcagcggatcgatcaagcaccacttaaacctctgcagaaaactgatattctcaaaacatacaccatccctcggctgatctacatagctgaccactcagaagtgaaaagcgcactactcgaaacccttgaccagaagatccggacagcggtcaaggaatggcttcacctacctccgtgcacctgcgatgccatcctgtactcgagcacgagagacggcggtttgggcatcaccaaattggcaggactgatccccagcgtgcaggcccgtagactgcatcggatcgcacagtcatctgacgatacgatgaaatgcttcatggaaaaagagaaaatggaacagctgcataagaaattgtggattcaagctggaggggacagagagaacataccctcgatttgggaagcaccaccgtcgagtgaaccaccaaacaacgtgagcacaaattcggaatgggaagcaccgacccagaaagataaatttccaaagccttgcaattggaggaaaaacgaattcaaaaaatggaccaaattggcatcccaaggccgcggaattgtaaattttgaaagagacaaaattagtaaccattggatccaatactacagacgcatacctcacaggaaactcctcactgcactacaactcagggccaacgtttaccccacgagagaatttctagccaggggtagacaagaccaatacatcaaggcgtgtaggcactgcgatgcggacaacgaatcctgcgcccacatcatcggcaactgcccagtgacacaggacgcccgaatcaagaggcacaattacatctgcgaactgcttctcgaggaggcgaagaagaaggactgggtagtgttcaaggaaccgcacataagggattccaacaaggaactgtacaaacctgacctgatatttgtgaaggatgggcgtgcacttgtcgtggatgtgacagtacggtatgaagcagccaaatcatcgctggaggaagccgctgcagagaaagtgagaaagtacaaacacctggaaacggaagtaagacatctcacgaatgcaaaggacgttacttttgtgggctttcccctaggagcgcgggggaaatggcaccaagataactttaaacttttgactgagcttggcctctccaaatcgaggcaagtgaaaatggcagagactttttccacagtagcgctcttttcatctgtggacattgtacatatgtttgccagtagggccagaaaatctatggttatgtgataataggctgccttctgcggggcttgccttctggccatgcccttcttctctcccttgcacctgtacctcttggtctttgaataaagcctgagtaggaaggaccggtaaaaaaaaaaaaaaaaaaaaaaaaaaaaaaacgttgactaaaaaaaaaaaaaaaaaaaaaaaaaaaaaaaaaaaaaaaaaaaaaaaaaaaaaaaaaaaaaaaaaaaaaa

SEQ ID NO: 11166 - DNA, 5264 bp, synthetic construct
  source 1..5264: mol_type = other DNA
gaaataagagagaaaagaagagtaagaagaaatataagagaattcgccaccatggcccctaagaaaaagcggaaggtgaatatcagcggctctagctgcggcagccccaacagcgccgacaccagcagcgacttcaaggacctgtggaccaagctgaaggaatgccacgaccgggaagtgcagggactccaggtgaaggtcaccaaactcaagcaagaaagaatcctggacgcccagagactggaagaattcttcaccaagaaccagcagctgagagagcagcagaaagtgctgcacgagacaatcaaggttctggaagatagactgcgggccggcctgtgcgacagatgcgccgtgaccgaggaacacatgcgcaaaaagcagcaggagttcgagaacattagacagcaaaatctgaaattgatcacagagctgatgaacgagagaaacacactgcaggaggagaacaagaagctgagcgagcagctgcaacagaagatcgagaatgatcagcaacaccaggccgctgagctggaatgtgaagaggacgtgatccccgacagcccaatcacagctttcagcttttctggcgtgaacagactgaggcggaaggaaaacccccacgtgcggtacatcgagcagacccataccaagctggaacacagcgtgtgtgccaacgagatgagaaaggtgtccaagtcctccacccatccccagcacaaccctaacgaaaatgagatcctggtggctgatacctacgaccagtctcagagccctatggccaaggcccacggcaccagctcttatacccctgataagagctccttcaacctggccaccgtggtggccgagacactgggcctgggcgtgcaggaggaaagcgagacacagggcccaatgagccctctgggagatgagctgtaccactgcctggaaggcaaccacaagaaacagccttttgagtccggctccgagactcctggaacaagcgagagcgctacacctgagggcagccctaagagaaaggtgtccagcgccgagggcgctgccaaggaagagcctaaacggagaagcgccagactgagcgccaagccccccgccaaggtggaagccaagcctaagaaggccgccgctaaggacaagagcagcgataagaaagtccagaccaagggcaagcggggcgccaaaggcaaacaggccgaggtggccaaccaggagacaaaggaagatctgcctgctgagaacggcgaaaccaagaccgaggaatctccagcttctgacgaggccggagagaaggaggccaaaagcgacagcggctctgagacacctggaacaagcgagagcgccaccccggaatcctatgaacaacttgcaccacaaccgtgtgtgggagaaactttacattctagcctcccacgagacagtgaactgtttgtgcctgaagaggggagcagcgagaaggagagcgaggacgcgccaaaaacatctcctccgacgcctgggaaacatggtttggaacagactggggaggaaaaagtgatggtgactgttcctgacaaaaatccaccttgtccttgctgtggtacccgggtaaactctgtgttgaatctgattgaacatctgaaagtgtcacacgggaaaaggggggtttgttttcggtgtgcaaaatgtggaaaggaaaatagtaactatcacagtgttgtttgtcattttaagaaatgcaggggtccagagacggagaaagccccagctggggagtggatttgtgaggtatgcaacagagattttacaaccaaaattggcctgggacaacacaagagattggcacacccagcagtgagaaatcaggaaaggatcgttgcttcccaaccgaaagaaacatcaaatagaggtgctcacaaaaggtgctggacaaaggaggaggaagaattactaataagactggaggctcagttcgagggaaacaaaaatattaataagcttattgcagaacacataaccaccaaaacagctaagcagatcagtgacaaaaggcgattgctgtccagaaagccagcagaggagccacgtgaggagcctggaacgtgtcatcacaccaggagagcagctgcgagcctgagaacggagcctgagatgagtcatcacgcccaggcagaggacagagataatggacctgggagacgccctctgccaggcagggcagctgccggagggagaacaatggacgagataagacgccaccctgataagggcaacggacagcagagacccaccaagcaaaaatcagaagaacagctgcaggcttactataaaaagacactagaggaacgactttcagctggggcacttaacaccttcccccgagcattcaagcaggtaatggaaggccgggatataaagctagtaatcaatcagacagcgcaggactgcttcggatgcctggaatccataagccaaataagaacggcaacccgagataaaaaggacacggtgacccgggagaaacacccaaagaaaccttttcagaagtggatgaagaagagagcaatcaaaaaaggtaattatcttcggttccagcgtttattttatcttgatagagggaaactggctaaaatcattttagatgatattgaatgcttgtcttgtgacataccactcagtgaaatttattcggtttttaaaacaagatgggaaacaactggtagctttaaaagccttggggactttaaaacttacgggaaggctgacaacactgccttcagagaattaattacggctaaagaaattgagaaaaatgtgcaggaaatgagcaaaggctcggctcccggtccagacgggattactcttggggacgtcgtaaagatggatcccgagttttcccggaccatggagattttcaatttatggttaacaactggtaaaatcccggacatggtgagggggtgcagaaccgttttgattccaaaatcatcaaagccggatcgtttgaaagacattaataactggagacctatcacgatcggttccatcttgctgagactgttctccaggattgtaacagctaggctgagcaaagcgtgccccctgaacccaaggcaaagaggctttatcagagcggcgggatgctctgaaaacttaaaactcctgcaaactataatttggtcggccaaaagagaacacagaccactgggtgttgtattcgtggacatcgccaaggcttttgacaccgtaagccaccagcacatcattcatgctttgcagcaaagagaggtggatccccacatcgtcggtctggtgagcaatatgtacgagaacatcagtacgtatatcaccacaaagaggaacacacacacagacaaaatccagatccgggttggagtaaagcagggtgacccgatgtcgccccttttatttaacctggcaatggaccctctattatgcaagctggaagagagtggcaaaggataccaccgaggacagagcagcatcacagcgatggcatttgcagacgatctggttttgctgagcgactcctgggaaaatatgaatacaaatattagcatactggagaccttctgcaatctgaccggactcaaaacacaggggcaaaagtgccacggcttttacatcaagccgacaaaggactcttacaccatcaatgactgcgctgcctgggtgatcaaccccacaggcctgaacatgatcgaccccggcgaatctgagaaatacctcggcctgcagtttgacccgtggattggaatagcaaggtccggtctctccacaaaactagatttttggcttcagcggatcgatcaagcaccacttaaacctctgcagaaaactgatattctcaaaacatacaccatccctcggctgatctacatagctgaccactcagaagtgaaaagcgcactactcgaaacccttgaccagaagatccggacagcggtcaaggaatggcttcacctacctccgtgcacctgcgatgccatcctgtactcgagcacgagagacggcggtttgggcatcaccaaattggcaggactgatccccagcgtgcaggcccgtagactgcatcggatcgcacagtcatctgacgatacgatgaaatgcttcatggaaaaagagaaaatggaacagctgcataagaaattgtggattcaagctggaggggacagagagaacataccctcgatttgggaagcaccaccgtcgagtgaaccaccaaacaacgtgagcacaaattcggaatgggaagcaccgacccagaaagataaatttccaaagccttgcaattggaggaaaaacgaattcaaaaaatggaccaaattggcatcccaaggccgcggaattgtaaattttgaaagagacaaaattagtaaccattggatccaatactacagacgcatacctcacaggaaactcctcactgcactacaactcagggccaacgtttaccccacgagagaatttctagccaggggtagacaagaccaatacatcaaggcgtgtaggcactgcgatgcggacaacgaatcctgcgcccacatcatcggcaactgcccagtgacacaggacgcccgaatcaagaggcacaattacatctgcgaactgcttctcgaggaggcgaagaagaaggactgggtagtgttcaaggaaccgcacataagggattccaacaaggaactgtacaaacctgacctgatatttgtgaaggatgggcgtgcacttgtcgtggatgtgacagtacggtatgaagcagccaaatcatcgctggaggaagccgctgcagagaaagtgagaaagtacaaacacctggaaacggaagtaagacatctcacgaatgcaaaggacgttacttttgtgggctttcccctaggagcgcgggggaaatggcaccaagataactttaaacttttgactgagcttggcctctccaaatcgaggcaagtgaaaatggcagagactttttccacagtagcgctcttttcatctgtggacattgtacatatgtttgccagtagggccagaaaatctatggttatgtgataataggctgccttctgcggggcttgccttctggccatgcccttcttctctcccttgcacctgtacctcttggtctttgaataaagcctgagtaggaaggaccggtaaaaaaaaaaaaaaaaaaaaaaaaaaaaaaacgttgactaaaaaaaaaaaaaaaaaaaaaaaaaaaaaaaaaaaaaaaaaaaaaaaaaaaaaaaaaaaaaaaaaaaaaa

SEQ ID NO: 11167 - DNA, 5264 bp, synthetic construct
  source 1..5264: mol_type = other DNA
gaaataagagagaaaagaagagtaagaagaaatataagagaattcgccaccatggcccctaagaaaaagcggaaggtgaatatcagcggctctagctgcggcagccccaacagcgccgacaccagcagcgacttcaaggacctgtggaccaagctgaaggaatgccacgaccgggaagtgcagggactccaggtgaaggtcaccaaactcaagcaagaaagaatcctggacgcccagagactggaagaattcttcaccaagaaccagcagctgagagagcagcagaaagtgctgcacgagacaatcaaggttctggaagatagactgcgggccggcctgtgcgacagatgcgccgtgaccgaggaacacatgcgcaaaaagcagcaggagttcgagaacattagacagcaaaatctgaaattgatcacagagctgatgaacgagagaaacacactgcaggaggagaacaagaagctgagcgagcagctgcaacagaagatcgagaatgatcagcaacaccaggccgctgagctggaatgtgaagaggacgtgatccccgacagcccaatcacagctttcagcttttctggcgtgaacagactgaggcggaaggaaaacccccacgtgcggtacatcgagcagacccataccaagctggaacacagcgtgtgtgccaacgagatgagaaaggtgtccaagtcctccacccatccccagcacaaccctaacgaaaatgagatcctggtggctgatacctacgaccagtctcagagccctatggccaaggcccacggcaccagctcttatacccctgataagagctccttcaacctggccaccgtggtggccgagacactgggcctgggcgtgcaggaggaaagcgagacacagggcccaatgagccctctgggagatgagctgtaccactgcctggaaggcaaccacaagaaacagccttttgagtccggctccgagactcctggaacaagcgagagcgctacacctgagggcagccctaagagaaaggtgtccagcgccgagggcgctgccaaggaagagcctaaacggagaagcgccagactgagcgccaagccccccgccaaggtggaagccaagcctaagaaggccgccgctaaggacaagagcagcgataagaaagtccagaccaagggcaagcggggcgccaaaggcaaacaggccgaggtggccaaccaggagacaaaggaagatctgcctgctgagaacggcgaaaccaagaccgaggaatctccagcttctgacgaggccggagagaaggaggccaaaagcgacagcggctctgagacacctggaacaagcgagagcgccaccccggaatcctatgaacaacttgcaccacaaccgtgtgtgggagaaactttacattctagcctcccacgagacagtgaactgtttgtgcctgaagaggggagcagcgagaaggagagcgaggacgcgccaaaaacatctcctccgacgcctgggaaacatggtttggaacagactggggaggaaaaagtgatggtgactgttcctgacaaaaatccaccttgtccttgctgtggtacccgggtaaactctgtgttgaatctgattgaacatctgaaagtgtcacacgggaaaaggggggtttgttttcggtgtgcaaaatgtggaaaggaaaatagtaactatcacagtgttgtttgtcattttaagaaatgcaggggtccagagacggagaaagccccagctggggagtggatttgtgaggtatgcaacagagattttacaaccaaaattggcctgggacaacacaagagattggcacacccagcagtgagaaatcaggaaaggatcgttgcttcccaaccgaaagaaacatcaaatagaggtgctcacaaaaggtgctggacaaaggaggaggaagaattactaataagactggaggctcagttcgagggaaacaaaaatattaataagcttattgcagaacacataaccaccaaaacagctaagcagatcagtgacaaaaggcgattgctgtccagaaagccagcagaggagccacgtgaggagcctggaacgtgtcatcacaccaggagagcagctgcgagcctgagaacggagcctgagatgagtcatcacgcccaggcagaggacagagataatggacctgggagacgccctctgccaggcagggcagctgccggagggagaacaatggacgagataagacgccaccctgataagggcaacggacagcagagacccaccaagcaaaaatcagaagaacagctgcaggcttactataaaaagacactagaggaacgactttcagctggggcacttaacaccttcccccgagcattcaagcaggtaatggaaggccgggatataaagctagtaatcaatcagacagcgcaggactgcttcggatgcctggaatccataagccaaataagaacggcaacccgagataaaaaggacacggtgacccgggagaaacacccaaagaaaccttttcagaagtggatgaagaagagagcaatcaaaaaaggtaattatcttcggttccagcgtttattttatcttgatagagggaaactggctaaaatcattttagatgatattgaatgcttgtcttgtgacataggcctcgtgagcatttatgtggtttttaaaacaagatgggaaacaactggtagctttaaaagccttggggactttaaaacttacgggaaggctgacaacactgccttcagagaattaattacggctaaagaaattgagaaaaatgtgcaggaaatgagcaaaggctcggctcccggtccagacgggattactcttggggacgtcgtaaagatggatcccgagttttcccggaccatggagattttcaatttatggttaacaactggtaaaatcccggacatggtgagggggtgcagaaccgttttgattccaaaatcatcaaagccggatcgtttgaaagacattaataactggagacctatcacgatcggttccatcttgctgagactgttctccaggattgtaacagctaggctgagcaaagcgtgccccctgaacccaaggcaaagaggctttatcagagcggcgggatgctctgaaaacttaaaactcctgcaaactataatttggtcggccaaaagagaacacagaccactgggtgttgtattcgtggacatcgccaaggcttttgacaccgtaagccaccagcacatcattcatgctttgcagcaaagagaggtggatccccacatcgtcggtctggtgagcaatatgtacgagaacatcagtacgtatatcaccacaaagaggaacacacacacagacaaaatccagatccgggttggagtaaagcagggtgacccgatgtcgccccttttatttaacctggcaatggaccctctattatgcaagctggaagagagtggcaaaggataccaccgaggacagagcagcatcacagcgatggcatttgcagacgatctggttttgctgagcgactcctggagcaatatgagcgtgaatattgccatactggagaccttctgcaatctgaccggactcaaaacacaggggcaaaagtgccacggcttttacatcaagccgacaaaggactcttacaccatcaatgactgcgctgcctggactatcaacggcacacccctgaacatgatcgaccccggcgaatctgagaaatacctcggcctgcagtttgacccgtggattggaatagcaaggtccggtctctccacaaaactagatttttggcttcagcggatcgatcaagcaccacttaaacctctgcagaaaactgatattctcaaaacatacaccatccctcggctgatctacatagctgaccactcagaagtgaaaagcgcactactcgaaacccttgaccagaagatccggacagcggtcaaggaatggcttcacctacctccgtgcacctgcgatgccatcctgtactcgagcacgagagacggcggtttgggcatcaccaaattggcaggactgatccccagcgtgcaggcccgtagactgcatcggatcgcacagtcatctgacgatacgatgaaatgcttcatggaaaaagagaaaatggaacagctgcataagaaattgtggattcaagctggaggggacagagagaacataccctcgatttgggaagcaccaccgtcgagtgaaccaccaaacaacgtgagcacaaattcggaatgggaagcaccgacccagaaagataaatttccaaagccttgcaattggaggaaaaacgaattcaaaaaatggaccaaattggcatcccaaggccgcggaattgtaaattttgaaagagacaaaattagtaaccattggatccaatactacagacgcatacctcacaggaaactcctcactgcactacaactcagggccaacgtttaccccacgagagaatttctagccaggggtagacaagaccaatacatcaaggcgtgtaggcactgcgatgcggacaacgaatcctgcgcccacatcatcggcaactgcccagtgacacaggacgcccgaatcaagaggcacaattacatctgcgaactgcttctcgaggaggcgaagaagaaggactgggtagtgttcaaggaaccgcacataagggattccaacaaggaactgtacaaacctgacctgatatttgtgaaggatgggcgtgcacttgtcgtggatgtgacagtacggtatgaagcagccaaatcatcgctggaggaagccgctgcagagaaagtgagaaagtacaaacacctggaaacggaagtaagacatctcacgaatgcaaaggacgttacttttgtgggctttcccctaggagcgcgggggaaatggcaccaagataactttaaacttttgactgagcttggcctctccaaatcgaggcaagtgaaaatggcagagactttttccacagtagcgctcttttcatctgtggacattgtacatatgtttgccagtagggccagaaaatctatggttatgtgataataggctgccttctgcggggcttgccttctggccatgcccttcttctctcccttgcacctgtacctcttggtctttgaataaagcctgagtaggaaggaccggtaaaaaaaaaaaaaaaaaaaaaaaaaaaaaaacgttgactaaaaaaaaaaaaaaaaaaaaaaaaaaaaaaaaaaaaaaaaaaaaaaaaaaaaaaaaaaaaaaaaaaaaaa

SEQ ID NO: 11168 - DNA, 5264 bp, synthetic construct
  source 1..5264: mol_type = other DNA
gaaataagagagaaaagaagagtaagaagaaatataagagaattcgccaccatggcccctaagaaaaagcggaaggtgaatatcagcggctctagctgcggcagccccaacagcgccgacaccagcagcgacttcaaggacctgtggaccaagctgaaggaatgccacgaccgggaagtgcagggactccaggtgaaggtcaccaaactcaagcaagaaagaatcctggacgcccagagactggaagaattcttcaccaagaaccagcagctgagagagcagcagaaagtgctgcacgagacaatcaaggttctggaagatagactgcgggccggcctgtgcgacagatgcgccgtgaccgaggaacacatgcgcaaaaagcagcaggagttcgagaacattagacagcaaaatctgaaattgatcacagagctgatgaacgagagaaacacactgcaggaggagaacaagaagctgagcgagcagctgcaacagaagatcgagaatgatcagcaacaccaggccgctgagctggaatgtgaagaggacgtgatccccgacagcccaatcacagctttcagcttttctggcgtgaacagactgaggcggaaggaaaacccccacgtgcggtacatcgagcagacccataccaagctggaacacagcgtgtgtgccaacgagatgagaaaggtgtccaagtcctccacccatccccagcacaaccctaacgaaaatgagatcctggtggctgatacctacgaccagtctcagagccctatggccaaggcccacggcaccagctcttatacccctgataagagctccttcaacctggccaccgtggtggccgagacactgggcctgggcgtgcaggaggaaagcgagacacagggcccaatgagccctctgggagatgagctgtaccactgcctggaaggcaaccacaagaaacagccttttgagtccggctccgagactcctggaacaagcgagagcgctacacctgagggcagccctaagagaaaggtgtccagcgccgagggcgctgccaaggaagagcctaaacggagaagcgccagactgagcgccaagccccccgccaaggtggaagccaagcctaagaaggccgccgctaaggacaagagcagcgataagaaagtccagaccaagggcaagcggggcgccaaaggcaaacaggccgaggtggccaaccaggagacaaaggaagatctgcctgctgagaacggcgaaaccaagaccgaggaatctccagcttctgacgaggccggagagaaggaggccaaaagcgacagcggctctgagacacctggaacaagcgagagcgccaccccggaatcctatgaacaacttgcaccacaaccgtgtgtgggagaaactttacattctagcctcccacgagacagtgaactgtttgtgcctgaagaggggagcagcgagaaggagagcgaggacgcgccaaaaacatctcctccgacgcctgggaaacatggtttggaacagactggggaggaaaaagtgatggtgactgttcctgacaaaaatccaccttgtccttgctgtggtacccgggtaaactctgtgttgaatctgattgaacatctgaaagtgtcacacgggaaaaggggggtttgttttcggtgtgcaaaatgtggaaaggaaaatagtaactatcacagtgttgtttgtcattttaagaaatgcaggggtccagagacggagaaagccccagctggggagtggatttgtgaggtatgcaacagagattttacaaccaaaattggcctgggacaacacaagagattggcacacccagcagtgagaaatcaggaaaggatcgttgcttcccaaccgaaagaaacatcaaatagaggtgctcacaaaaggtgctggacaaaggaggaggaagaattactaataagactggaggctcagttcgagggaaacaaaaatattaataagcttattgcagaacacataaccaccaaaacagctaagcagatcagtgacaaaaggcgattgctgtccagaaagccagcagaggagccacgtgaggagcctggaacgtgtcatcacaccaggagagcagctgcgagcctgagaacggagcctgagatgagtcatcacgcccaggcagaggacagagataatggacctgggagacgccctctgccaggcagggcagctgccggagggagaacaatggacgagataagacgccaccctgataagggcaacggacagcagagacccaccaagcaaaaatcagaagaacagctgcaggcttactataaaaagacactagaggaacgactttcagctggggcacttaacaccttcccccgagcattcaagcaggtaatggaaggccgggatataaagctagtaatcaatcagacagcgcaggactgcttcggatgcctggaatccataagccaaataagaacggcaacccgagataaaaaggacacggtgacccgggagaaacacccaaagaaaccttttcagaagtggatgaagaagagagcaatcaaaaaaggtaattatcttcggttccagcgtttattttatcttgatagagggaaactggctaaaatcattttagatgatattgaatgcttgtcttgtgacataggcctcgtgagcatttatgtggtttttaaaacaagatgggaaacaactggtagctttaaaagccttggggactttaaaacttacgggaaggctgacaacactgccttcagagaattaattacggctaaagaaattgagaaaaatgtgcaggaaatgagcaaaggctcggctcccggtccagacgggattactcttggggacgtcgtaaagatggatcccgagttttcccggaccatggagattttcaatttatggttaacaactggtaaaatcccggacatggtgagggggtgcagaaccgttttgattccaaaatcatcaaagccggatcgtttgaaagacattaataactggagacctatcacgatcggttccatcttgctgagactgttctccaggattgtaacagctaggctgagcaaagcgtgccccctgaacccaaggcaaagaggctttatcagagcggcgggatgctctgaaaacttaaaactcctgcaaactataatttggtcggccaaaagagaacacagaccactgggtgttgtattcgtggacatcgccaaggcttttgacaccgtaagccaccagcacatcattcatgctttgcagcaaagagaggtggatccccacatcgtcggtctggtgagcaatatgtacgagaacatcagtacgtatatcaccacaaagaggaacacacacacagacaaaatccagatccgggttggagtaaagcagggtgacccgatgtcgccccttttatttaacctggcaatggaccctctattatgcaagctggaagagagtggcaaaggataccaccgaggacagagcagcatcacagcgatggcatttgcagacgatctggttttgctgagcgactcctgggaaaatatgaatacaaatattagcatactgagcgccttctgcagcctgaccggactcaaaacacaggggcaaaagtgccacggcttttacatcaagccgacaaaggactcttacaccatcaatgactgcgctgcctggactatcaacggcacacccctgaacatgatcgaccccggcgaatctgagaaatacctcggcctgcagtttgacccgtggattggaatagcaaggtccggtctctccacaaaactagatttttggcttcagcggatcgatcaagcaccacttaaacctctgcagaaaactgatattctcaaaacatacaccatccctcggctgatctacatagctgaccactcagaagtgaaaagcgcactactcgaaacccttgaccagaagatccggacagcggtcaaggaatggcttcacctacctccgtgcacctgcgatgccatcctgtactcgagcacgagagacggcggtttgggcatcaccaaattggcaggactgatccccagcgtgcaggcccgtagactgcatcggatcgcacagtcatctgacgatacgatgaaatgcttcatggaaaaagagaaaatggaacagctgcataagaaattgtggattcaagctggaggggacagagagaacataccctcgatttgggaagcaccaccgtcgagtgaaccaccaaacaacgtgagcacaaattcggaatgggaagcaccgacccagaaagataaatttccaaagccttgcaattggaggaaaaacgaattcaaaaaatggaccaaattggcatcccaaggccgcggaattgtaaattttgaaagagacaaaattagtaaccattggatccaatactacagacgcatacctcacaggaaactcctcactgcactacaactcagggccaacgtttaccccacgagagaatttctagccaggggtagacaagaccaatacatcaaggcgtgtaggcactgcgatgcggacaacgaatcctgcgcccacatcatcggcaactgcccagtgacacaggacgcccgaatcaagaggcacaattacatctgcgaactgcttctcgaggaggcgaagaagaaggactgggtagtgttcaaggaaccgcacataagggattccaacaaggaactgtacaaacctgacctgatatttgtgaaggatgggcgtgcacttgtcgtggatgtgacagtacggtatgaagcagccaaatcatcgctggaggaagccgctgcagagaaagtgagaaagtacaaacacctggaaacggaagtaagacatctcacgaatgcaaaggacgttacttttgtgggctttcccctaggagcgcgggggaaatggcaccaagataactttaaacttttgactgagcttggcctctccaaatcgaggcaagtgaaaatggcagagactttttccacagtagcgctcttttcatctgtggacattgtacatatgtttgccagtagggccagaaaatctatggttatgtgataataggctgccttctgcggggcttgccttctggccatgcccttcttctctcccttgcacctgtacctcttggtctttgaataaagcctgagtaggaaggaccggtaaaaaaaaaaaaaaaaaaaaaaaaaaaaaaacgttgactaaaaaaaaaaaaaaaaaaaaaaaaaaaaaaaaaaaaaaaaaaaaaaaaaaaaaaaaaaaaaaaaaaaaaa

SEQ ID NO: 11169 - DNA, 5264 bp, synthetic construct
  source 1..5264: mol_type = other DNA
gaaataagagagaaaagaagagtaagaagaaatataagagaattcgccaccatggcccctaagaaaaagcggaaggtgaatatcagcggctctagctgcggcagccccaacagcgccgacaccagcagcgacttcaaggacctgtggaccaagctgaaggaatgccacgaccgggaagtgcagggactccaggtgaaggtcaccaaactcaagcaagaaagaatcctggacgcccagagactggaagaattcttcaccaagaaccagcagctgagagagcagcagaaagtgctgcacgagacaatcaaggttctggaagatagactgcgggccggcctgtgcgacagatgcgccgtgaccgaggaacacatgcgcaaaaagcagcaggagttcgagaacattagacagcaaaatctgaaattgatcacagagctgatgaacgagagaaacacactgcaggaggagaacaagaagctgagcgagcagctgcaacagaagatcgagaatgatcagcaacaccaggccgctgagctggaatgtgaagaggacgtgatccccgacagcccaatcacagctttcagcttttctggcgtgaacagactgaggcggaaggaaaacccccacgtgcggtacatcgagcagacccataccaagctggaacacagcgtgtgtgccaacgagatgagaaaggtgtccaagtcctccacccatccccagcacaaccctaacgaaaatgagatcctggtggctgatacctacgaccagtctcagagccctatggccaaggcccacggcaccagctcttatacccctgataagagctccttcaacctggccaccgtggtggccgagacactgggcctgggcgtgcaggaggaaagcgagacacagggcccaatgagccctctgggagatgagctgtaccactgcctggaaggcaaccacaagaaacagccttttgagtccggctccgagactcctggaacaagcgagagcgctacacctgagggcagccctaagagaaaggtgtccagcgccgagggcgctgccaaggaagagcctaaacggagaagcgccagactgagcgccaagccccccgccaaggtggaagccaagcctaagaaggccgccgctaaggacaagagcagcgataagaaagtccagaccaagggcaagcggggcgccaaaggcaaacaggccgaggtggccaaccaggagacaaaggaagatctgcctgctgagaacggcgaaaccaagaccgaggaatctccagcttctgacgaggccggagagaaggaggccaaaagcgacagcggctctgagacacctggaacaagcgagagcgccaccccggaatcctatgaacaacttgcaccacaaccgtgtgtgggagaaactttacattctagcctcccacgagacagtgaactgtttgtgcctgaagaggggagcagcgagaaggagagcgaggacgcgccaaaaacatctcctccgacgcctgggaaacatggtttggaacagactggggaggaaaaagtgatggtgactgttcctgacaaaaatccaccttgtccttgctgtggtacccgggtaaactctgtgttgaatctgattgaacatctgaaagtgtcacacgggaaaaggggggtttgttttcggtgtgcaaaatgtggaaaggaaaatagtaactatcacagtgttgtttgtcattttaagaaatgcaggggtccagagacggagaaagccccagctggggagtggatttgtgaggtatgcaacagagattttacaaccaaaattggcctgggacaacacaagagattggcacacccagcagtgagaaatcaggaaaggatcgttgcttcccaaccgaaagaaacatcaaatagaggtgctcacaaaaggtgctggacaaaggaggaggaagaattactaataagactggaggctcagttcgagggaaacaaaaatattaataagcttattgcagaacacataaccaccaaaacagctaagcagatcagtgacaaaaggcgattgctgtccagaaagccagcagaggagccacgtgaggagcctggaacgtgtcatcacaccaggagagcagctgcgagcctgagaacggagcctgagatgagtcatcacgcccaggcagaggacagagataatggacctgggagacgccctctgccaggcagggcagctgccggagggagaacaatggacgagataagacgccaccctgataagggcaacggacagcagagacccaccaagcaaaaatcagaagaacagctgcaggcttactataaaaagacactagaggaacgactttcagctggggcacttaacaccttcccccgagcattcaagcaggtaatggaaggccgggatataaagctagtaatcaatcagacagcgcaggactgcttcggatgcctggaatccataagccaaataagaacggcaacccgagataaaaaggacacggtgacccgggagaaacacccaaagaaaccttttcagaagtggatgaagaagagagcaatcaaaaaaggtaattatcttcggttccagcgtttattttatcttgatagagggaaactggctaaaatcattttagatgatattgaatgcttgtcttgtgacataggcctcgtgagcatttatgtggtttttaaaacaagatgggaaacaactggtagctttaaaagccttggggactttaaaacttacgggaaggctgacaacactgccttcagagaattaattacggctaaagaaattgagaaaaatgtgcaggaaatgagcaaaggctcggctcccggtccagacgggattactcttggggacgtcgtaaagatggatcccgagttttcccggaccatggagattttcaatttatggttaacaactggtaaaatcccggacatggtgagggggtgcagaaccgttttgattccaaaatcatcaaagccggatcgtttgaaagacattaataactggagacctatcacgatcggttccatcttgctgagactgttctccaggattgtaacagctaggctgagcaaagcgtgccccctgaacccaaggcaaagaggctttatcagagcggcgggatgctctgaaaacttaaaactcctgcaaactataatttggtcggccaaaagagaacacagaccactgggtgttgtattcgtggacatcgccaaggcttttgacaccgtaagccaccagcacatcattcatgctttgcagcaaagagaggtggatccccacatcgtcggtctggtgagcaatatgtacgagaacatcagtacgtatatcaccacaaagaggaacacacacacagacaaaatccagatccgggttggagtaaagcagggtgacccgatgtcgccccttttatttaacctggcaatggaccctctattatgcaagctggaagagagtggcaaaggataccaccgaggacagagcagcatcacagcgatggcatttgcagacgatctggttttgctgagcgactcctgggaaaatatgaatacaaatattagcatactggagaccttctgcaatctgaccggactcaaaacacaggggcaaaagtgccacggcttttacatcaagccgacaaaggactcttacaccatcaatgactgcgctgcctgggccatcaacgccacacccctgaacatgatcgaccccggcgaatctgagaaatacctcggcctgcagtttgacccgtggattggaatagcaaggtccggtctctccacaaaactagatttttggcttcagcggatcgatcaagcaccacttaaacctctgcagaaaactgatattctcaaaacatacaccatccctcggctgatctacatagctgaccactcagaagtgaaaagcgcactactcgaaacccttgaccagaagatccggacagcggtcaaggaatggcttcacctacctccgtgcacctgcgatgccatcctgtactcgagcacgagagacggcggtttgggcatcaccaaattggcaggactgatccccagcgtgcaggcccgtagactgcatcggatcgcacagtcatctgacgatacgatgaaatgcttcatggaaaaagagaaaatggaacagctgcataagaaattgtggattcaagctggaggggacagagagaacataccctcgatttgggaagcaccaccgtcgagtgaaccaccaaacaacgtgagcacaaattcggaatgggaagcaccgacccagaaagataaatttccaaagccttgcaattggaggaaaaacgaattcaaaaaatggaccaaattggcatcccaaggccgcggaattgtaaattttgaaagagacaaaattagtaaccattggatccaatactacagacgcatacctcacaggaaactcctcactgcactacaactcagggccaacgtttaccccacgagagaatttctagccaggggtagacaagaccaatacatcaaggcgtgtaggcactgcgatgcggacaacgaatcctgcgcccacatcatcggcaactgcccagtgacacaggacgcccgaatcaagaggcacaattacatctgcgaactgcttctcgaggaggcgaagaagaaggactgggtagtgttcaaggaaccgcacataagggattccaacaaggaactgtacaaacctgacctgatatttgtgaaggatgggcgtgcacttgtcgtggatgtgacagtacggtatgaagcagccaaatcatcgctggaggaagccgctgcagagaaagtgagaaagtacaaacacctggaaacggaagtaagacatctcacgaatgcaaaggacgttacttttgtgggctttcccctaggagcgcgggggaaatggcaccaagataactttaaacttttgactgagcttggcctctccaaatcgaggcaagtgaaaatggcagagactttttccacagtagcgctcttttcatctgtggacattgtacatatgtttgccagtagggccagaaaatctatggttatgtgataataggctgccttctgcggggcttgccttctggccatgcccttcttctctcccttgcacctgtacctcttggtctttgaataaagcctgagtaggaaggaccggtaaaaaaaaaaaaaaaaaaaaaaaaaaaaaaacgttgactaaaaaaaaaaaaaaaaaaaaaaaaaaaaaaaaaaaaaaaaaaaaaaaaaaaaaaaaaaaaaaaaaaaaaa

SEQ ID NO: 11170 - DNA, 5264 bp, synthetic construct
  source 1..5264: mol_type = other DNA
gaaataagagagaaaagaagagtaagaagaaatataagagaattcgccaccatggcccctaagaaaaagcggaaggtgaatatcagcggctctagctgcggcagccccaacagcgccgacaccagcagcgacttcaaggacctgtggaccaagctgaaggaatgccacgaccgggaagtgcagggactccaggtgaaggtcaccaaactcaagcaagaaagaatcctggacgcccagagactggaagaattcttcaccaagaaccagcagctgagagagcagcagaaagtgctgcacgagacaatcaaggttctggaagatagactgcgggccggcctgtgcgacagatgcgccgtgaccgaggaacacatgcgcaaaaagcagcaggagttcgagaacattagacagcaaaatctgaaattgatcacagagctgatgaacgagagaaacacactgcaggaggagaacaagaagctgagcgagcagctgcaacagaagatcgagaatgatcagcaacaccaggccgctgagctggaatgtgaagaggacgtgatccccgacagcccaatcacagctttcagcttttctggcgtgaacagactgaggcggaaggaaaacccccacgtgcggtacatcgagcagacccataccaagctggaacacagcgtgtgtgccaacgagatgagaaaggtgtccaagtcctccacccatccccagcacaaccctaacgaaaatgagatcctggtggctgatacctacgaccagtctcagagccctatggccaaggcccacggcaccagctcttatacccctgataagagctccttcaacctggccaccgtggtggccgagacactgggcctgggcgtgcaggaggaaagcgagacacagggcccaatgagccctctgggagatgagctgtaccactgcctggaaggcaaccacaagaaacagccttttgagtccggctccgagactcctggaacaagcgagagcgctacacctgagggcagccctaagagaaaggtgtccagcgccgagggcgctgccaaggaagagcctaaacggagaagcgccagactgagcgccaagccccccgccaaggtggaagccaagcctaagaaggccgccgctaaggacaagagcagcgataagaaagtccagaccaagggcaagcggggcgccaaaggcaaacaggccgaggtggccaaccaggagacaaaggaagatctgcctgctgagaacggcgaaaccaagaccgaggaatctccagcttctgacgaggccggagagaaggaggccaaaagcgacagcggctctgagacacctggaacaagcgagagcgccaccccggaatcctatgaacaacttgcaccacaaccgtgtgtgggagaaactttacattctagcctcccacgagacagtgaactgtttgtgcctgaagaggggagcagcgagaaggagagcgaggacgcgccaaaaacatctcctccgacgcctgggaaacatggtttggaacagactggggaggaaaaagtgatggtgactgttcctgacaaaaatccaccttgtccttgctgtggtacccgggtaaactctgtgttgaatctgattgaacatctgaaagtgtcacacgggaaaaggggggtttgttttcggtgtgcaaaatgtggaaaggaaaatagtaactatcacagtgttgtttgtcattttaagaaatgcaggggtccagagacggagaaagccccagctggggagtggatttgtgaggtatgcaacagagattttacaaccaaaattggcctgggacaacacaagagattggcacacccagcagtgagaaatcaggaaaggatcgttgcttcccaaccgaaagaaacatcaaatagaggtgctcacaaaaggtgctggacaaaggaggaggaagaattactaataagactggaggctcagttcgagggaaacaaaaatattaataagcttattgcagaacacataaccaccaaaacagctaagcagatcagtgacaaaaggcgattgctgtccagaaagccagcagaggagccacgtgaggagcctggaacgtgtcatcacaccaggagagcagctgcgagcctgagaacggagcctgagatgagtcatcacgcccaggcagaggacagagataatggacctgggagacgccctctgccaggcagggcagctgccggagggagaacaatggacgagataagacgccaccctgataagggcaacggacagcagagacccaccaagcaaaaatcagaagaacagctgcaggcttactataaaaagacactagaggaacgactttcagctggggcacttaacaccttcccccgagcattcaagcaggtaatggaaggccgggatataaagctagtaatcaatcagacagcgcaggactgcttcggatgcctggaatccataagccaaataagaacggcaacccgagataaaaaggacacggtgacccgggagaaacacccaaagaaaccttttcagaagtggatgaagaagagagcaatcaaaaaaggtaattatcttcggttccagcgtttattttatcttgatagagggaaactggctaaaatcattttagatgatattgaatgcttgtcttgtgacataccactcagtgaaatttattcggtttttaaaacaagatgggaaacaactggtagctttaaaagccttggggactttaaaacttacgggaaggctgacaacactgccttcagagaattaattacggctaaagaaattgagaaaaatgtgcaggaaatgagcaaaggctcggctcccggtccagacgggattactcttggggacgtcgtaaagatggatcccgagttttcccggaccatggagattttcaatttatggttaacaactggtaaaatcccggacatggtgagggggtgcagaaccgttttgattccaaaatcatcaaagccggatcgtttgaaagacattaataactggagacctatcacgatcggttccatcttgctgagactgttctccaggattgtaacagctaggctgagcaaagcgtgccccctgaacccaaggcaaagaggctttatcagagcggcgggatgctctgaaaacttaaaactcctgcaaactataatttggtcggccaaaagagaacacagaccactgggtgttgtattcgtggacatcgccaaggcttttgacaccgtaagccaccagcacatcattcatgctttgcagcaaagagaggtggatccccacatcgtcggtctggtgagcaatatgtacgagaacatcagtacgtatatcaccacaaagaggaacacacacacagacaaaatccagatccgggttggagtaaagcagggtgacccgatgtcgccccttttatttaacctggcaatggaccctctattatgcaagctggaagagagtggcaaaggataccaccgaggacagagcagcatcacagcgatggcatttgcagacgatctggttttgctgagcgactcctgggaaaatatgagcgtgaatattgtgatactggagaccttctgcaatctgaccggactcaaaacacaggggcaaaagtgccacggcttttacatcaagccgacaaaggactcttacaccatcaatgactgcgctgcctggactatcaacggcacacccctgaacatgatcgaccccggcgaatctgagaaatacctcggcctgcagtttgacccgtggattggaatagcaaggtccggtctctccacaaaactagatttttggcttcagcggatcgatcaagcaccacttaaacctctgcagaaaactgatattctcaaaacatacaccatccctcggctgatctacatagctgaccactcagaagtgaaaagcgcactactcgaaacccttgaccagaagatccggacagcggtcaaggaatggcttcacctacctccgtgcacctgcgatgccatcctgtactcgagcacgagagacggcggtttgggcatcaccaaattggcaggactgatccccagcgtgcaggcccgtagactgcatcggatcgcacagtcatctgacgatacgatgaaatgcttcatggaaaaagagaaaatggaacagctgcataagaaattgtggattcaagctggaggggacagagagaacataccctcgatttgggaagcaccaccgtcgagtgaaccaccaaacaacgtgagcacaaattcggaatgggaagcaccgacccagaaagataaatttccaaagccttgcaattggaggaaaaacgaattcaaaaaatggaccaaattggcatcccaaggccgcggaattgtaaattttgaaagagacaaaattagtaaccattggatccaatactacagacgcatacctcacaggaaactcctcactgcactacaactcagggccaacgtttaccccacgagagaatttctagccaggggtagacaagaccaatacatcaaggcgtgtaggcactgcgatgcggacaacgaatcctgcgcccacatcatcggcaactgcccagtgacacaggacgcccgaatcaagaggcacaattacatctgcgaactgcttctcgaggaggcggacaagaagaaagccgtagtgttcaaggaaccgcacataagggattccaacaaggaactgtacaaacctgacctgatatttgtgaaggatgggcgtgcacttgtcgtggatgtgacagtacggtatgaagcagccaaatcatcgctggaggaagccgctgcagagaaagtgagaaagtacaaacacctggaaacggaagtaagacatctcacgaatgcaaaggacgttacttttgtgggctttcccctaggagcgcgggggaaatggcaccaagataactttaaacttttgactgagcttggcctctccaaatcgaggcaagtgaaaatggcagagactttttccacagtagcgctcttttcatctgtggacattgtacatatgtttgccagtagggccagaaaatctatggttatgtgataataggctgccttctgcggggcttgccttctggccatgcccttcttctctcccttgcacctgtacctcttggtctttgaataaagcctgagtaggaaggaccggtaaaaaaaaaaaaaaaaaaaaaaaaaaaaaaacgttgactaaaaaaaaaaaaaaaaaaaaaaaaaaaaaaaaaaaaaaaaaaaaaaaaaaaaaaaaaaaaaaaaaaaaaa

SEQ ID NO: 11171-11217 - skipped (47 entries)

SEQ ID NO: 11218 - DNA, 5240 bp, synthetic construct
  source 1..5240: mol_type = other DNA
gaaataagagagaaaagaagagtaagaagaaatataagagaattcgccaccatgcctaagagaaaggtgtccagcgccgagggcgctgccaaggaagagcctaaacggagaagcgccagactgagcgccaagccccccgccaaggtggaagccaagcctaagaaggccgccgctaaggacaagagcagcgataagaaagtccagaccaagggcaagcggggcgccaaaggcaaacaggccgaggtggccaaccaggagacaaaggaagatctgcctgctgagaacggcgaaaccaagaccgaggaatctccagcttctgacgaggccggagagaaggaggccaaaagcgacagcggctctgagacacctggaacaagcgagagcgccaccccggaatccaatatcagcggctctagctgcggcagccccaacagcgccgacaccagcagcgacttcaaggacctgtggaccaagctgaaggaatgccacgaccgggaagtgcagggactccaggtgaaggtcaccaaactcaagcaagaaagaatcctggacgcccagagactggaagaattcttcaccaagaaccagcagctgagagagcagcagaaagtgctgcacgagacaatcaaggttctggaagatagactgcgggccggcctgtgcgacagatgcgccgtgaccgaggaacacatgcgcaaaaagcagcaggagttcgagaacattagacagcaaaatctgaaattgatcacagagctgatgaacgagagaaacacactgcaggaggagaacaagaagctgagcgagcagctgcaacagaagatcgagaatgatcagcaacaccaggccgctgagctggaatgtgaagaggacgtgatccccgacagcccaatcacagctttcagcttttctggcgtgaacagactgaggcggaaggaaaacccccacgtgcggtacatcgagcagacccataccaagctggaacacagcgtgtgtgccaacgagatgagaaaggtgtccaagtcctccacccatccccagcacaaccctaacgaaaatgagatcctggtggctgatacctacgaccagtctcagagccctatggccaaggcccacggcaccagctcttatacccctgataagagctccttcaacctggccaccgtggtggccgagacactgggcctgggcgtgcaggaggaaagcgagacacagggcccaatgagccctctgggagatgagctgtaccactgcctggaaggcaaccacaagaaacagccttttgagtccggctccgagactcctggaacaagcgagagcgctacacctgagggcagctatgaacaacttgcaccacaaccgtgtgtgggagaaactttacattctagcctcccacgagacagtgaactgtttgtgcctgaagaggggagcagcgagaaggagagcgaggacgcgccaaaaacatctcctccgacgcctgggaaacatggtttggaacagactggggaggaaaaagtgatggtgactgttcctgacaaaaatccaccttgtccttgctgtggtacccgggtaaactctgtgttgaatctgattgaacatctgaaagtgtcacacgggaaaaggggggtttgttttcggtgtgcaaaatgtggaaaggaaaatagtaactatcacagtgttgtttgtcattttaagaaatgcaggggtccagagacggagaaagccccagctggggagtggatttgtgaggtatgcaacagagattttacaaccaaaattggcctgggacaacacaagagattggcacacccagcagtgagaaatcaggaaaggatcgttgcttcccaaccgaaagaaacatcaaatagaggtgctcacaaaaggtgctggacaaaggaggaggaagaattactaataagactggaggctcagttcgagggaaacaaaaatattaataagcttattgcagaacacataaccaccaaaacagctaagcagatcagtgacaaaaggcgattgctgtccagaaagccagcagaggagccacgtgaggagcctggaacgtgtcatcacaccaggagagcagctgcgagcctgagaacggagcctgagatgagtcatcacgcccaggcagaggacagagataatggacctgggagacgccctctgccaggcagggcagctgccggagggagaacaatggacgagataagacgccaccctgataagggcaacggacagcagagacccaccaagcaaaaatcagaagaacagctgcaggcttactataaaaagacactagaggaacgactttcagctggggcacttaacaccttcccccgagcattcaagcaggtaatggaaggccgggatataaagctagtaatcaatcagacagcgcaggactgcttcggatgcctggaatccataagccaaataagaacggcaacccgagataaaaaggacacggtgacccgggagaaacacccaaagaaaccttttcagaagtggatgaagaagagagcaatcaaaaaaggtaattatcttcggttccagcgtttattttatcttgatagagggaaactggctaaaatcattttagatgatattgaatgcttgtcttgtgacataccactcagtgaaatttattcggtttttaaaacaagatgggaaacaactggtagctttaaaagccttggggactttaaaacttacgggaaggctgacaacactgccttcagagaattaattacggctaaagaaattgagaaaaatgtgcaggaaatgagcaaaggctcggctcccggtccagacgggattactcttggggacgtcgtaaagatggatcccgagttttcccggaccatggagattttcaatttatggttaacaactggtaaaatcccggacatggtgagggggtgcagaaccgttttgattccaaaatcatcaaagccggatcgtttgaaagacattaataactggagacctatcacgatcggttccatcttgctgagactgttctccaggattgtaacagctaggctgagcaaagcgtgccccctgaacccaaggcaaagaggctttatcagagcggcgggatgctctgaaaacttaaaactcctgcaaactataatttggtcggccaaaagagaacacagaccactgggtgttgtattcgtggacatcgccaaggcttttgacaccgtaagccaccagcacatcattcatgctttgcagcaaagagaggtggatccccacatcgtcggtctggtgagcaatatgtacgagaacatcagtacgtatatcaccacaaagaggaacacacacacagacaaaatccagatccgggttggagtaaagcagggtgacccgatgtcgccccttttatttaacctggcaatggaccctctattatgcaagctggaagagagtggcaaaggataccaccgaggacagagcagcatcacagcgatggcatttgcagacgatctggttttgctgagcgactcctgggaaaatatgaatacaaatattagcatactggagaccttctgcaatctgaccggactcaaaacacaggggcaaaagtgccacggcttttacatcaagccgacaaaggactcttacaccatcaatgactgcgctgcctggactatcaacggcacacccctgaacatgatcgaccccggcgaatctgagaaatacctcggcctgcagtttgacccgtggattggaatagcaaggtccggtctctccacaaaactagatttttggcttcagcggatcgatcaagcaccacttaaacctctgcagaaaactgatattctcaaaacatacaccatccctcggctgatctacatagctgaccactcagaagtgaaaagcgcactactcgaaacccttgaccagaagatccggacagcggtcaaggaatggcttcacctacctccgtgcacctgcgatgccatcctgtactcgagcacgagagacggcggtttgggcatcaccaaattggcaggactgatccccagcgtgcaggcccgtagactgcatcggatcgcacagtcatctgacgatacgatgaaatgcttcatggaaaaagagaaaatggaacagctgcataagaaattgtggattcaagctggaggggacagagagaacataccctcgatttgggaagcaccaccgtcgagtgaaccaccaaacaacgtgagcacaaattcggaatgggaagcaccgacccagaaagataaatttccaaagccttgcaattggaggaaaaacgaattcaaaaaatggaccaaattggcatcccaaggccgcggaattgtaaattttgaaagagacaaaattagtaaccattggatccaatactacagacgcatacctcacaggaaactcctcactgcactacaactcagggccaacgtttaccccacgagagaatttctagccaggggtagacaagaccaatacatcaaggcgtgtaggcactgcgatgcggacaacgaatcctgcgcccacatcatcggcaactgcccagtgacacaggacgcccgaatcaagaggcacaattacatctgcgaactgcttctcgaggaggcgaagaagaaggactgggtagtgttcaaggaaccgcacataagggattccaacaaggaactgtacaaacctgacctgatatttgtgaaggatgggcgtgcacttgtcgtggatgtgacagtacggtatgaagcagccaaatcatcgctggaggaagccgctgcagagaaagtgagaaagtacaaacacctggaaacggaagtaagacatctcacgaatgcaaaggacgttacttttgtgggctttcccctaggagcgcgggggaaatggcaccaagataactttaaacttttgactgagcttggcctctccaaatcgaggcaagtgaaaatggcagagactttttccacagtagcgctcttttcatctgtggacattgtacatatgtttgccagtagggccagaaaatctatggttatgtgataataggctgccttctgcggggcttgccttctggccatgcccttcttctctcccttgcacctgtacctcttggtctttgaataaagcctgagtaggaaggaccggtaaaaaaaaaaaaaaaaaaaaaaaaaaaaaaacgttgactaaaaaaaaaaaaaaaaaaaaaaaaaaaaaaaaaaaaaaaaaaaaaaaaaaaaaaaaaaaaaaaaaaaaaa

SEQ ID NO: 11219 - skipped

SEQ ID NO: 11220 - DNA, 4235 bp, synthetic construct
  source 1..4235: mol_type = other DNA
gaaataagagagaaaagaagagtaagaagaaatataagagaattcgccaccatgcctaagagaaaggtgtccagcgccgagggcgctgccaaggaagagcctaaacggagaagcgccagactgagcgccaagccccccgccaaggtggaagccaagcctaagaaggccgccgctaaggacaagagcagcgataagaaagtccagaccaagggcaagcggggcgccaaaggcaaacaggccgaggtggccaaccaggagacaaaggaagatctgcctgctgagaacggcgaaaccaagaccgaggaatctccagcttctgacgaggccggagagaaggaggccaaaagcgacagcggctctgagacacctggaacaagcgagagcgccaccccggaatccctgtttgtgcctgaagaggggagcagcgagaaggagagcgaggacgcgccaaaaacatctcctccgacgcctgggaaacatggtttggaacagactggggaggaaaaagtgatggtgactgttcctgacaaaaatccaccttgtccttgctgtggtacccgggtaaactctgtgttgaatctgattgaacatctgaaagtgtcacacgggaaaaggggggtttgttttcggtgtgcaaaatgtggaaaggaaaatagtaactatcacagtgttgtttgtcattttaagaaatgcaggggtccagagacggagaaagccccagctggggagtggatttgtgaggtatgcaacagagattttacaaccaaaattggcctgggacaacacaagagattggcacacccagcagtgagaaatcaggaaaggatcgttgcttcccaaccgaaagaaacatcaaatagaggtgctcacaaaaggtgctggacaaaggaggaggaagaattactaataagactggaggctcagttcgagggaaacaaaaatattaataagcttattgcagaacacataaccaccaaaacagctaagcagatcagtgacaaaaggcgattgctgtccagaaagccagcagaggagccacgtatggagcctggaacgtgtcatcacaccaggagagcagctgcgagcctgagaacggagcctgagatgagtcatcacgcccaggcagaggacagagataatggacctgggagacgccctctgccaggcagggcagctgccggagggagaacaatggacgagataagacgccaccctgataagggcaacggacagcagagacccaccaagcaaaaatcagaagaacagctgcaggcttactataaaaagacactagaggaacgactttcagctggggcacttaacaccttcccccgagcattcaagcaggtaatggaaggccgggatataaagctagtaatcaatcagacagcgcaggactgcttcggatgcctggaatccataagccaaataagaacggcaacccgagataaaaaggacacggtgacccgggagaaacacccaaagaaaccttttcagaagtggatgaagaagagagcaatcaaaaaaggtaattatcttcggttccagcgtttattttatcttgatagagggaaactggctaaaatcattttagatgatattgaatgcttgtcttgtgacataccactcagtgaaatttattcggtttttaaaacaagatgggaaacaactggtagctttaaaagccttggggactttaaaacttacgggaaggctgacaacactgccttcagagaattaattacggctaaagaaattgagaaaaatgtgcaggaaatgagcaaaggctcggctcccggtccagacgggattactcttggggacgtcgtaaagatggatcccgagttttcccggaccatggagattttcaatttatggttaacaactggtaaaatcccggacatggtgagggggtgcagaaccgttttgattccaaaatcatcaaagccggatcgtttgaaagacattaataactggagacctatcacgatcggttccatcttgctgagactgttctccaggattgtaacagctaggctgagcaaagcgtgccccctgaacccaaggcaaagaggctttatcagagcggcgggatgctctgaaaacttaaaactcctgcaaactataatttggtcggccaaaagagaacacagaccactgggtgttgtattcgtggacatcgccaaggcttttgacaccgtaagccaccagcacatcattcatgctttgcagcaaagagaggtggatccccacatcgtcggtctggtgagcaatatgtacgagaacatcagtacgtatatcaccacaaagaggaacacacacacagacaaaatccagatccgggttggagtaaagcagggtgacccgatgtcgccccttttatttaacctggcaatggaccctctattatgcaagctggaagagagtggcaaaggataccaccgaggacagagcagcatcacagcgatggcatttgcagacgatctggttttgctgagcgactcctgggaaaatatgaatacaaatattagcatactggagaccttctgcaatctgaccggactcaaaacacaggggcaaaagtgccacggcttttacatcaagccgacaaagaagtcttacaccatcaatgactgcgctgcctggactatcaacggcacacccctgaacatgatcgaccccggcgaatctgagaaatacctcggcctgcagtttgacccgtggattggaatagcaaggtccggtctctccacaaaactagatttttggcttcagcggatcgatcaagcaccacttaaacctctgcagaaaactgatattctcaaaacatacaccatccctcggctgatctacatagctgaccactcagaagtgaaaagcgcactactcgaaacccttgaccagaagatccggacagcggtcaaggaatggcttcacctacctccgtgcacctgcgatgccatcctgtactcgagcacgagagacggcggtttgggcatcaccaaattggcaggactgatccccagcgtgcaggcccgtagactgcatcggatcgcacagtcatctgacgatacgatgaaatgcttcatggaaaaagagaaaatggaacagctgcataagaaattgtggattcaagctggaggggacagagagaacataccctcgatttgggaagcaccaccgtcgagtgaaccaccaaacaacgtgagcacaaattcggaatgggaagcaccgacccagaaagataaatttccaaagccttgcaattggaggaaaaacgaattcaaaaaatggaccaaattggcatcccaaggccgcggaattgtaaattttgaaagagacaaaattagtaaccattggatccaatactacagacgcatacctcacaggaaactcctcactgcactacaactcagggccaacgtttaccccacgagagaatttctagccaggggtagacaagaccaatacatcaaggcgtgtaggcactgcgatgcggacaacgaatcctgcgcccacatcatcggcaactgcccagtgacacaggacgcccgaatcaagaggcacaattacatctgcgaactgcttctcgaggaggcgaagaagaaggactgggtagtgttcaaggaaccgcacataagggattccaacaaggaactgtacaaacctgacctgatatttgtgaaggatgggcgtgcacttgtcgtggatgtgacagtacggtatgaagcagccaaatcatcgctggaggaagccgctgcagagaaagtgagaaagtacaaacacctggaaacggaagtaagacatctcacgaatgcaaaggacgttacttttgtgggctttcccctaggagcgcgggggaaatggcaccaagataactttaaacttttgactgagcttggcctctccaaatcgaggcaagtgaaaatggcagagactttttccacagtagcgctcttttcatctgtggacattgtacatatgtttgccagtagggccagaaaatctatggttatgtgataataggctgccttctgcggggcttgccttctggccatgcccttcttctctcccttgcacctgtacctcttggtctttgaataaagcctgagtaggaaggaccggtaaaaaaaaaaaaaaaaaaaaaaaaaaaaaaacgttgactaaaaaaaaaaaaaaaaaaaaaaaaaaaaaaaaaaaaaaaaaaaaaaaaaaaaaaaaaaaaaaaaaaaaaa

SEQ ID NO: 11221 - DNA, 5210 bp, synthetic construct
  source 1..5210: mol_type = other DNA
ggtctagttacaactgggcatcgctgcagagatcgcacctcctcgtggtcccgctggtagcccttcgaagggtgactaagtcgatctctgccccaggtacggagccgttgggactcaccagtccaacgtaactcctgcctaaattcggtgaaacaaattcctcggtaaaaagccccatggcccctaagaaaaagcggaaggtgaatatcagcggctctagctgcggcagccccaacagcgccgacaccagcagcgacttcaaggacctgtggaccaagctgaaggaatgccacgaccgggaagtgcagggactccaggtgaaggtcaccaaactcaagcaagaaagaatcctggacgcccagagactggaagaattcttcaccaagaaccagcagctgagagagcagcagaaagtgctgcacgagacaatcaaggttctggaagatagactgcgggccggcctgtgcgacagatgcgccgtgaccgaggaacacatgcgcaaaaagcagcaggagttcgagaacattagacagcaaaatctgaaattgatcacagagctgatgaacgagagaaacacactgcaggaggagaacaagaagctgagcgagcagctgcaacagaagatcgagaatgatcagcaacaccaggccgctgagctggaatgtgaagaggacgtgatccccgacagcccaatcacagctttcagcttttctggcgtgaacagactgaggcggaaggaaaacccccacgtgcggtacatcgagcagacccataccaagctggaacacagcgtgtgtgccaacgagatgagaaaggtgtccaagtcctccacccatccccagcacaaccctaacgaaaatgagatcctggtggctgatacctacgaccagtctcagagccctatggccaaggcccacggcaccagctcttatacccctgataagagctccttcaacctggccaccgtggtggccgagacactgggcctgggcgtgcaggaggaaagcgagacacagggcccaatgagccctctgggagatgagctgtaccactgcctggaaggcaaccacaagaaacagccttttgagtccggctccgagactcctggaacaagcgagagcgctacacctgagggcagctatgaacaacttgcaccacaaccgtgtgtgggagaaactttacattctagcctcccacgagacagtgaactgtttgtgcctgaagaggggagcagcgagaaggagagcgaggacgcgccaaaaacatctcctccgacgcctgggaaacatggtttggaacagactggggaggaaaaagtgatggtgactgttcctgacaaaaatccaccttgtccttgctgtggtacccgggtaaactctgtgttgaatctgattgaacatctgaaagtgtcacacgggaaaaggggggtttgttttcggtgtgcaaaatgtggaaaggaaaatagtaactatcacagtgttgtttgtcattttaagaaatgcaggggtccagagacggagaaagccccagctggggagtggatttgtgaggtatgcaacagagattttacaaccaaaattggcctgggacaacacaagagattggcacacccagcagtgagaaatcaggaaaggatcgttgcttcccaaccgaaagaaacatcaaatagaggtgctcacaaaaggtgctggacaaaggaggaggaagaattactaataagactggaggctcagttcgagggaaacaaaaatattaataagcttattgcagaacacataaccaccaaaacagctaagcagatcagtgacaaaaggcgattgctgtccagaaagccagcagaggagccacgtgaggagcctggaacgtgtcatcacaccaggagagcagctgcgagcctgagaacggagcctgagatgagtcatcacgcccaggcagaggacagagataatggacctgggagacgccctctgccaggcagggcagctgccggagggagaacaatggacgagataagacgccaccctgataagggcaacggacagcagagacccaccaagcaaaaatcagaagaacagctgcaggcttactataaaaagacactagaggaacgactttcagctggggcacttaacaccttcccccgagcattcaagcaggtaatggaaggccgggatataaagctagtaatcaatcagacagcgcaggactgcttcggatgcctggaatccataagccaaataagaacggcaacccgagataaaaaggacacggtgacccgggagaaacacccaaagaaaccttttcagaagtggatgaagaagagagcaatcaaaaaaggtaattatcttcggttccagcgtttattttatcttgatagagggaaactggctaaaatcattttagatgatattgaatgcttgtcttgtgacataccactcagtgaaatttattcggtttttaaaacaagatgggaaacaactggtagctttaaaagccttggggactttaaaacttacgggaaggctgacaacactgccttcagagaattaattacggctaaagaaattgagaaaaatgtgcaggaaatgagcaaaggctcggctcccggtccagacgggattactcttggggacgtcgtaaagatggatcccgagttttcccggaccatggagattttcaatttatggttaacaactggtaaaatcccggacatggtgagggggtgcagaaccgttttgattccaaaatcatcaaagccggatcgtttgaaagacattaataactggagacctatcacgatcggttccatcttgctgagactgttctccaggattgtaacagctaggctgagcaaagcgtgccccctgaacccaaggcaaagaggctttatcagagcggcgggatgctctgaaaacttaaaactcctgcaaactataatttggtcggccaaaagagaacacagaccactgggtgttgtattcgtggacatcgccaaggcttttgacaccgtaagccaccagcacatcattcatgctttgcagcaaagagaggtggatccccacatcgtcggtctggtgagcaatatgtacgagaacatcagtacgtatatcaccacaaagaggaacacacacacagacaaaatccagatccgggttggagtaaagcagggtgacccgatgtcgccccttttatttaacctggcaatggaccctctattatgcaagctggaagagagtggcaaaggataccaccgaggacagagcagcatcacagcgatggcatttgcagacgatctggttttgctgagcgactcctgggaaaatatgaatacaaatattagcatactggagaccttctgcaatctgaccggactcaaaacacaggggcaaaagtgccacggcttttacatcaagccgacaaaggactcttacaccatcaatgactgcgctgcctggactatcaacggcacacccctgaacatgatcgaccccggcgaatctgagaaatacctcggcctgcagtttgacccgtggattggaatagcaaggtccggtctctccacaaaactagatttttggcttcagcggatcgatcaagcaccacttaaacctctgcagaaaactgatattctcaaaacatacaccatccctcggctgatctacatagctgaccactcagaagtgaaaagcgcactactcgaaacccttgaccagaagatccggacagcggtcaaggaatggcttcacctacctccgtgcacctgcgatgccatcctgtactcgagcacgagagacggcggtttgggcatcaccaaattggcaggactgatccccagcgtgcaggcccgtagactgcatcggatcgcacagtcatctgacgatacgatgaaatgcttcatggaaaaagagaaaatggaacagctgcataagaaattgtggattcaagctggaggggacagagagaacataccctcgatttgggaagcaccaccgtcgagtgaaccaccaaacaacgtgagcacaaattcggaatgggaagcaccgacccagaaagataaatttccaaagccttgcaattggaggaaaaacgaattcaaaaaatggaccaaattggcatcccaaggccgcggaattgtaaattttgaaagagacaaaattagtaaccattggatccaatactacagacgcatacctcacaggaaactcctcactgcactacaactcagggccaacgtttaccccacgagagaatttctagccaggggtagacaagaccaatacatcaaggcgtgtaggcactgcgatgcggacattgaatcctgcgcccacatcatcggcaactgcccagtgacacaggacgcccgaatcaagaggcacaattacatctgcgaactgcttctcgaggaggcgaagaagaaggactgggtagtgttcaaggaaccgcacataagggattccaacaaggaactgtacaaacctgacctgatatttgtgaaggatgcccgtgcacttgtcgtggatgtgacagtacggtatgaagcagccaaatcatcgctggaggaagccgctgcagagaaagtgagaaagtacaaacacctggaaacggaagtaagacatctcacgaatgcaaaggacgttacttttgtgggctttcccctaggagcgcgggggaaatggcaccaagataactttaaacttttgactgagcttggcctctccaaatcgaggcaagtgaaaatggcagagactttttccacagtagcgctcttttcatctgtggacattgtacatatgtttgccagtagggccagaaaatctatggttatgaggaagaagaggaggcagaggaggaggtgataataggctgccttctgcggggcttgccttctggccatgcccttcttctctcccttgcacctgtacctcttggtctttgaataaagcctgagtaggaaggaccggtagacatgataagatacattgatgagtttggacaaaccacaactagaatgcagtgaaaaaaatgctttatttgtgaaatttgtgatgctattgctttatttgtaaccattataagctgcaataaacaagttaacaacaacaaaaaaaaaaaaaaaaaaaaaaaaaaaaaaacgttgactaaaaaaaaaaaaaaaaaaaaaaaaaaaaaaaaaaaaaaaaaaaaaaaaaaaaaaaaaaaaaaaaaaaaaa

SEQ ID NO: 11222 - DNA, 5555 bp, synthetic construct
  source 1..5555: mol_type = other DNA
ggtctagttacaactgggcatcgctgcagagatcgcacctcctcgtggtcccgctggtagcccttcgaagggtgactaagtcgatctctgccccaggtacggagccgttgggactcaccagtccaacgtaactcctgcctaaattcggtgaaacaaattcctcggtaaaaagccccatggcccctaagaaaaagcggaaggtgcctaagagaaaggtgtccagcgccgagggcgctgccaaggaagagcctaaacggagaagcgccagactgagcgccaagccccccgccaaggtggaagccaagcctaagaaggccgccgctaaggacaagagcagcgataagaaagtccagaccaagggcaagcggggcgccaaaggcaaacaggccgaggtggccaaccaggagacaaaggaagatctgcctgctgagaacggcgaaaccaagaccgaggaatctccagcttctgacgaggccggagagaaggaggccaaaagcgacagcggctctgagacacctggaacaagcgagagcgccaccccggaatccaatatcagcggctctagctgcggcagccccaacagcgccgacaccagcagcgacttcaaggacctgtggaccaagctgaaggaatgccacgaccgggaagtgcagggactccaggtgaaggtcaccaaactcaagcaagaaagaatcctggacgcccagagactggaagaattcttcaccaagaaccagcagctgagagagcagcagaaagtgctgcacgagacaatcaaggttctggaagatagactgcgggccggcctgtgcgacagatgcgccgtgaccgaggaacacatgcgcaaaaagcagcaggagttcgagaacattagacagcaaaatctgaaattgatcacagagctgatgaacgagagaaacacactgcaggaggagaacaagaagctgagcgagcagctgcaacagaagatcgagaatgatcagcaacaccaggccgctgagctggaatgtgaagaggacgtgatccccgacagcccaatcacagctttcagcttttctggcgtgaacagactgaggcggaaggaaaacccccacgtgcggtacatcgagcagacccataccaagctggaacacagcgtgtgtgccaacgagatgagaaaggtgtccaagtcctccacccatccccagcacaaccctaacgaaaatgagatcctggtggctgatacctacgaccagtctcagagccctatggccaaggcccacggcaccagctcttatacccctgataagagctccttcaacctggccaccgtggtggccgagacactgggcctgggcgtgcaggaggaaagcgagacacagggcccaatgagccctctgggagatgagctgtaccactgcctggaaggcaaccacaagaaacagccttttgagtccggctccgagactcctggaacaagcgagagcgctacacctgagggcagctatgaacaacttgcaccacaaccgtgtgtgggagaaactttacattctagcctcccacgagacagtgaactgtttgtgcctgaagaggggagcagcgagaaggagagcgaggacgcgccaaaaacatctcctccgacgcctgggaaacatggtttggaacagactggggaggaaaaagtgatggtgactgttcctgacaaaaatccaccttgtccttgctgtggtacccgggtaaactctgtgttgaatctgattgaacatctgaaagtgtcacacgggaaaaggggggtttgttttcggtgtgcaaaatgtggaaaggaaaatagtaactatcacagtgttgtttgtcattttaagaaatgcaggggtccagagacggagaaagccccagctggggagtggatttgtgaggtatgcaacagagattttacaaccaaaattggcctgggacaacacaagagattggcacacccagcagtgagaaatcaggaaaggatcgttgcttcccaaccgaaagaaacatcaaatagaggtgctcacaaaaggtgctggacaaaggaggaggaagaattactaataagactggaggctcagttcgagggaaacaaaaatattaataagcttattgcagaacacataaccaccaaaacagctaagcagatcagtgacaaaaggcgattgctgtccagaaagccagcagaggagccacgtgaggagcctggaacgtgtcatcacaccaggagagcagctgcgagcctgagaacggagcctgagatgagtcatcacgcccaggcagaggacagagataatggacctgggagacgccctctgccaggcagggcagctgccggagggagaacaatggacgagataagacgccaccctgataagggcaacggacagcagagacccaccaagcaaaaatcagaagaacagctgcaggcttactataaaaagacactagaggaacgactttcagctggggcacttaacaccttcccccgagcattcaagcaggtaatggaaggccgggatataaagctagtaatcaatcagacagcgcaggactgcttcggatgcctggaatccataagccaaataagaacggcaacccgagataaaaaggacacggtgacccgggagaaacacccaaagaaaccttttcagaagtggatgaagaagagagcaatcaaaaaaggtaattatcttcggttccagcgtttattttatcttgatagagggaaactggctaaaatcattttagatgatattgaatgcttgtcttgtgacataccactcagtgaaatttattcggtttttaaaacaagatgggaaacaactggtagctttaaaagccttggggactttaaaacttacgggaaggctgacaacactgccttcagagaattaattacggctaaagaaattgagaaaaatgtgcaggaaatgagcaaaggctcggctcccggtccagacgggattactcttggggacgtcgtaaagatggatcccgagttttcccggaccatggagattttcaatttatggttaacaactggtaaaatcccggacatggtgagggggtgcagaaccgttttgattccaaaatcatcaaagccggatcgtttgaaagacattaataactggagacctatcacgatcggttccatcttgctgagactgttctccaggattgtaacagctaggctgagcaaagcgtgccccctgaacccaaggcaaagaggctttatcagagcggcgggatgctctgaaaacttaaaactcctgcaaactataatttggtcggccaaaagagaacacagaccactgggtgttgtattcgtggacatcgccaaggcttttgacaccgtaagccaccagcacatcattcatgctttgcagcaaagagaggtggatccccacatcgtcggtctggtgagcaatatgtacgagaacatcagtacgtatatcaccacaaagaggaacacacacacagacaaaatccagatccgggttggagtaaagcagggtgacccgatgtcgccccttttatttaacctggcaatggaccctctattatgcaagctggaagagagtggcaaaggataccaccgaggacagagcagcatcacagcgatggcatttgcagacgatctggttttgctgagcgactcctgggaaaatatgaatacaaatattagcatactggagaccttctgcaatctgaccggactcaaaacacaggggcaaaagtgccacggcttttacatcaagccgacaaaggactcttacaccatcaatgactgcgctgcctggactatcaacggcacacccctgaacatgatcgaccccggcgaatctgagaaatacctcggcctgcagtttgacccgtggattggaatagcaaggtccggtctctccacaaaactagatttttggcttcagcggatcgatcaagcaccacttaaacctctgcagaaaactgatattctcaaaacatacaccatccctcggctgatctacatagctgaccactcagaagtgaaaactgcactactcgaaacccttgaccagaagatccggacagcggtcaaggaatggcttcacctacctccgtgcacctgcgatgccatcctgtactcgagcacgagagacggcggtttgggcatcaccaaattggcaggactgatccccagcgtgcaggcccgtagactgcatcggatcgcacagtcatctgacgatacgatgaaatgcttcatggaaaaagagaaaatggaacagctgcataagaaattgtggattcaagctggaggggacagagagaacataccctcgatttgggaagcaccaccgtcgagtgaaccaccaaacaacgtgagcacaaattcggaatgggaagcaccgacccagaaagataaatttccaaagccttgcaattggaggaaaaacgaattcaaaaaatggaccaaattggcatcccaaggccgcggaattgtaaattttgaaagagacaaaattagtaaccattggatccaatactacagacgcatacctcacaggaaactcctcactgcactacaactcagggccaacgtttaccccacgagagaatttctagccaggggtagacaagaccaatacatcaaggcgtgtaggcactgcgatgcggacattgaatcctgcgcccacatcatcggcaactgcccagtgacacaggacgcccgaatcaagaggcacaattacatctgcgaactgcttctcgaggaggcgaagaagaaggactgggtagtgttcaaggaaccgcacataagggattccaacaaggaactgtacaaacctgacctgatatttgtgaaggatgcccgtgcacttgtcgtggatgtgacagtacggtatgaagcagccaaatcatcgctggaggaagccgctgcagagaaagtgagaaagtacaaacacctggaaacggaagtaagacatctcacgaatgcaaaggacgttacttttgtgggctttcccctaggagcgcgggggaaatggcaccaagataactttaaacttttgactgagcttggcctctccaaatcgaggcaagtgaaaatggcagagactttttccacagtagcgctcttttcatctgtggacattgtacatatgtttgccagtagggccagaaaatctatggttatgaggaagaagaggaggcagaggaggaggtgataataggctgccttctgcggggcttgccttctggccatgcccttcttctctcccttgcacctgtacctcttggtctttgaataaagcctgagtaggaaggaccggtagacatgataagatacattgatgagtttggacaaaccacaactagaatgcagtgaaaaaaatgctttatttgtgaaatttgtgatgctattgctttatttgtaaccattataagctgcaataaacaagttaacaacaacaaaaaaaaaaaaaaaaaaaaaaaaaaaaaaacgttgactaaaaaaaaaaaaaaaaaaaaaaaaaaaaaaaaaaaaaaaaaaaaaaaaaaaaaaaaaaaaaaaaaaaaaa

SEQ ID NO: 11223 - DNA, 5075 bp, synthetic construct
  source 1..5075: mol_type = other DNA
ggtctagttacaactgggcatcgctgcagagatcgcacctcctcgtggtcccgctggtagcccttcgaagggtgactaagtcgatctctgccccaggtacggagccgttgggactcaccagtccaacgtaactcctgcctaaattcggtgaaacaaattcctcggtaaaaagccccatgcctaagagaaaggtgtccagcgccgagggcgctgccaaggaagagcctaaacggagaagcgccagactgagcgccaagccccccgccaaggtggaagccaagcctaagaaggccgccgctaaggacaagagcagcgataagaaagtccagaccaagggcaagcggggcgccaaaggcaaacaggccgaggtggccaaccaggagacaaaggaagatctgcctgctgagaacggcgaaaccaagaccgaggaatctccagcttctgacgaggccggagagaaggaggccaaaagcgacagcggctctgagacacctggaacaagcgagagcgccaccccggaatccgcttcttgcccgaaacctggccccccggtttcagcaggggcaatgagtttggaaagtggactgaccacccactccgttctcgccatcgaacgtggtcccaattcgttggcaaattccggatcagactttgggggggggggtctggggctaccgttacgcctattgagggtatcggtcggcactcagacctcccgctccgactgggtagacctggtgtcctggagccacccaggacccacgtctaagtcccagcaggttgacctggtgtctttatttcctaaacaccgggttgacctgttatccaaaaacgaccaggtagacctggtggctcaatttttaccatctaaatttccccccaatttggcagaaaatgatttggctttgctggtgaacttagagttctacagatcggatttgcatgtgtatgagtgtgttcattttgctgcacattgggagggattaagtggtttgcctgaggtgtatgaacaacttgcaccacaaccgtgtgtgggagaaactttacattctagcctcccacgagacagtgaactgtttgtgcctgaagaggggagcagcgagaaggagagcgaggacgcgccaaaaacatctcctccgacgcctgggaaacatggtttggaacagactggggaggaaaaagtgatggtgactgttcctgacaaaaatccaccttgtccttgctgtggtacccgggtaaactctgtgttgaatctgattgaacatctgaaagtgtcacacgggaaaaggggggtttgttttcggtgtgcaaaatgtggaaaggaaaatagtaactatcacagtgttgtttgtcattttaagaaatgcaggggtccagagacggagaaagccccagctggggagtggatttgtgaggtatgcaacagagattttacaaccaaaattggcctgggacaacacaagagattggcacacccagcagtgagaaatcaggaaaggatcgttgcttcccaaccgaaagaaacatcaaatagaggtgctcacaaaaggtgctggacaaaggaggaggaagaattactaataagactggaggctcagttcgagggaaacaaaaatattaataagcttattgcagaacacataaccaccaaaacagctaagcagatcagtgacaaaaggcgattgctgtccagaaagccagcagaggagccacgtgaggagcctggaacgtgtcatcacaccaggagagcagctgcgagcctgagaacggagcctgagatgagtcatcacgcccaggcagaggacagagataatggacctgggagacgccctctgccaggcagggcagctgccggagggagaacaatggacgagataagacgccaccctgataagggcaacggacagcagagacccaccaagcaaaaatcagaagaacagctgcaggcttactataaaaagacactagaggaacgactttcagctggggcacttaacaccttcccccgagcattcaagcaggtaatggaaggccgggatataaagctagtaatcaatcagacagcgcaggactgcttcggatgcctggaatccataagccaaataagaacggcaacccgagataaaaaggacacggtgacccgggagaaacacccaaagaaaccttttcagaagtggatgaagaagagagcaatcaaaaaaggtaattatcttcggttccagcgtttattttatcttgatagagggaaactggctaaaatcattttagatgatattgaatgcttgtcttgtgacataccactcagtgaaatttattcggtttttaaaacaagatgggaaacaactggtagctttaaaagccttggggactttaaaacttacgggaaggctgacaacactgccttcagagaattaattacggctaaagaaattgagaaaaatgtgcaggaaatgagcaaaggctcggctcccggtccagacgggattactcttggggacgtcgtaaagatggatcccgagttttcccggaccatggagattttcaatttatggttaacaactggtaaaatcccggacatggtgagggggtgcagaaccgttttgattccaaaatcatcaaagccggatcgtttgaaagacattaataactggagacctatcacgatcggttccatcttgctgagactgttctccaggattgtaacagctaggctgagcaaagcgtgccccctgaacccaaggcaaagaggctttatcagagcggcgggatgctctgaaaacttaaaactcctgcaaactataatttggtcggccaaaagagaacacagaccactgggtgttgtattcgtggacatcgccaaggcttttgacaccgtaagccaccagcacatcattcatgctttgcagcaaagagaggtggatccccacatcgtcggtctggtgagcaatatgtacgagaacatcagtacgtatatcaccacaaagaggaacacacacacagacaaaatccagatccgggttggagtaaagcagggtgacccgatgtcgccccttttatttaacctggcaatggaccctctattatgcaagctggaagagagtggcaaaggataccaccgaggacagagcagcatcacagcgatggcatttgcagacgatctggttttgctgagcgactcctgggaaaatatgaatacaaatattagcatactggagaccttctgcaatctgaccggactcaaaacacaggggcaaaagtgccacggcttttacatcaagccgacaaaggactcttacaccatcaatgactgcgctgcctggactatcaacggcacacccctgaacatgatcgaccccggcgaatctgagaaatacctcggcctgcagtttgacccgtggattggaatagcaaggtccggtctctccacaaaactagatttttggcttcagcggatcgatcaagcaccacttaaacctctgcagaaaactgatattctcaaaacatacaccatccctcggctgatctacatagctgaccactcagaagtgaaaagcgcactactcgaaacccttgaccagaagatccggacagcggtcaaggaatggcttcacctacctccgtgcacctgcgatgccatcctgtactcgagcacgagagacggcggtttgggcatcaccaaattggcaggactgatccccagcgtgcaggcccgtagactgcatcggatcgcacagtcatctgacgatacgatgaaatgcttcatggaaaaagagaaaatggaacagctgcataagaaattgtggattcaagctggaggggacagagagaacataccctcgatttgggaagcaccaccgtcgagtgaaccaccaaacaacgtgagcacaaattcggaatgggaagcaccgacccagaaagataaatttccaaagccttgcaattggaggaaaaacgaattcaaaaaatggaccaaattggcatcccaaggccgcggaattgtaaattttgaaagagacaaaattagtaaccattggatccaatactacagacgcatacctcacaggaaactcctcactgcactacaactcagggccaacgtttaccccacgagagaatttctagccaggggtagacaagaccaatacatcaaggcgtgtaggcactgcgatgcggacattgaatcctgcgcccacatcatcggcaactgcccagtgacacaggacgcccgaatcaagaggcacaattacatctgcgaactgcttctcgaggaggcgaagaagaaggactgggtagtgttcaaggaaccgcacataagggattccaacaaggaactgtacaaacctgacctgatatttgtgaaggatgcccgtgcacttgtcgtggatgtgacagtacggtatgaagcagccaaatcatcgctggaggaagccgctgcagagaaagtgagaaagtacaaacacctggaaacggaagtaagacatctcacgaatgcaaaggacgttacttttgtgggctttcccctaggagcgcgggggaaatggcaccaagataactttaaacttttgactgagcttggcctctccaaatcgaggcaagtgaaaatggcagagactttttccacagtagcgctcttttcatctgtggacattgtacatatgtttgccagtagggccagaaaatctatggttatgaggaagaagaggaggcagaggaggaggtgataataggctgccttctgcggggcttgccttctggccatgcccttcttctctcccttgcacctgtacctcttggtctttgaataaagcctgagtaggaaggaccggtagacatgataagatacattgatgagtttggacaaaccacaactagaatgcagtgaaaaaaatgctttatttgtgaaatttgtgatgctattgctttatttgtaaccattataagctgcaataaacaagttaacaacaacaaaaaaaaaaaaaaaaaaaaaaaaaaaaaaacgttgactaaaaaaaaaaaaaaaaaaaaaaaaaaaaaaaaaaaaaaaaaaaaaaaaaaaaaaaaaaaaaaaaaaaaaa

SEQ ID NO: 11224 - DNA, 4457 bp, synthetic construct
  source 1..4457: mol_type = other DNA
gaaataagagagaaaagaagagtaagaagaaatataagagaattcgccaccatgaagaagaagagcaagaaggcttcttgcccgaaacctggccccccggtttcagcaggggcaatgagtttggaaagtggactgaccacccactccgttctcgccatcgaacgtggtcccaattcgttggcaaattccggatcagactttgggggggggggtctggggctaccgttacgcctattgagggtatcggtcggcactcagacctcccgctccgactgggtagacctggtgtcctggagccacccaggacccacgtctaagtcccagcaggttgacctggtgtctttatttcctaaacaccgggttgacctgttatccaaaaacgaccaggtagacctggtggctcaatttttaccatctaaatttccccccaatttggcagaaaatgatttggctttgctggtgaacttagagttctacagatcggatttgcatgtgtatgagtgtgttcataaggctgcacattgggagggattaagtggtttgcctgaggtgtatgaacaacttgcaccacaaccgtgtgtgggagaaactttacattctagcctcccacgagacagtgaactgtttgtgcctgaagaggggagcagcgagaaggagagcgaggacgcgccaaaaacatctcctccgacgcctgggaaacatggtttggaacagactggggaggaaaaagtgatggtgactgttcctgacaaaaatccaccttgtccttgctgtggtacccgggtaaactctgtgttgaatctgattgaacatctgaaagtgtcacacgggaaaaggggggtttgttttcggtgtgcaaaatgtggaaaggaaaatagtaactatcacagtgttgtttgtcattttaagaaatgcaggggtccagagacggagaaagccccagctggggagtggatttgtgaggtatgcaacagagattttacaaccaaaattggcctgggacaacacaagagattggcacacccagcagtgagaaatcaggaaaggatcgttgcttcccaaccgaaagaaacatcaaatagaggtgctcacaaaaggtgctggacaaaggaggaggaagaattactaataagactggaggctcagttcgagggaaacaaaaatattaataagcttattgcagaacacataaccaccaaaacagctaagcagatcagtgacaaaaggcgattgctgtccagaaagccagcagaggagccacgtatggagcctggaacgtgtcatcacaccaggagagcagctgcgagcctgagaacggagcctgagatgagtcatcacgcccaggcagaggacagagataatggacctgggagacgccctctgccaggcagggcagctgccggagggagaacaatggacgagataagacgccaccctgataagggcaacggacagcagagacccaccaagcaaaaatcagaagaacagctgcaggcttactataaaaagacactagaggaacgactttcagctggggcacttaacaccttcccccgagcattcaagcaggtaatggaaggccgggatataaagctagtaatcaatcagacagcgcaggactgcttcggatgcctggaatccataagccaaataagaacggcaacccgagataaaaaggacacggtgacccgggagaaacacccaaagaaaccttttcagaagtggatgaagaagagagcaatcaaaaaaggtaattatcttcggttccagcgtttattttatcttgatagagggaaactggctaaaatcattttagatgatattgaatgcttgtcttgtgacataccactcagtgaaatttattcggtttttaaaacaagatgggaaacaactggtagctttaaaagccttggggactttaaaacttacgggaaggctgacaacactgccttcagagaattaattacggctaaagaaattgagaaaaatgtgcaggaaatgagcaaaggctcggctcccggtccagacgggattactcttggggacgtcgtaaagatggatcccgagttttcccggaccatggagattttcaatttatggttaacaactggtaaaatcccggacatggtgagggggtgcagaaccgttttgattccaaaatcatcaaagccggatcgtttgaaagacattaataactggagacctatcacgatcggttccatcttgctgagactgttctccaggattgtaacagctaggctgagcaaagcgtgccccctgaacccaaggcaaagaggctttatcagagcggcgggatgctctgaaaacttaaaactcctgcaaactataatttggtcggccaaaagagaacacagaccactgggtgttgtattcgtggacatcgccaaggcttttgacaccgtaagccaccagcacatcattcatgctttgcagcaaagagaggtggatccccacatcgtcggtctggtgagcaatatgtacgagaacatcagtacgtatatcaccacaaagaggaacacacacacagacaaaatccagatccgggttggagtaaagcagggtgacccgatgtcgccccttttatttaacctggcaatggaccctctattatgcaagctggaagagagtggcaaaggataccaccgaggacagagcagcatcacagcgatggcatttgcagacgatctggttttgctgagcgactcctgggaaaatatgaatacaaatattagcatactggagaccttctgcaatctgaccggactcaaaacacaggggcaaaagtgccacggcttttacatcaagccgacaaagaagtcttacaccatcaatgactgcgctgcctggactatcaacggcacacccctgaacatgatcgaccccggcgaatctgagaaatacctcggcctgcagtttgacccgtggattggaatagcaaggtccggtctctccacaaaactagatttttggcttcagcggatcgatcaagcaccacttaaacctctgcagaaaactgatattctcaaaacatacaccatccctcggctgatctacatagctgaccactcagaagtgaaaagcgcactactcgaaacccttgaccagaagatccggacagcggtcaaggaatggcttcacctacctccgtgcacctgcgatgccatcctgtactcgagcacgagagacggcggtttgggcatcaccaaattggcaggactgatccccagcgtgcaggcccgtagactgcatcggatcgcacagtcatctgacgatacgatgaaatgcttcatggaaaaagagaaaatggaacagctgcataagaaattgtggattcaagctggaggggacagagagaacataccctcgatttgggaagcaccaccgtcgagtgaaccaccaaacaacgtgagcacaaattcggaatgggaagcaccgacccagaaagataaatttccaaagccttgcaattggaggaaaaacgaattcaaaaaatggaccaaattggcatcccaaggccgcggaattgtaaattttgaaagagacaaaattagtaaccattggatccaatactacagacgcatacctcacaggaaactcctcactgcactacaactcagggccaacgtttaccccacgagagaatttctagccaggggtagacaagaccaatacatcaaggcgtgtaggcactgcgatgcggacaacgaatcctgcgcccacatcatcggcaactgcccagtgacacaggacgcccgaatcaagaggcacaattacatctgcgaactgcttctcgaggaggcgaagaagaaggactgggtagtgttcaaggaaccgcacataagggattccaacaaggaactgtacaaacctgacctgatatttgtgaaggatgggcgtgcacttgtcgtggatgtgacagtacggtatgaagcagccaaatcatcgctggaggaagccgctgcagagaaagtgagaaagtacaaacacctggaaacggaagtaagacatctcacgaatgcaaaggacgttacttttgtgggctttcccctaggagcgcgggggaaatggcaccaagataactttaaacttttgactgagcttggcctctccaaatcgaggcaagtgaaaatggcagagactttttccacagtagcgctcttttcatctgtggacattgtacatatgtttgccagtagggccagaaaatctatggttatgtgataataggctgccttctgcggggcttgccttctggccatgcccttcttctctcccttgcacctgtacctcttggtctttgaataaagcctgagtaggaaggaccggtaaaaaaaaaaaaaaaaaaaaaaaaaaaaaaacgttgactaaaaaaaaaaaaaaaaaaaaaaaaaaaaaaaaaaaaaaaaaaaaaaaaaaaaaaaaaaaaaaaaaaaaaa

SEQ ID NO: 11225 - DNA, 5183 bp, synthetic construct
  source 1..5183: mol_type = other DNA
ggtctagttacaactgggcatcgctgcagagatcgcacctcctcgtggtcccgctggtagcccttcgaagggtgactaagtcgatctctgccccaggtacggagccgttgggactcaccagtccaacgtaactcctgcctaaattcggtgaaacaaattcctcggtaaaaagccccatggcccctaagaaaaagcggaaggtgaatatcagcggctctagctgcggcagccccaacagcgccgacaccagcagcgacttcaaggacctgtggaccaagctgaaggaatgccacgaccgggaagtgcagggactccaggtgaaggtcaccaaactcaagcaagaaagaatcctggacgcccagagactggaagaattcttcaccaagaaccagcagctgagagagcagcagaaagtgctgcacgagacaatcaaggttctggaagatagactgcgggccggcctgtgcgacagatgcgccgtgaccgaggaacacatgcgcaaaaagcagcaggagttcgagaacattagacagcaaaatctgaaattgatcacagagctgatgaacgagagaaacacactgcaggaggagaacaagaagctgagcgagcagctgcaacagaagatcgagaatgatcagcaacaccaggccgctgagctggaatgtgaagaggacgtgatccccgacagcccaatcacagctttcagcttttctggcgtgaacagactgaggcggaaggaaaacccccacgtgcggtacatcgagcagacccataccaagctggaacacagcgtgtgtgccaacgagatgagaaaggtgtccaagtcctccacccatccccagcacaaccctaacgaaaatgagatcctggtggctgatacctacgaccagtctcagagccctatggccaaggcccacggcaccagctcttatacccctgataagagctccttcaacctggccaccgtggtggccgagacactgggcctgggcgtgcaggaggaaagcgagacacagggcccaatgagccctctgggagatgagctgtaccactgcctggaaggcaaccacaagaaacagccttttgagtccggctccgagactcctggaacaagcgagagcgctacacctgagggcagctatgaacaacttgcaccacaaccgtgtgtgggagaaactttacattctagcctcccacgagacagtgaactgtttgtgcctgaagaggggagcagcgagaaggagagcgaggacgcgccaaaaacatctcctccgacgcctgggaaacatggtttggaacagactggggaggaaaaagtgatggtgactgttcctgacaaaaatccaccttgtccttgctgtggtacccgggtaaactctgtgttgaatctgattgaacatctgaaagtgtcacacgggaaaaggggggtttgttttcggtgtgcaaaatgtggaaaggaaaatagtaactatcacagtgttgtttgtcattttaagaaatgcaggggtccagagacggagaaagccccagctggggagtggatttgtgaggtatgcaacagagattttacaaccaaaattggcctgggacaacacaagagattggcacacccagcagtgagaaatcaggaaaggatcgttgcttcccaaccgaaagaaacatcaaatagaggtgctcacaaaaggtgctggacaaaggaggaggaagaattactaataagactggaggctcagttcgagggaaacaaaaatattaataagcttattgcagaacacataaccaccaaaacagctaagcagatcagtgacaaaaggcgattgctgtccagaaagccagcagaggagccacgtgaggagcctggaacgtgtcatcacaccaggagagcagctgcgagcctgagaacggagcctgagatgagtcatcacgcccaggcagaggacagagataatggacctgggagacgccctctgccaggcagggcagctgccggagggagaacaatggacgagataagacgccaccctgataagggcaacggacagcagagacccaccaagcaaaaatcagaagaacagctgcaggcttactataaaaagacactagaggaacgactttcagctggggcacttaacaccttcccccgagcattcaagcaggtaatggaaggccgggatataaagctagtaatcaatcagacagcgcaggactgcttcggatgcctggaatccataagccaaataagaacggcaacccgagataaaaaggacacggtgacccgggagaaacacccaaagaaaccttttcagaagtggatgaagaagagagcaatcaaaaaaggtaattatcttcggttccagcgtttattttatcttgatagagggaaactggctaaaatcattttagatgatattgaatgcttgtcttgtgacataccactcagtgaaatttattcggtttttaaaacaagatgggaaacaactggtagctttaaaagccttggggactttaaaacttacgggaaggctgacaacactgccttcagagaattaattacggctaaagaaattgagaaaaatgtgcaggaaatgagcaaaggctcggctcccggtccagacgggattactcttggggacgtcgtaaagatggatcccgagttttcccggaccatggagattttcaatttatggttaacaactggtaaaatcccggacatggtgagggggtgcagaaccgttttgattccaaaatcaacccagccggatcgtttgaaagacattaataactggagacctatcacgatcggttccatcttgctgagactgttctccaggattatcacagctaggatgaccaaagcgtgccccctgaacccaaggcaaagaggctttatcagagcggcgggatgctctgaaaacttaaaactcctgcaaactataattaggtcggccaaaagcgaacacagaccactgggtgttgtattcgtggacatcgccaaggcttttgacaccgtaagccaccagcacatcctgcatgtgttgcagcaaagaggcgtggatccccacatcatcggtctggtgagcaatatgtacaaggacatcagtacgttcgtgaccacaaagaaggacacacacacagacaaaatccagatccgggttggagtaaagcagggtgacccgctgtcgccccttttatttaacctggcaatggaccctctattatgcaagctggaagagagtggcaacggattccaccgaggaggccacaccatcacagcgatggcatttgcagacgatctggttttgctgagcgactcctgggaaaatatggagaagaatattgagatactggaggccttctgcgacctgaccggactcaaaacacaggggcaaaagtgccacggcttttacatcaagccgacaaaggactcttacaccgtgaataactgcgctgcctggactatctacggcacacccctgaacatgatcaaccccggcgactctgagaaatacctcggcctgcagtttgacccgtggattggaatagcaaggtccggtctctccacaaaactagatttttggcttcagcggatcgatcaagcaccacttaaacctctgcagaaaactgatattctcaaaacatacaccatccctcggctgatctacatagctgaccactcagaagtgaaaagcgcactactcgaaacccttgaccagaagatccggacagcggtcaaggaatggcttcacctacctccgtgcacctgcgatgccatcctgtactcgagcacgagagacggcggtttgggcatcaccaaattggcaggactgatccccagcgtgcaggcccgtagactgcatcggatcgcacagtcatctgacgatacgatgaaatgcttcatggaaaaagagaaaatggaacagctgcataagaaattgtggattcaagctggaggggacagagagaacataccctcgatttgggaagcaccaccgtcgagtgaaccaccaaacaacgtgagcacaaattcggaatgggaagcaccgacccagaaagataaatttccaaagccttgcaattggaggaaaaacgaattcaaaaaatggaccaaattggcatcccaaggccgcggaattgtaaattttgaaagagacaaaattagtaaccattggatccaatactacagacgcatacctcacaggaaactcctcactgcactacaactcagggccaacgtttaccccacgagagaatttctagccaggggtagacaagaccaatacatcaaggcgtgtaggcactgcgatgcggacaacgaatcctgcgcccacatcatcggcaactgcccagtgacacaggacgcccgaatcaagaggcacaattacatctgcgaactgcttctcgaggaggcgaagaagaaggactgggtagtgttcaaggaaccgcacataagggattccaacaaggaactgtacaaacctgacctgatatttgtgaaggatgcccgtgcacttgtcgtggatgtgacagtacggtatgaagcagccaaatcatcgctggaggaagccgctgcagagaaagtgagaaagtacaaacacctggaaacggaagtaagacatctcacgaatgcaaaggacgttacttttgtgggctttcccctaggagcgcgggggaaatggcaccaagataactttaaacttttgactgagcttggcctctccaaatcgaggcaagtgaaaatggcagagactttttccacagtagcgctcttttcatctgtggacattgtacatatgtttgccagtagggccagaaaatctatggttatgtgataataggctgccttctgcggggcttgccttctggccatgcccttcttctctcccttgcacctgtacctcttggtctttgaataaagcctgagtaggaaggaccggtagacatgataagatacattgatgagtttggacaaaccacaactagaatgcagtgaaaaaaatgctttatttgtgaaatttgtgatgctattgctttatttgtaaccattataagctgcaataaacaagttaacaacaacaaaaaaaaaaaaaaaaaaaaaaaaaaaaaaacgttgactaaaaaaaaaaaaaaaaaaaaaaaaaaaaaaaaaaaaaaaaaaaaaaaaaaaaaaaaaaaaaaaaaaaaaa

SEQ ID NO: 11226 - DNA, 5528 bp, synthetic construct
  source 1..5528: mol_type = other DNA
ggtctagttacaactgggcatcgctgcagagatcgcacctcctcgtggtcccgctggtagcccttcgaagggtgactaagtcgatctctgccccaggtacggagccgttgggactcaccagtccaacgtaactcctgcctaaattcggtgaaacaaattcctcggtaaaaagccccatggcccctaagaaaaagcggaaggtgcctaagagaaaggtgtccagcgccgagggcgctgccaaggaagagcctaaacggagaagcgccagactgagcgccaagccccccgccaaggtggaagccaagcctaagaaggccgccgctaaggacaagagcagcgataagaaagtccagaccaagggcaagcggggcgccaaaggcaaacaggccgaggtggccaaccaggagacaaaggaagatctgcctgctgagaacggcgaaaccaagaccgaggaatctccagcttctgacgaggccggagagaaggaggccaaaagcgacagcggctctgagacacctggaacaagcgagagcgccaccccggaatccaatatcagcggctctagctgcggcagccccaacagcgccgacaccagcagcgacttcaaggacctgtggaccaagctgaaggaatgccacgaccgggaagtgcagggactccaggtgaaggtcaccaaactcaagcaagaaagaatcctggacgcccagagactggaagaattcttcaccaagaaccagcagctgagagagcagcagaaagtgctgcacgagacaatcaaggttctggaagatagactgcgggccggcctgtgcgacagatgcgccgtgaccgaggaacacatgcgcaaaaagcagcaggagttcgagaacattagacagcaaaatctgaaattgatcacagagctgatgaacgagagaaacacactgcaggaggagaacaagaagctgagcgagcagctgcaacagaagatcgagaatgatcagcaacaccaggccgctgagctggaatgtgaagaggacgtgatccccgacagcccaatcacagctttcagcttttctggcgtgaacagactgaggcggaaggaaaacccccacgtgcggtacatcgagcagacccataccaagctggaacacagcgtgtgtgccaacgagatgagaaaggtgtccaagtcctccacccatccccagcacaaccctaacgaaaatgagatcctggtggctgatacctacgaccagtctcagagccctatggccaaggcccacggcaccagctcttatacccctgataagagctccttcaacctggccaccgtggtggccgagacactgggcctgggcgtgcaggaggaaagcgagacacagggcccaatgagccctctgggagatgagctgtaccactgcctggaaggcaaccacaagaaacagccttttgagtccggctccgagactcctggaacaagcgagagcgctacacctgagggcagctatgaacaacttgcaccacaaccgtgtgtgggagaaactttacattctagcctcccacgagacagtgaactgtttgtgcctgaagaggggagcagcgagaaggagagcgaggacgcgccaaaaacatctcctccgacgcctgggaaacatggtttggaacagactggggaggaaaaagtgatggtgactgttcctgacaaaaatccaccttgtccttgctgtggtacccgggtaaactctgtgttgaatctgattgaacatctgaaagtgtcacacgggaaaaggggggtttgttttcggtgtgcaaaatgtggaaaggaaaatagtaactatcacagtgttgtttgtcattttaagaaatgcaggggtccagagacggagaaagccccagctggggagtggatttgtgaggtatgcaacagagattttacaaccaaaattggcctgggacaacacaagagattggcacacccagcagtgagaaatcaggaaaggatcgttgcttcccaaccgaaagaaacatcaaatagaggtgctcacaaaaggtgctggacaaaggaggaggaagaattactaataagactggaggctcagttcgagggaaacaaaaatattaataagcttattgcagaacacataaccaccaaaacagctaagcagatcagtgacaaaaggcgattgctgtccagaaagccagcagaggagccacgtgaggagcctggaacgtgtcatcacaccaggagagcagctgcgagcctgagaacggagcctgagatgagtcatcacgcccaggcagaggacagagataatggacctgggagacgccctctgccaggcagggcagctgccggagggagaacaatggacgagataagacgccaccctgataagggcaacggacagcagagacccaccaagcaaaaatcagaagaacagctgcaggcttactataaaaagacactagaggaacgactttcagctggggcacttaacaccttcccccgagcattcaagcaggtaatggaaggccgggatataaagctagtaatcaatcagacagcgcaggactgcttcggatgcctggaatccataagccaaataagaacggcaacccgagataaaaaggacacggtgacccgggagaaacacccaaagaaaccttttcagaagtggatgaagaagagagcaatcaaaaaaggtaattatcttcggttccagcgtttattttatcttgatagagggaaactggctaaaatcattttagatgatattgaatgcttgtcttgtgacataccactcagtgaaatttattcggtttttaaaacaagatgggaaacaactggtagctttaaaagccttggggactttaaaacttacgggaaggctgacaacactgccttcagagaattaattacggctaaagaaattgagaaaaatgtgcaggaaatgagcaaaggctcggctcccggtccagacgggattactcttggggacgtcgtaaagatggatcccgagttttcccggaccatggagattttcaatttatggttaacaactggtaaaatcccggacatggtgagggggtgcagaaccgttttgattccaaaatcaacccagccggatcgtttgaaagacattaataactggagacctatcacgatcggttccatcttgctgagactgttctccaggattatcacagctaggatgaccaaagcgtgccccctgaacccaaggcaaagaggctttatcagagcggcgggatgctctgaaaacttaaaactcctgcaaactataattaggtcggccaaaagcgaacacagaccactgggtgttgtattcgtggacatcgccaaggcttttgacaccgtaagccaccagcacatcctgcatgtgttgcagcaaagaggcgtggatccccacatcatcggtctggtgagcaatatgtacaaggacatcagtacgttcgtgaccacaaagaaggacacacacacagacaaaatccagatccgggttggagtaaagcagggtgacccgctgtcgccccttttatttaacctggcaatggaccctctattatgcaagctggaagagagtggcaacggattccaccgaggaggccacaccatcacagcgatggcatttgcagacgatctggttttgctgagcgactcctgggaaaatatggagaagaatattgagatactggaggccttctgcgacctgaccggactcaaaacacaggggcaaaagtgccacggcttttacatcaagccgacaaaggactcttacaccgtgaataactgcgctgcctggactatctacggcacacccctgaacatgatcaaccccggcgactctgagaaatacctcggcctgcagtttgacccgtggattggaatagcaaggtccggtctctccacaaaactagatttttggcttcagcggatcgatcaagcaccacttaaacctctgcagaaaactgatattctcaaaacatacaccatccctcggctgatctacatagctgaccactcagaagtgaaaagcgcactactcgaaacccttgaccagaagatccggacagcggtcaaggaatggcttcacctacctccgtgcacctgcgatgccatcctgtactcgagcacgagagacggcggtttgggcatcaccaaattggcaggactgatccccagcgtgcaggcccgtagactgcatcggatcgcacagtcatctgacgatacgatgaaatgcttcatggaaaaagagaaaatggaacagctgcataagaaattgtggattcaagctggaggggacagagagaacataccctcgatttgggaagcaccaccgtcgagtgaaccaccaaacaacgtgagcacaaattcggaatgggaagcaccgacccagaaagataaatttccaaagccttgcaattggaggaaaaacgaattcaaaaaatggaccaaattggcatcccaaggccgcggaattgtaaattttgaaagagacaaaattagtaaccattggatccaatactacagacgcatacctcacaggaaactcctcactgcactacaactcagggccaacgtttaccccacgagagaatttctagccaggggtagacaagaccaatacatcaaggcgtgtaggcactgcgatgcggacattgaatcctgcgcccacatcatcggcaactgcccagtgacacaggacgcccgaatcaagaggcacaattacatctgcgaactgcttctcgaggaggcgaagaagaaggactgggtagtgttcaaggaaccgcacataagggattccaacaaggaactgtacaaacctgacctgatatttgtgaaggatgcccgtgcacttgtcgtggatgtgacagtacggtatgaagcagccaaatcatcgctggaggaagccgctgcagagaaagtgagaaagtacaaacacctggaaacggaagtaagacatctcacgaatgcaaaggacgttacttttgtgggctttcccctaggagcgcgggggaaatggcaccaagataactttaaacttttgactgagcttggcctctccaaatcgaggcaagtgaaaatggcagagactttttccacagtagcgctcttttcatctgtggacattgtacatatgtttgccagtagggccagaaaatctatggttatgtgataataggctgccttctgcggggcttgccttctggccatgcccttcttctctcccttgcacctgtacctcttggtctttgaataaagcctgagtaggaaggaccggtagacatgataagatacattgatgagtttggacaaaccacaactagaatgcagtgaaaaaaatgctttatttgtgaaatttgtgatgctattgctttatttgtaaccattataagctgcaataaacaagttaacaacaacaaaaaaaaaaaaaaaaaaaaaaaaaaaaaaacgttgactaaaaaaaaaaaaaaaaaaaaaaaaaaaaaaaaaaaaaaaaaaaaaaaaaaaaaaaaaaaaaaaaaaaaaa

SEQ ID NO: 11227 - DNA, 4499 bp, synthetic construct
  source 1..4499: mol_type = other DNA
ggtctagttacaactgggcatcgctgcagagatcgcacctcctcgtggtcccgctggtagcccttcgaagggtgactaagtcgatctctgccccaggtacggagccgttgggactcaccagtccaacgtaactcctgcctaaattcggtgaaacaaattcctcggtaaaaagccccatgcctaagagaaaggtgtccagcgccgagggcgctgccaaggaagagcctaaacggagaagcgccagactgagcgccaagccccccgccaaggtggaagccaagcctaagaaggccgccgctaaggacaagagcagcgataagaaagtccagaccaagggcaagcggggcgccaaaggcaaacaggccgaggtggccaaccaggagacaaaggaagatctgcctgctgagaacggcgaaaccaagaccgaggaatctccagcttctgacgaggccggagagaaggaggccaaaagcgacagcggctctgagacacctggaacaagcgagagcgccaccccggaatccctgtttgtgcctgaagaggggagcagcgagaaggagagcgaggacgcgccaaaaacatctcctccgacgcctgggaaacatggtttggaacagactggggaggaaaaagtgatggtgactgttcctgacaaaaatccaccttgtccttgctgtggtacccgggtaaactctgtgttgaatctgattgaacatctgaaagtgtcacacgggaaaaggggggtttgttttcggtgtgcaaaatgtggaaaggaaaatagtaactatcacagtgttgtttgtcattttaagaaatgcaggggtccagagacggagaaagccccagctggggagtggatttgtgaggtatgcaacagagattttacaaccaaaattggcctgggacaacacaagagattggcacacccagcagtgagaaatcaggaaaggatcgttgcttcccaaccgaaagaaacatcaaatagaggtgctcacaaaaggtgctggacaaaggaggaggaagaattactaataagactggaggctcagttcgagggaaacaaaaatattaataagcttattgcagaacacataaccaccaaaacagctaagcagatcagtgacaaaaggcgattgctgtccagaaagccagcagaggagccacgtgaggagcctggaacgtgtcatcacaccaggagagcagctgcgagcctgagaacggagcctgagatgagtcatcacgcccaggcagaggacagagataatggacctgggagacgccctctgccaggcagggcagctgccggagggagaacaatggacgagataagacgccaccctgataagggcaacggacagcagagacccaccaagcaaaaatcagaagaacagctgcaggcttactataaaaagacactagaggaacgactttcagctggggcacttaacaccttcccccgagcattcaagcaggtaatggaaggccgggatataaagctagtaatcaatcagacagcgcaggactgcttcggatgcctggaatccataagccaaataagaacggcaacccgagataaaaaggacacggtgacccgggagaaacacccaaagaaaccttttcagaagtggatgaagaagagagcaatcaaaaaaggtaattatcttcggttccagcgtttattttatcttgatagagggaaactggctaaaatcattttagatgatattgaatgcttgtcttgtgacataccactcagtgaaatttattcggtttttaaaacaagatgggaaacaactggtagctttaaaagccttggggactttaaaacttacgggaaggctgacaacactgccttcagagaattaattacggctaaagaaattgagaaaaatgtgcaggaaatgagcaaaggctcggctcccggtccagacgggattactcttggggacgtcgtaaagatggatcccgagttttcccggaccatggagattttcaatttatggttaacaactggtaaaatcccggacatggtgagggggtgcagaaccgttttgattccaaaatcaacccagccggatcgtttgaaagacattaataactggagacctatcacgatcggttccatcttgctgagactgttctccaggattatcacagctaggatgaccaaagcgtgccccctgaacccaaggcaaagaggctttatcagagcggcgggatgctctgaaaacttaaaactcctgcaaactataattaggtcggccaaaagcgaacacagaccactgggtgttgtattcgtggacatcgccaaggcttttgacaccgtaagccaccagcacatcctgcatgtgttgcagcaaagaggcgtggatccccacatcatcggtctggtgagcaatatgtacaaggacatcagtacgttcgtgaccacaaagaaggacacacacacagacaaaatccagatccgggttggagtaaagcagggtgacccgctgtcgccccttttatttaacctggcaatggaccctctattatgcaagctggaagagagtggcaacggattccaccgaggaggccacaccatcacagcgatggcatttgcagacgatctggttttgctgagcgactcctgggaaaatatggagaagaatattgagatactggaggccttctgcgacctgaccggactcaaaacacaggggcaaaagtgccacggcttttacatcaagccgacaaaggactcttacaccgtgaataactgcgctgcctggactatctacggcacacccctgaacatgatcaaccccggcgactctgagaaatacctcggcctgcagtttgacccgtggattggaatagcaaggtccggtctctccacaaaactagatttttggcttcagcggatcgatcaagcaccacttaaacctctgcagaaaactgatattctcaaaacatacaccatccctcggctgatctacatagctgaccactcagaagtgaaaagcgcactactcgaaacccttgaccagaagatccggacagcggtcaaggaatggcttcacctacctccgtgcacctgcgatgccatcctgtactcgagcacgagagacggcggtttgggcatcaccaaattggcaggactgatccccagcgtgcaggcccgtagactgcatcggatcgcacagtcatctgacgatacgatgaaatgcttcatggaaaaagagaaaatggaacagctgcataagaaattgtggattcaagctggaggggacagagagaacataccctcgatttgggaagcaccaccgtcgagtgaaccaccaaacaacgtgagcacaaattcggaatgggaagcaccgacccagaaagataaatttccaaagccttgcaattggaggaaaaacgaattcaaaaaatggaccaaattggcatcccaaggccgcggaattgtaaattttgaaagagacaaaattagtaaccattggatccaatactacagacgcatacctcacaggaaactcctcactgcactacaactcagggccaacgtttaccccacgagagaatttctagccaggggtagacaagaccaatacatcaaggcgtgtaggcactgcgatgcggacattgaatcctgcgcccacatcatcggcaactgcccagtgacacaggacgcccgaatcaagaggcacaattacatctgcgaactgcttctcgaggaggcgaagaagaaggactgggtagtgttcaaggaaccgcacataagggattccaacaaggaactgtacaaacctgacctgatatttgtgaaggatgcccgtgcacttgtcgtggatgtgacagtacggtatgaagcagccaaatcatcgctggaggaagccgctgcagagaaagtgagaaagtacaaacacctggaaacggaagtaagacatctcacgaatgcaaaggacgttacttttgtgggctttcccctaggagcgcgggggaaatggcaccaagataactttaaacttttgactgagcttggcctctccaaatcgaggcaagtgaaaatggcagagactttttccacagtagcgctcttttcatctgtggacattgtacatatgtttgccagtagggccagaaaatctatggttatgtgataataggctgccttctgcggggcttgccttctggccatgcccttcttctctcccttgcacctgtacctcttggtctttgaataaagcctgagtaggaaggaccggtagacatgataagatacattgatgagtttggacaaaccacaactagaatgcagtgaaaaaaatgctttatttgtgaaatttgtgatgctattgctttatttgtaaccattataagctgcaataaacaagttaacaacaacaaaaaaaaaaaaaaaaaaaaaaaaaaaaaaacgttgactaaaaaaaaaaaaaaaaaaaaaaaaaaaaaaaaaaaaaaaaaaaaaaaaaaaaaaaaaaaaaaaaaaaaaa

SEQ ID NO: 11228 - DNA, 5459 bp, synthetic construct
  source 1..5459: mol_type = other DNA
ggtctagttacaactgggcatcgctgcagagatcgcacctcctcgtggtcccgctggtagcccttcgaagggtgactaagtcgatctctgccccaggtacggagccgttgggactcaccagtccaacgtaactcctgcctaaattcggtgaaacaaattcctcggtaaaaagccccatggcccctaagaaaaagcggaaggtgaatatcagcggctctagctgcggcagccccaacagcgccgacaccagcagcgacttcaaggacctgtggaccaagctgaaggaatgccacgaccgggaagtgcagggactccaggtgaaggtcaccaaactcaagcaagaaagaatcctggacgcccagagactggaagaattcttcaccaagaaccagcagctgagagagcagcagaaagtgctgcacgagacaatcaaggttctggaagatagactgcgggccggcctgtgcgacagatgcgccgtgaccgaggaacacatgcgcaaaaagcagcaggagttcgagaacattagacagcaaaatctgaaattgatcacagagctgatgaacgagagaaacacactgcaggaggagaacaagaagctgagcgagcagctgcaacagaagatcgagaatgatcagcaacaccaggccgctgagctggaatgtgaagaggacgtgatccccgacagcccaatcacagctttcagcttttctggcgtgaacagactgaggcggaaggaaaacccccacgtgcggtacatcgagcagacccataccaagctggaacacagcgtgtgtgccaacgagatgagaaaggtgtccaagtcctccacccatccccagcacaaccctaacgaaaatgagatcctggtggctgatacctacgaccagtctcagagccctatggccaaggcccacggcaccagctcttatacccctgataagagctccttcaacctggccaccgtggtggccgagacactgggcctgggcgtgcaggaggaaagcgagacacagggcccaatgagccctctgggagatgagctgtaccactgcctggaaggcaaccacaagaaacagccttttgagtccggctccgagactcctggaacaagcgagagcgctacacctgagggcagccctaagagaaaggtgtccagcgccgagggcgctgccaaggaagagcctaaacggagaagcgccagactgagcgccaagccccccgccaaggtggaagccaagcctaagaaggccgccgctaaggacaagagcagcgataagaaagtccagaccaagggcaagcggggcgccaaaggcaaacaggccgaggtggccaaccaggagacaaaggaagatctgcctgctgagaacggcgaaaccaagaccgaggaatctccagcttctgacgaggccggagagaaggaggccaaaagcgacagcggctctgagacacctggaacaagcgagagcgccaccccggaatccctgtttgtgcctgaagaggggagcagcgagaaggagagcgaggacgcgccaaaaacatctcctccgacgcctgggaaacatggtttggaacagactggggaggaaaaagtgatggtgactgttcctgacaaaaatccaccttgtccttgctgtggtacccgggtaaactctgtgttgaatctgattgaacatctgaaagtgtcacacgggaaaaggggggtttgttttcggtgtgcaaaatgtggaaaggaaaatagtaactatcacagtgttgtttgtcattttaagaaatgcaggggtccagagacggagaaagccccagctggggagtggatttgtgaggtatgcaacagagattttacaaccaaaattggcctgggacaacacaagagattggcacacccagcagtgagaaatcaggaaaggatcgttgcttcccaaccgaaagaaacatcaaatagaggtgctcacaaaaggtgctggacaaaggaggaggaagaattactaataagactggaggctcagttcgagggaaacaaaaatattaataagcttattgcagaacacataaccaccaaaacagctaagcagatcagtgacaaaaggcgattgctgtccagaaagccagcagaggagccacgtgaggagcctggaacgtgtcatcacaccaggagagcagctgcgagcctgagaacggagcctgagatgagtcatcacgcccaggcagaggacagagataatggacctgggagacgccctctgccaggcagggcagctgccggagggagaacaatggacgagataagacgccaccctgataagggcaacggacagcagagacccaccaagcaaaaatcagaagaacagctgcaggcttactataaaaagacactagaggaacgactttcagctggggcacttaacaccttcccccgagcattcaagcaggtaatggaaggccgggatataaagctagtaatcaatcagacagcgcaggactgcttcggatgcctggaatccataagccaaataagaacggcaacccgagataaaaaggacacggtgacccgggagaaacacccaaagaaaccttttcagaagtggatgaagaagagagcaatcaaaaaaggtaattatcttcggttccagcgtttattttatcttgatagagggaaactggctaaaatcattttagatgatattgaatgcttgtcttgtgacataccactcagtgaaatttattcggtttttaaaacaagatgggaaacaactggtagctttaaaagccttggggactttaaaacttacgggaaggctgacaacactgccttcagagaattaattacggctaaagaaattgagaaaaatgtgcaggaaatgagcaaaggctcggctcccggtccagacgggattactcttggggacgtcgtaaagatggatcccgagttttcccggaccatggagattttcaatttatggttaacaactggtaaaatcccggacatggtgagggggtgcagaaccgttttgattccaaaatcaacccagccggatcgtttgaaagacattaataactggagacctatcacgatcggttccatcttgctgagactgttctccaggattatcacagctaggatgaccaaagcgtgccccctgaacccaaggcaaagaggctttatcagagcggcgggatgctctgaaaacttaaaactcctgcaaactataattaggtcggccaaaagcgaacacagaccactgggtgttgtattcgtggacatcgccaaggcttttgacaccgtaagccaccagcacatcctgcatgtgttgcagcaaagaggcgtggatccccacatcatcggtctggtgagcaatatgtacaaggacatcagtacgttcgtgaccacaaagaaggacacacacacagacaaaatccagatccgggttggagtaaagcagggtgacccgctgtcgccccttttatttaacctggcaatggaccctctattatgcaagctggaagagagtggcaacggattccaccgaggaggccacaccatcacagcgatggcatttgcagacgatctggttttgctgagcgactcctgggaaaatatggagaagaatattgagatactggaggccttctgcgacctgaccggactcaaaacacaggggcaaaagtgccacggcttttacatcaagccgacaaaggactcttacaccgtgaataactgcgctgcctggactatctacggcacacccctgaacatgatcaaccccggcgactctgagaaatacctcggcctgcagtttgacccgtggattggaatagcaaggtccggtctctccacaaaactagatttttggcttcagcggatcgatcaagcaccacttaaacctctgcagaaaactgatattctcaaaacatacaccatccctcggctgatctacatagctgaccactcagaagtgaaaactgcactactcgaaacccttgaccagaagatccggacagcggtcaaggaatggcttcacctacctccgtgcacctgcgatgccatcctgtactcgagcacgagagacggcggtttgggcatcaccaaattggcaggactgatccccagcgtgcaggcccgtagactgcatcggatcgcacagtcatctgacgatacgatgaaatgcttcatggaaaaagagaaaatggaacagctgcataagaaattgtggattcaagctggaggggacagagagaacataccctcgatttgggaagcaccaccgtcgagtgaaccaccaaacaacgtgagcacaaattcggaatgggaagcaccgacccagaaagataaatttccaaagccttgcaattggaggaaaaacgaattcaaaaaatggaccaaattggcatcccaaggccgcggaattgtaaattttgaaagagacaaaattagtaaccattggatccaatactacagacgcatacctcacaggaaactcctcactgcactacaactcagggccaacgtttaccccacgagagaatttctagccaggggtagacaagaccaatacatcaaggcgtgtaggcactgcgatgcggacattgaatcctgcgcccacatcatcggcaactgcccagtgacacaggacgcccgaatcaagaggcacaattacatctgcgaactgcttctcgaggaggcgaagaagaaggactgggtagtgttcaaggaaccgcacataagggattccaacaaggaactgtacaaacctgacctgatatttgtgaaggatgcccgtgcacttgtcgtggatgtgacagtacggtatgaagcagccaaatcatcgctggaggaagccgctgcagagaaagtgagaaagtacaaacacctggaaacggaagtaagacatctcacgaatgcaaaggacgttacttttgtgggctttcccctaggagcgcgggggaaatggcaccaagataactttaaacttttgactgagcttggcctctccaaatcgaggcaagtgaaaatggcagagactttttccacagtagcgctcttttcatctgtggacattgtacatatgtttgccagtagggccagaaaatctatggttatgtgataataggctgccttctgcggggcttgccttctggccatgcccttcttctctcccttgcacctgtacctcttggtctttgaataaagcctgagtaggaaggaccggtagacatgataagatacattgatgagtttggacaaaccacaactagaatgcagtgaaaaaaatgctttatttgtgaaatttgtgatgctattgctttatttgtaaccattataagctgcaataaacaagttaacaacaacaaaaaaaaaaaaaaaaaaaaaaaaaaaaaaacgttgactaaaaaaaaaaaaaaaaaaaaaaaaaaaaaaaaaaaaaaaaaaaaaaaaaaaaaaaaaaaaaaaaaaaaaa

SEQ ID NO: 11229 - DNA, 5156 bp, synthetic construct
  source 1..5156: mol_type = other DNA
ggtctagttacaactgggcatcgctgcagagatcgcacctcctcgtggtcccgctggtagcccttcgaagggtgactaagtcgatctctgccccaggtacggagccgttgggactcaccagtccaacgtaactcctgcctaaattcggtgaaacaaattcctcggtaaaaagccccatggcttcttgcccgaaacctggccccccggtttcagcaggggcaatgagtttggaaagtggactgaccacccactccgttctcgccatcgaacgtggtcccaattcgttggcaaattccggatcagactttgggggggggggtctggggctaccgttacgcctattgagggtatcggtcggcactcagacctcccgctccgactgggtagacctggtgtcctggagccacccaggacccacgtctaagtcccagcaggttgacctggtgtctttatttcctaaacaccgggttgacctgttatccaaaaacgaccaggtagacctggtggctcaatttttaccatctaaatttccccccaatttggcagaaaatgatttggctttgctggtgaacttagagttctacagatcggatttgcatgtgtatgagtgtgttcataaggctgcacattgggagggattaagtggtttgcctgaggtgtatgaacaacttgcaccacaaccgtgtgtgggagaaactttacattctagcctcccacgagacagtgaactgtttgtgcctgaagaggggagcagcgagaaggagagcgaggacgcgccaaaaacatctcctccgacgcctgggaaacatggtttggaacagactggggaggaaaaagtgatggtgactgttcctgacaaaaatccaccttgtccttgctgtggtacccgggtaaactctgtgttgaatctgattgaacatctgaaagtgtcacacgggaaaaggggggtttgttttcggtgtgcaaaatgtggaaaggaaaatagtaactatcacagtgttgtttgtcattttaagaaatgcaggggtccagagacggagaaagccccagctggggagtggatttgtgaggtatgcaacagagattttacaaccaaaattggcctgggacaacacaagagattggcacacccagcagtgagaaatcaggaaaggatcgttgcttcccaaccgaaagaaacatcaaatagaggtgctcacaaaaggtgctggacaaaggaggaggaagaattactaataagactggaggctcagttcgagggaaacaaaaatattaataagcttattgcagaacacataaccaccaaaacagctaagcagatcagtgacaaaaggcgattgctgtccagaaagccagcagaggagccacgtgaggagcctggaacgtgtcatcacaccaggagagcagctgcgagcctgagaacggagcctgagatgagtcatcacgcccaggcagaggacagagataatggacctgggagacgccctctgccaggcagggcagctgccggagggagaacaatggacgagataagacgccaccctgataagggcaacggacagcagagacccaccaagcaaaaatcagaagaacagctgcaggcttactataaaaagacactagaggaacgactttcagctggggcacttaacaccttcccccgagcattcaagcaggtaatggaaggccgggatataaagctagtaatcaatcagacagcgcaggactgcttcggatgcctggaatccataagccaaataagaacggcaacccgagataaaaaggacacggtgacccgggagaaacacccaaagaaaccttttcagaagtggatgaagaagagagcaatcaaaaaaggtaattatcttcggttccagcgtttattttatcttgatagagggaaactggctaaaatcattttagatgatattgaatgcttgtcttgtgacataccactcagtgaaatttattcggtttttaaaacaagatgggaaacaactggtagctttaaaagccttggggactttaaaacttacgggaaggctgacaacactgccttcagagaattaattacggctaaagaaattgagaaaaatgtgcaggaaatgagcaaaggctcggctcccggtccagacgggattactcttggggacgtcgtaaagatggatcccgagttttcccggaccatggagattttcaatttatggttaacaactggtaaaatcccggacatggtgagggggtgcagaaccgttttgattgacacttcaaacctcatggagcagatcctttcatctgacaacctcaacagggcttacttgcaagtggttcgcaacaaaggggctgagggcgtggacggaatgaagtacacggagttgaaggagcatctcgcgaagaacggagagacaataaagggacaactcagaactgctgcttataagcctcaaccggcgagacgggtagagatacccaagcccgacggtggcgtgaggaacctcggcgtccctacagtcacggaccgcttcatccaacaagccatcgctcaagtcctcactccaatctacgaggagcaattccacgaccattcctacgggttccggccaaaccggtgcgcccaacaagctatacttacagctttgaacataatgaacgacggaaacgactggattgtcgacatagatctcgagaagttcttcgacacagtcaatcatgacaagttgatgactctcatcgggcgcaccattgcagacggcgacgtaatctccattgttcgaaagtacctcgtgtccggaatcatgatagacgacgagtacgaggactcaatcgtgggaaccccacaaggcggcaacttgtctccccttcttgcaaacatcatgcttaacgagttggataaggaaatggaagctgcaggccttaacttcgtcaggtacgcagacgactgtatcatcatggtgggatctgagatgtctgccaaccgggtcatgaggaacatctcaagatttattgaggagaagttggggcttaaggtgaatatgacgaagtctaaggtggaccggcccagcggacttaagtatctcggattcggcttttacttcgaccccagagctcatcaattcaaggccaagcctcacgcgaagagtgtcgcgaagtttaagaagagaatgaaggagctcacgtgcaggagttggggcgtgtctaactcctacaaggtcgagaagctcaatcaattgatccgtggctggattaattactttaagatcgggagtatgaaaacactctgtaaggaacttgactcacgcatcagatacaggctccggatgtgcatctggaagcaatggaaaactccacaaaaccaggagaagaacttggtaaagctcgggatcgaccgcaacacggccaggcgggtggcgtacactggcaagcgaatcgcctacgtctgtaacaagggagctgtgaacgtcgcgataagtaacaagaggctcgcttcattccagtttgacccgtggattggaatagcaaggtccggtctctccacaaaactagatttttggcttcagcggatcgatcaagcaccacttaaacctctgcagaaaactgatattctcaaaacatacaccatccctcggctgatctacatagctgaccactcagaagtgaaaagcgcactactcgaaacccttgaccagaagatccggacagcggtcaaggaatggcttcacctacctccgtgcacctgcgatgccatcctgtactcgagcacgagagacggcggtttgggcatcaccaaattggcaggactgatccccagcgtgcaggcccgtagactgcatcggatcgcacagtcatctgacgatacgatgaaatgcttcatggaaaaagagaaaatggaacagctgcataagaaattgtggattcaagctggaggggacagagagaacataccctcgatttgggaagcaccaccgtcgagtgaaccaccaaacaacgtgagcacaaattcggaatgggaagcaccgacccagaaagataaatttccaaagccttgcaattggaggaaaaacgaattcaaaaaatggaccaaattggcatcccaaggccgcggaattgtaaattttgaaagagacaaaattagtaaccattggatccaatactacagacgcatacctcacaggaaactcctcactgcactacaactcagggccaacgtttaccccacgagagaatttctagccaggggtagacaagaccaatacatcaaggcgtgtaggcactgcgatgcggacattgaatcctgcgcccacatcatcggcaactgcccagtgacacaggacgcccgaatcaagaggcacaattacatctgcgaactgcttctcgaggaggcgaagaagaaggactgggtagtgttcaaggaaccgcacataagggattccaacaaggaactgtacaaacctgacctgatatttgtgaaggatgcccgtgcacttgtcgtggatgtgacagtacggtatgaagcagccaaatcatcgctggaggaagccgctgcagagaaagtgagaaagtacaaacacctggaaacggaagtaagacatctcacgaatgcaaaggacgttacttttgtgggctttcccctaggagcgcgggggaaatggcaccaagataactttaaacttttgactgagcttggcctctccaaatcgaggcaagtgaaaatggcagagactttttccacagtagcgctcttttcatctgtggacattgtacatatgtttgccagtagggccagaaaatctatggttatgtgataataggctgccttctgcggggcttgccttctggccatgcccttcttctctcccttgcacctgtacctcttggtctttgaataaagcctgagtaggaaggaccggtagacatgataagatacattgatgagtttggacaaaccacaactagaatgcagtgaaaaaaatgctttatttgtgaaatttgtgatgctattgctttatttgtaaccattataagctgcaataaacaagttaacaacaacaaaaaaaaaaaaaaaaaaaaaaaaaaaaaaacgttgactaaaaaaaaaaaaaaaaaaaaaaaaaaaaaaaaaaaaaaaaaaaaaaaaaaaaaaaaaaaaaaaaaaaaaa

SEQ ID NO: 11230 - DNA, 5636 bp, synthetic construct
  source 1..5636: mol_type = other DNA
ggtctagttacaactgggcatcgctgcagagatcgcacctcctcgtggtcccgctggtagcccttcgaagggtgactaagtcgatctctgccccaggtacggagccgttgggactcaccagtccaacgtaactcctgcctaaattcggtgaaacaaattcctcggtaaaaagccccatggcccctaagaaaaagcggaaggtgaatatcagcggctctagctgcggcagccccaacagcgccgacaccagcagcgacttcaaggacctgtggaccaagctgaaggaatgccacgaccgggaagtgcagggactccaggtgaaggtcaccaaactcaagcaagaaagaatcctggacgcccagagactggaagaattcttcaccaagaaccagcagctgagagagcagcagaaagtgctgcacgagacaatcaaggttctggaagatagactgcgggccggcctgtgcgacagatgcgccgtgaccgaggaacacatgcgcaaaaagcagcaggagttcgagaacattagacagcaaaatctgaaattgatcacagagctgatgaacgagagaaacacactgcaggaggagaacaagaagctgagcgagcagctgcaacagaagatcgagaatgatcagcaacaccaggccgctgagctggaatgtgaagaggacgtgatccccgacagcccaatcacagctttcagcttttctggcgtgaacagactgaggcggaaggaaaacccccacgtgcggtacatcgagcagacccataccaagctggaacacagcgtgtgtgccaacgagatgagaaaggtgtccaagtcctccacccatccccagcacaaccctaacgaaaatgagatcctggtggctgatacctacgaccagtctcagagccctatggccaaggcccacggcaccagctcttatacccctgataagagctccttcaacctggccaccgtggtggccgagacactgggcctgggcgtgcaggaggaaagcgagacacagggcccaatgagccctctgggagatgagctgtaccactgcctggaaggcaaccacaagaaacagccttttgagtccggctccgagactcctggaacaagcgagagcgctacacctgagggcagctatgaacaacttgcaccacaaccgtgtgtgggagaaactttacattctagcctcccacgagacagtgaactgtttgtgcctgaagaggggagcagcgagaaggagagcgaggacgcgccaaaaacatctcctccgacgcctgggaaacatggtttggaacagactggggaggaaaaagtgatggtgactgttcctgacaaaaatccaccttgtccttgctgtggtacccgggtaaactctgtgttgaatctgattgaacatctgaaagtgtcacacgggaaaaggggggtttgttttcggtgtgcaaaatgtggaaaggaaaatagtaactatcacagtgttgtttgtcattttaagaaatgcaggggtccagagacggagaaagccccagctggggagtggatttgtgaggtatgcaacagagattttacaaccaaaattggcctgggacaacacaagagattggcacacccagcagtgagaaatcaggaaaggatcgttgcttcccaaccgaaagaaacatcaaatagaggtgctcacaaaaggtgctggacaaaggaggaggaagaattactaataagactggaggctcagttcgagggaaacaaaaatattaataagcttattgcagaacacataaccaccaaaacagctaagcagatcagtgacaaaaggcgattgctgtccagaaagccagcagaggagccacgtgaggagcctggaacgtgtcatcacaccaggagagcagctgcgagcctgagaacggagcctgagatgagtcatcacgcccaggcagaggacagagataatggacctgggagacgccctctgccaggcagggcagctgccggagggagaacaatggacgagataagacgccaccctgataagggcaacggacagcagagacccaccaagcaaaaatcagaagaacagctgcaggcttactataaaaagacactagaggaacgactttcagctggggcacttaacaccttcccccgagcattcaagcaggtaatggaaggccgggatataaagctagtaatcaatcagacagcgcaggactgcttcggatgcctggaatccataagccaaataagaacggcaacccgagataaaaaggacacggtgacccgggagaaacacccaaagaaaccttttcagaagtggatgaagaagagagcaatcaaaaaaggtaattatcttcggttccagcgtttattttatcttgatagagggaaactggctaaaatcattttagatgatattgaatgcttgtcttgtgacataccactcagtgaaatttattcggtttttaaaacaagatgggaaacaactggtagctttaaaagccttggggactttaaaacttacgggaaggctgacaacactgccttcagagaattaattacggctaaagaaattgagaaaaatgtgcaggaaatgagcaaaggctcggctcccggtccagacgggattactcttggggacgtcgtaaagatggatcccgagttttcccggaccatggagattttcaatttatggttaacaactggtaaaatcccggacatggtgagggggtgcagaaccgttttgattgacacttcaaacctcatggagcagatcctttcatctgacaacctcaacagggcttacttgcaagtggttcgcaacaaaggggctgagggcgtggacggaatgaagtacacggagttgaaggagcatctcgcgaagaacggagagacaataaagggacaactcagaactgctgcttataagcctcaaccggcgagacgggtagagatacccaagcccgacggtggcgtgaggaacctcggcgtccctacagtcacggaccgcttcatccaacaagccatcgctcaagtcctcactccaatctacgaggagcaattccacgaccattcctacgggttccggccaaaccggtgcgcccaacaagctatacttacagctttgaacataatgaacgacggaaacgactggattgtcgacatagatctcgagaagttcttcgacacagtcaatcatgacaagttgatgactctcatcgggcgcaccattgcagacggcgacgtaatctccattgttcgaaagtacctcgtgtccggaatcatgatagacgacgagtacgaggactcaatcgtgggaaccccacaaggcggcaacttgtctccccttcttgcaaacatcatgcttaacgagttggataaggaaatggaagctgcaggccttaacttcgtcaggtacgcagacgactgtatcatcatggtgggatctgagatgtctgccaaccgggtcatgaggaacatctcaagatttattgaggagaagttggggcttaaggtgaatatgacgaagtctaaggtggaccggcccagcggacttaagtatctcggattcggcttttacttcgaccccagagctcatcaattcaaggccaagcctcacgcgaagagtgtcgcgaagtttaagaagagaatgaaggagctcacgtgcaggagttggggcgtgtctaactcctacaaggtcgagaagctcaatcaattgatccgtggctggattaattactttaagatcgggagtatgaaaacactctgtaaggaacttgactcacgcatcagatacaggctccggatgtgcatctggaagcaatggaaaactccacaaaaccaggagaagaacttggtaaagctcgggatcgaccgcaacacggccaggcgggtggcgtacactggcaagcgaatcgcctacgtctgtaacaagggagctgtgaacgtcgcgataagtaacaagaggctcgcttcattccagtttgacccgtggattggaatagcaaggtccggtctctccacaaaactagatttttggcttcagcggatcgatcaagcaccacttaaacctctgcagaaaactgatattctcaaaacatacaccatccctcggctgatctacatagctgaccactcagaagtgaaaagcgcactactcgaaacccttgaccagaagatccggacagcggtcaaggaatggcttcacctacctccgtgcacctgcgatgccatcctgtactcgagcacgagagacggcggtttgggcatcaccaaattggcaggactgatccccagcgtgcaggcccgtagactgcatcggatcgcacagtcatctgacgatacgatgaaatgcttcatggaaaaagagaaaatggaacagctgcataagaaattgtggattcaagctggaggggacagagagaacataccctcgatttgggaagcaccaccgtcgagtgaaccaccaaacaacgtgagcacaaattcggaatgggaagcaccgacccagaaagataaatttccaaagccttgcaattggaggaaaaacgaattcaaaaaatggaccaaattggcatcccaaggccgcggaattgtaaattttgaaagagacaaaattagtaaccattggatccaatactacagacgcatacctcacaggaaactcctcactgcactacaactcagggccaacgtttaccccacgagagaatttctagccaggggtagacaagaccaatacatcaaggcgtgtaggcactgcgatgcggacattgaatcctgcgcccacatcatcggcaactgcccagtgacacaggacgcccgaatcaagaggcacaattacatctgcgaactgcttctcgaggaggcgaagaagaaggactgggtagtgttcaaggaaccgcacataagggattccaacaaggaactgtacaaacctgacctgatatttgtgaaggatgcccgtgcacttgtcgtggatgtgacagtacggtatgaagcagccaaatcatcgctggaggaagccgctgcagagaaagtgagaaagtacaaacacctggaaacggaagtaagacatctcacgaatgcaaaggacgttacttttgtgggctttcccctaggagcgcgggggaaatggcaccaagataactttaaacttttgactgagcttggcctctccaaatcgaggcaagtgaaaatggcagagactttttccacagtagcgctcttttcatctgtggacattgtacatatgtttgccagtagggccagaaaatctatggttatgtgataataggctgccttctgcggggcttgccttctggccatgcccttcttctctcccttgcacctgtacctcttggtctttgaataaagcctgagtaggaaggaccggtagacatgataagatacattgatgagtttggacaaaccacaactagaatgcagtgaaaaaaatgctttatttgtgaaatttgtgatgctattgctttatttgtaaccattataagctgcaataaacaagttaacaacaacaaaaaaaaaaaaaaaaaaaaaaaaaaaaaaacgttgactaaaaaaaaaaaaaaaaaaaaaaaaaaaaaaaaaaaaaaaaaaaaaaaaaaaaaaaaaaaaaaaaaaaaaa

SEQ ID NO: 11231 - DNA, 4952 bp, synthetic construct
  source 1..4952: mol_type = other DNA
ggtctagttacaactgggcatcgctgcagagatcgcacctcctcgtggtcccgctggtagcccttcgaagggtgactaagtcgatctctgccccaggtacggagccgttgggactcaccagtccaacgtaactcctgcctaaattcggtgaaacaaattcctcggtaaaaagccccatgcctaagagaaaggtgtccagcgccgagggcgctgccaaggaagagcctaaacggagaagcgccagactgagcgccaagccccccgccaaggtggaagccaagcctaagaaggccgccgctaaggacaagagcagcgataagaaagtccagaccaagggcaagcggggcgccaaaggcaaacaggccgaggtggccaaccaggagacaaaggaagatctgcctgctgagaacggcgaaaccaagaccgaggaatctccagcttctgacgaggccggagagaaggaggccaaaagcgacagcggctctgagacacctggaacaagcgagagcgccaccccggaatccctgtttgtgcctgaagaggggagcagcgagaaggagagcgaggacgcgccaaaaacatctcctccgacgcctgggaaacatggtttggaacagactggggaggaaaaagtgatggtgactgttcctgacaaaaatccaccttgtccttgctgtggtacccgggtaaactctgtgttgaatctgattgaacatctgaaagtgtcacacgggaaaaggggggtttgttttcggtgtgcaaaatgtggaaaggaaaatagtaactatcacagtgttgtttgtcattttaagaaatgcaggggtccagagacggagaaagccccagctggggagtggatttgtgaggtatgcaacagagattttacaaccaaaattggcctgggacaacacaagagattggcacacccagcagtgagaaatcaggaaaggatcgttgcttcccaaccgaaagaaacatcaaatagaggtgctcacaaaaggtgctggacaaaggaggaggaagaattactaataagactggaggctcagttcgagggaaacaaaaatattaataagcttattgcagaacacataaccaccaaaacagctaagcagatcagtgacaaaaggcgattgctgtccagaaagccagcagaggagccacgtgaggagcctggaacgtgtcatcacaccaggagagcagctgcgagcctgagaacggagcctgagatgagtcatcacgcccaggcagaggacagagataatggacctgggagacgccctctgccaggcagggcagctgccggagggagaacaatggacgagataagacgccaccctgataagggcaacggacagcagagacccaccaagcaaaaatcagaagaacagctgcaggcttactataaaaagacactagaggaacgactttcagctggggcacttaacaccttcccccgagcattcaagcaggtaatggaaggccgggatataaagctagtaatcaatcagacagcgcaggactgcttcggatgcctggaatccataagccaaataagaacggcaacccgagataaaaaggacacggtgacccgggagaaacacccaaagaaaccttttcagaagtggatgaagaagagagcaatcaaaaaaggtaattatcttcggttccagcgtttattttatcttgatagagggaaactggctaaaatcattttagatgatattgaatgcttgtcttgtgacataccactcagtgaaatttattcggtttttaaaacaagatgggaaacaactggtagctttaaaagccttggggactttaaaacttacgggaaggctgacaacactgccttcagagaattaattacggctaaagaaattgagaaaaatgtgcaggaaatgagcaaaggctcggctcccggtccagacgggattactcttggggacgtcgtaaagatggatcccgagttttcccggaccatggagattttcaatttatggttaacaactggtaaaatcccggacatggtgagggggtgcagaaccgttttgattgacacttcaaacctcatggagcagatcctttcatctgacaacctcaacagggcttacttgcaagtggttcgcaacaaaggggctgagggcgtggacggaatgaagtacacggagttgaaggagcatctcgcgaagaacggagagacaataaagggacaactcagaactgctgcttataagcctcaaccggcgagacgggtagagatacccaagcccgacggtggcgtgaggaacctcggcgtccctacagtcacggaccgcttcatccaacaagccatcgctcaagtcctcactccaatctacgaggagcaattccacgaccattcctacgggttccggccaaaccggtgcgcccaacaagctatacttacagctttgaacataatgaacgacggaaacgactggattgtcgacatagatctcgagaagttcttcgacacagtcaatcatgacaagttgatgactctcatcgggcgcaccattgcagacggcgacgtaatctccattgttcgaaagtacctcgtgtccggaatcatgatagacgacgagtacgaggactcaatcgtgggaaccccacaaggcggcaacttgtctccccttcttgcaaacatcatgcttaacgagttggataaggaaatggaagctgcaggccttaacttcgtcaggtacgcagacgactgtatcatcatggtgggatctgagatgtctgccaaccgggtcatgaggaacatctcaagatttattgaggagaagttggggcttaaggtgaatatgacgaagtctaaggtggaccggcccagcggacttaagtatctcggattcggcttttacttcgaccccagagctcatcaattcaaggccaagcctcacgcgaagagtgtcgcgaagtttaagaagagaatgaaggagctcacgtgcaggagttggggcgtgtctaactcctacaaggtcgagaagctcaatcaattgatccgtggctggattaattactttaagatcgggagtatgaaaacactctgtaaggaacttgactcacgcatcagatacaggctccggatgtgcatctggaagcaatggaaaactccacaaaaccaggagaagaacttggtaaagctcgggatcgaccgcaacacggccaggcgggtggcgtacactggcaagcgaatcgcctacgtctgtaacaagggagctgtgaacgtcgcgataagtaacaagaggctcgcttcattccagtttgacccgtggattggaatagcaaggtccggtctctccacaaaactagatttttggcttcagcggatcgatcaagcaccacttaaacctctgcagaaaactgatattctcaaaacatacaccatccctcggctgatctacatagctgaccactcagaagtgaaaactgcactactcgaaacccttgaccagaagatccggacagcggtcaaggaatggcttcacctacctccgtgcacctgcgatgccatcctgtactcgagcacgagagacggcggtttgggcatcaccaaattggcaggactgatccccagcgtgcaggcccgtagactgcatcggatcgcacagtcatctgacgatacgatgaaatgcttcatggaaaaagagaaaatggaacagctgcataagaaattgtggattcaagctggaggggacagagagaacataccctcgatttgggaagcaccaccgtcgagtgaaccaccaaacaacgtgagcacaaattcggaatgggaagcaccgacccagaaagataaatttccaaagccttgcaattggaggaaaaacgaattcaaaaaatggaccaaattggcatcccaaggccgcggaattgtaaattttgaaagagacaaaattagtaaccattggatccaatactacagacgcatacctcacaggaaactcctcactgcactacaactcagggccaacgtttaccccacgagagaatttctagccaggggtagacaagaccaatacatcaaggcgtgtaggcactgcgatgcggacattgaatcctgcgcccacatcatcggcaactgcccagtgacacaggacgcccgaatcaagaggcacaattacatctgcgaactgcttctcgaggaggcgaagaagaaggactgggtagtgttcaaggaaccgcacataagggattccaacaaggaactgtacaaacctgacctgatatttgtgaaggatgcccgtgcacttgtcgtggatgtgacagtacggtatgaagcagccaaatcatcgctggaggaagccgctgcagagaaagtgagaaagtacaaacacctggaaacggaagtaagacatctcacgaatgcaaaggacgttacttttgtgggctttcccctaggagcgcgggggaaatggcaccaagataactttaaacttttgactgagcttggcctctccaaatcgaggcaagtgaaaatggcagagactttttccacagtagcgctcttttcatctgtggacattgtacatatgtttgccagtagggccagaaaatctatggttatgtgataataggctgccttctgcggggcttgccttctggccatgcccttcttctctcccttgcacctgtacctcttggtctttgaataaagcctgagtaggaaggaccggtagacatgataagatacattgatgagtttggacaaaccacaactagaatgcagtgaaaaaaatgctttatttgtgaaatttgtgatgctattgctttatttgtaaccattataagctgcaataaacaagttaacaacaacaaaaaaaaaaaaaaaaaaaaaaaaaaaaaaacgttgactaaaaaaaaaaaaaaaaaaaaaaaaaaaaaaaaaaaaaaaaaaaaaaaaaaaaaaaaaaaaaaaaaaaaaa

SEQ ID NO: 11232 - DNA, 4730 bp, synthetic construct
  source 1..4730: mol_type = other DNA
ggtctagttacaactgggcatcgctgcagagatcgcacctcctcgtggtcccgctggtagcccttcgaagggtgactaagtcgatctctgccccaggtacggagccgttgggactcaccagtccaacgtaactcctgcctaaattcggtgaaacaaattcctcggtaaaaagccccatggcttcttgcccgaaacctggccccccggtttcagcaggggcaatgagtttggaaagtggactgaccacccactccgttctcgccatcgaacgtggtcccaattcgttggcaaattccggatcagactttgggggggggggtctggggctaccgttacgcctattgagggtatcggtcggcactcagacctcccgctccgactgggtagacctggtgtcctggagccacccaggacccacgtctaagtcccagcaggttgacctggtgtctttatttcctaaacaccgggttgacctgttatccaaaaacgaccaggtagacctggtggctcaatttttaccatctaaatttccccccaatttggcagaaaatgatttggctttgctggtgaacttagagttctacagatcggatttgcatgtgtatgagtgtgttcataaggctgcacattgggagggattaagtggtttgcctgaggtgtatgaacaacttgcaccacaaccgtgtgtgggagaaactttacattctagcctcccacgagacagtgaactgtttgtgcctgaagaggggagcagcgagaaggagagcgaggacgcgccaaaaacatctcctccgacgcctgggaaacatggtttggaacagactggggaggaaaaagtgatggtgactgttcctgacaaaaatccaccttgtccttgctgtggtacccgggtaaactctgtgttgaatctgattgaacatctgaaagtgtcacacgggaaaaggggggtttgttttcggtgtgcaaaatgtggaaaggaaaatagtaactatcacagtgttgtttgtcattttaagaaatgcaggggtccagagacggagaaagccccagctggggagtggatttgtgaggtatgcaacagagattttacaaccaaaattggcctgggacaacacaagagattggcacacccagcagtgagaaatcaggaaaggatcgttgcttcccaaccgaaagaaacatcaaatagaggtgctcacaaaaggtgctggacaaaggaggaggaagaattactaataagactggaggctcagttcgagggaaacaaaaatattaataagcttattgcagaacacataaccaccaaaacagctaagcagatcagtgacaaaaggcgattgctgtccagaaagccagcagaggagccacgtgaggagcctggaacgtgtcatcacaccaggagagcagctgcgagcctgagaacggagcctgagatgagtcatcacgcccaggcagaggacagagataatggacctgggagacgccctctgccaggcagggcagctgccggagggagaacaatggacgagataagacgccaccctgataagggcaacggacagcagagacccaccaagcaaaaatcagaagaacagctgcaggcttactataaaaagacactagaggaacgactttcagctggggcacttaacaccttcccccgagcattcaagcaggtaatggaaggccgggatataaagctagtaatcaatcagacagcgcaggactgcttcggatgcctggaatccataagccaaataagaacggcaacccgagataaaaaggacacggtgacccgggagaaacacccaaagaaaccttttcagaagtggatgaagaagagagcaatcaaaaaaggtaattatcttcggttccagcgtttattttatcttgatagagggaaactggctaaaatcattttagatgatattgaatgcttgtcttgtgacataccactcagtgaaatttattcggtttttaaaacaagatgggaaacaactggtagctttaaaagccttggggactttaaaacttacgggaaggctgacaacactgccttcagagaattaattacggctaaagaaattgagaaaaatgtgcaggaaatgagcaaaggctcggctcccggtccagacgggattactcttggggacgtcgtaaagatggatcccgagttttcccggaccatggagattttcaatttatggttaacaactggtaaaatcccggacatggtgagggggtgcagaaccgttttgattccaaaatcatcaaagccggatcgtttgaaagacattaataactggagacctatcacgatcggttccatcttgctgagactgttctccaggattgtaacagctaggctgagcaaagcgtgccccctgaacccaaggcaaagaggctttatcagagcggcgggatgctctgaaaacttaaaactcctgcaaactataatttggtcggccaaaagagaacacagaccactgggtgttgtattcgtggacatcgccaaggcttttgacaccgtaagccaccagcacatcattcatgctttgcagcaaagagaggtggatccccacatcgtcggtctggtgagcaatatgtacgagaacatcagtacgtatatcaccacaaagaggaacacacacacagacaaaatccagatccgggttggagtaaagcagggtgacccgatgtcgccccttttatttaacctggcaatggaccctctattatgcaagctggaagagagtggcaaaggataccaccgaggacagagcagcatcacagcgatggcatttgcagacgatctggttttgctgagcgactcctgggaaaatatgaatacaaatattagcatactggagaccttctgcaatctgaccggactcaaaacacaggggcaaaagtgccacggcttttacatcaagccgacaaaggactcttacaccatcaatgactgcgctgcctggactatcaacggcacacccctgaacatgatcgaccccggcgaatctgagaaatacctcggcctgcagtttgacccgtggattggaatagcaaggtccggtctctccacaaaactagatttttggcttcagcggatcgatcaagcaccacttaaacctctgcagaaaactgatattctcaaaacatacaccatccctcggctgatctacatagctgaccactcagaagtgaaaagcgcactactcgaaacccttgaccagaagatccggacagcggtcaaggaatggcttcacctacctccgtgcacctgcgatgccatcctgtactcgagcacgagagacggcggtttgggcatcaccaaattggcaggactgatccccagcgtgcaggcccgtagactgcatcggatcgcacagtcatctgacgatacgatgaaatgcttcatggaaaaagagaaaatggaacagctgcataagaaattgtggattcaagctggaggggacagagagaacataccctcgatttgggaagcaccaccgtcgagtgaaccaccaaacaacgtgagcacaaattcggaatgggaagcaccgacccagaaagataaatttccaaagccttgcaattggaggaaaaacgaattcaaaaaatggaccaaattggcatcccaaggccgcggaattgtaaattttgaaagagacaaaattagtaaccattggatccaatactacagacgcatacctcacaggaaactcctcactgcactacaactcagggccaacgtttaccccacgagagaatttctagccaggggtagacaagaccaatacatcaaggcgtgtaggcactgcgatgcggacattgaatcctgcgcccacatcatcggcaactgcccagtgacacaggacgcccgaatcaagaggcacaattacatctgcgaactgcttctcgaggaggcgaagaagaaggactgggtagtgttcaaggaaccgcacataagggattccaacaaggaactgtacaaacctgacctgatatttgtgaaggatgcccgtgcacttgtcgtggatgtgacagtacggtatgaagcagccaaatcatcgctggaggaagccgctgcagagaaagtgagaaagtacaaacacctggaaacggaagtaagacatctcacgaatgcaaaggacgttacttttgtgggctttcccctaggagcgcgggggaaatggcaccaagataactttaaacttttgactgagcttggcctctccaaatcgaggcaagtgaaaatggcagagactttttccacagtagcgctcttttcatctgtggacattgtacatatgtttgccagtagggccagaaaatctatggttatgaggaagaagaggaggcagaggaggaggtgataataggctgccttctgcggggcttgccttctggccatgcccttcttctctcccttgcacctgtacctcttggtctttgaataaagcctgagtaggaaggaccggtagacatgataagatacattgatgagtttggacaaaccacaactagaatgcagtgaaaaaaatgctttatttgtgaaatttgtgatgctattgctttatttgtaaccattataagctgcaataaacaagttaacaacaacaaaaaaaaaaaaaaaaaaaaaaaaaaaaaaacgttgactaaaaaaaaaaaaaaaaaaaaaaaaaaaaaaaaaaaaaaaaaaaaaaaaaaaaaaaaaaaaaaaaaaaaaa

SEQ ID NO: 11233 - DNA, 5264 bp, synthetic construct
  source 1..5264: mol_type = other DNA
gaaataagagagaaaagaagagtaagaagaaatataagagaattcgccaccatggcccctaagaaaaagcggaaggtgaatatcagcggctctagctgcggcagccccaacagcgccgacaccagcagcgacttcaaggacctgtggaccaagctgaaggaatgccacgaccgggaagtgcagggactccaggtgaaggtcaccaaactcaagcaagaaagaatcctggacgcccagagactggaagaattcttcaccaagaaccagcagctgagagagcagcagaaagtgctgcacgagacaatcaaggttctggaagatagactgcgggccggcctgtgcgacagatgcgccgtgaccgaggaacacatgcgcaaaaagcagcaggagttcgagaacattagacagcaaaatctgaaattgatcacagagctgatgaacgagagaaacacactgcaggaggagaacaagaagctgagcgagcagctgcaacagaagatcgagaatgatcagcaacaccaggccgctgagctggaatgtgaagaggacgtgatccccgacagcccaatcacagctttcagcttttctggcgtgaacagactgaggcggaaggaaaacccccacgtgcggtacatcgagcagacccataccaagctggaacacagcgtgtgtgccaacgagatgagaaaggtgtccaagtcctccacccatccccagcacaaccctaacgaaaatgagatcctggtggctgatacctacgaccagtctcagagccctatggccaaggcccacggcaccagctcttatacccctgataagagctccttcaacctggccaccgtggtggccgagacactgggcctgggcgtgcaggaggaaagcgagacacagggcccaatgagccctctgggagatgagctgtaccactgcctggaaggcaaccacaagaaacagccttttgagtccggctccgagactcctggaacaagcgagagcgctacacctgagggcagccctaagagaaaggtgtccagcgccgagggcgctgccaaggaagagcctaaacggagaagcgccagactgagcgccaagccccccgccaaggtggaagccaagcctaagaaggccgccgctaaggacaagagcagcgataagaaagtccagaccaagggcaagcggggcgccaaaggcaaacaggccgaggtggccaaccaggagacaaaggaagatctgcctgctgagaacggcgaaaccaagaccgaggaatctccagcttctgacgaggccggagagaaggaggccaaaagcgacagcggctctgagacacctggaacaagcgagagcgccaccccggaatcctatgaacaacttgcaccacaaccgtgtgtgggagaaactttacattctagcctcccacgagacagtgaactgtttgtgcctgaagaggggagcagcgagaaggagagcgaggacgcgccaaaaacatctcctccgacgcctgggaaacatggtttggaacagactggggaggaaaaagtgatggtgactgttcctgacaaaaatccaccttgtccttgctgtggtacccgggtaaactctgtgttgaatctgattgaacatctgaaagtgtcacacgggaaaaggggggtttgttttcggtgtgcaaaatgtggaaaggaaaatagtaactatcacagtgttgtttgtcattttaagaaatgcaggggtccagagacggagaaagccccagctggggagtggatttgtgaggtatgcaacagagattttacaaccaaaattggcctgggacaacacaagagattggcacacccagcagtgagaaatcaggaaaggatcgttgcttcccaaccgaaagaaacatcaaatagaggtgctcacaaaaggtgctggacaaaggaggaggaagaattactaataagactggaggctcagttcgagggaaacaaaaatattaataagcttattgcagaacacataaccaccaaaacagctaagcagatcagtgacaaaaggcgattgctgtccagaaagccagcagaggagccacgtgaggagcctggaacgtgtcatcacaccaggagagcagctgcgagcctgagaacggagcctgagatgagtcatcacgcccaggcagaggacagagataatggacctgggagacgccctctgccaggcagggcagctgccggagggagaacaatggacgagataagacgccaccctgataagggcaacggacagcagagacccaccaagcaaaaatcagaagaacagctgcaggcttactataaaaagacactagaggaacgactttcagctggggcacttaacaccttcccccgagcattcaagcaggtaatggaaggccgggatataaagctagtaatcaatcagacagcgcaggactgcttcggatgcctggaatccataagccaaataagaacggcaacccgagataaaaaggacacggtgacccgggagaaacacccaaagaaaccttttcagaagtggatgaagaagagagcaatcaaaaaaggtaattatcttcggttccagcgtttattttatcttgatagagggaaactggctaaaatcattttagatgatattgaatgcttgtcttgtgacataccactcagtgaaatttattcggtttttaaaacaagatgggaaacaactggtagctttaaaagccttggggactttaaaacttacgggaaggctgacaacactgccttcagagaattaattacggctaaagaaattgagaaaaatgtgcaggaaatgagcaaaggctcggctcccggtccagacgggattactcttggggacgtcgtaaagatggatcccgagttttcccggaccatggagattttcaatttatggttaacaactggtaaactcccggacatggtgagggggtgcagaaccgttttgattccaaaatcatcaaagccggatcgtttgaaagacattaataactggagacctatcacgatcggttccatcttgctgagactgttctccaggattgtaacagctaggctgagcaaagcgtgccccctgaacccaaggcaaagaggctttatcagagcggcgggatgctctgaaaacttaaaactcctgcaaactataatttggtcggccaaaagagaacacagaccactgggtgttgtattcgtggacatcgccaaggcttttgacaccgtaagccaccagcacatcattcatgctttgcagcaaagagaggtggatccccacatcgtcggtctggtgagcaatatgtacgagaacatcagtacgtatatcaccacaaagaggaacacacacacagacaaaatccagatccgggttggagtaaagcagggtgacccgatgtcgccccttttatttaacctggcaatggaccctctattatgcaagctggaagagagtggcaaaggataccaccgaggacagagcagcatcacagcgatggcatttgcagacgatctggttttgctgagcgactcctgggaaaatatgaatacaaatattagcatactggagaccttctgcaatctgaccggactcaaaacacaggggcaaaagtgccacggcttttacatcaagccgacaaaggactcttacaccatcaatgactgcgctgcctggactatcaacggcacacccctgaacatgatcgaccccggcgaatctgagaaatacctcggcctgcagtttgacccgtggattggaatagcaaggtccggtctctccacaaaactagatttttggcttcagcggatcgatcaagcaccacttaaacctctgcagaaaactgatattctcaaaacatacaccatccctcggctgatctacatagctgaccactcagaagtgaaaagcgcactactcgaaacccttgaccagaagatccggacagcggtcaaggaatggcttcacctacctccgtgcacctgcgatgccatcctgtactcgagcacgagagacggcggtttgggcatcaccaaattggcaggactgatccccagcgtgcaggcccgtagactgcatcggatcgcacagtcatctgacgatacgatgaaatgcttcatggaaaaagagaaaatggaacagctgcataagaaattgtggattcaagctggaggggacagagagaacataccctcgatttgggaagcaccaccgtcgagtgaaccaccaaacaacgtgagcacaaattcggaatgggaagcaccgacccagaaagataaatttccaaagccttgcaattggaggaaaaacgaattcaaaaaatggaccaaattggcatcccaaggccgcggaattgtaaattttgaaagagacaaaattagtaaccattggatccaatactacagacgcatacctcacaggaaactcctcactgcactacaactcagggccaacgtttaccccacgagagaatttctagccaggggtagacaagaccaatacatcaaggcgtgtaggcactgcgatgcggacaacgaatcctgcgcccacatcatcggcaactgcccagtgacacaggacgcccgaatcaagaggcacaattacatctgcgaactgcttctcgaggaggcgaagaagaaggactgggtagtgttcaaggaaccgcacataagggattccaacaaggaactgtacaaacctgacctgatatttgtgaaggatgggcgtgcacttgtcgtggatgtgacagtacggtatgaagcagccaaatcatcgctggaggaagccgctgcagagaaagtgagaaagtacaaacacctggaaacggaagtaagacatctcacgaatgcaaaggacgttacttttgtgggctttcccctaggagcgcgggggaaatggcaccaagataactttaaacttttgactgagcttggcctctccaaatcgaggcaagtgaaaatggcagagactttttccacagtagcgctcttttcatctgtggacattgtacatatgtttgccagtagggccagaaaatctatggttatgtgataataggctgccttctgcggggcttgccttctggccatgcccttcttctctcccttgcacctgtacctcttggtctttgaataaagcctgagtaggaaggaccggtaaaaaaaaaaaaaaaaaaaaaaaaaaaaaaacgttgactaaaaaaaaaaaaaaaaaaaaaaaaaaaaaaaaaaaaaaaaaaaaaaaaaaaaaaaaaaaaaaaaaaaaaa

SEQ ID NO: 11234 - DNA, 4715 bp, synthetic construct
  source 1..4715: mol_type = other DNA
gaaataagagagaaaagaagagtaagaagaaatataagagaattcgccaccatggcccctaagaaaaagcggaaggtgtggaagcctggagatgagtgcttcgccctgtactgggaggacaacaagttttatagagccgaggtggaagctctgcactctagcggcatgaccgccgtggtgaaattcatcgactacggcaattacgaggaagtcctgctgagcaacatcaagcccatccagacagaggcctgggaagagtccggctccgagactcctggaacaagcgagagcgctacacctgagggcagcgtgaccgtgaagttcaagtacaagggcgaggaaaaggaagtggacatcagcaagatcaagaaggtctggcgggtgggcaagatgatcagctttacctacgacgataacggcaagacaggcagaggcgccgtgtccgagaaggacgcccctaaagagctgctgcagatgctggaaaaaagcggctctgagacacctggaacaagcgagagcgccaccccggaatcccctaagagaaaggtgtccagcgccgagggcgctgccaaggaagagcctaaacggagaagcgccagactgagcgccaagccccccgccaaggtggaagccaagcctaagaaggccgccgctaaggacaagagcagcgataagaaagtccagaccaagggcaagcggggcgccaaaggcaaacaggccgaggtggccaaccaggagacaaaggaagatctgcctgctgagaacggcgaaaccaagaccgaggaatctccagcttctgacgaggccggagagaaggaggccaaaagcgacagcggctctgagacacctggaacaagcgagagcgccaccccggaatccctgttcgtgcctgaggagggctcttctgagaaggagtctgaggacgccccaaaaacttctcctcctacgcctggcaagcacggccttgagcaaactggcgaggagaaggtgatggtgactgtgcctgataagaacccgccttgtccttgctgcggcactcgtgttaactctgtgcttaaccttattgagcaccttaaggtgtctcacgggaagcggggcgtgtgcttccgttgcgccaaatgtggcaaggaaaactctaactaccactctgtggtgtgccacttcaagaagtgccgtggccctgagactgagaaggcccctgctggcgaatggatttgcgaggtgtgcaaccgtgacttcactactaagatcggcttgggccagcacaagcgtcttgctcaccctgctgtgcgtaatcaggagaggattgtggcctctcagcctaaggagacttctaaccgtggcgctcacaagcgttgctggactaaggaagaggaggagcttcttattcgtctggaggctcagttcgagggcaacaagaacattaacaagcttattgctgagcacattactactaaaactgctaagcagatttctgacaagcgtcgtcttttgtctcgtaagcctgctgaggaacctcgtgaggagcccggcacttgtcaccacactcgtcgtgctgctgcttctcttcgtactgagcctgagatgtctcaccacgctcaagccgaggaccgtgacaatggccctggacgtagacctcttcctggccgtgctgccgctggaggacgtactatggatgagattcgtcgtcaccctgacaagggcaacggccagcagcgtcctactaagcagaagagcgaggagcagctgcaggcttactacaagaaaactctggaggagcgcttgtctgctggcgctcttaacactttccctcgtgctttcaagcaggtgatggagggccgtgacattaagcttgtgattaaccagactgctcaggactgcttcggctgcctggagtctatttctcagattcgtactgctactcgtgacaagaaagacactgtgactcgtgagaagcaccctaagaagcccttccagaagtggatgaagaagagggctattaagaagggcaactaccttcgtttccagaggcttttctaccttgaccgtggcaagcttgccaagattattctggacgacattgagtgcctttcttgcgacattcctctttctgaaatttactctgtgttcaagactcgttgggagactactggctcttttaagtctctgggcgacttcaagacttacggcaaggctgacaacactgctttccgtgagcttatcactgcgaaggagattgaaaagaacgttcaggagatgtctaagggctctgctcctggccctgacggcattacactgggggacgttgtgaagatggaccctgagttcagccgtacaatggagattttcaacctgtggttgacgactggcaagattcccgacatggtgcgtggctgccgtactgtgcttattcctaagagctctaagcctgaccgtcttaaggacatcaacaactggcgtcctattacgattggctctattcttcttcgtctgttctctaggattgtgacggctcgtctgtctaaggcttgccctcttaaccctcgtcagcgtggcttcattagggctgctggctgctctgaaaaccttaagttgcttcagactattatttggtctgctaagcgtgagcaccgtcctctgggcgtggtgttcgtggacattgctaaggctttcgacactgtttctcatcagcacattattcacgctcttcagcagcgtgaggtggaccctcacattgtgggccttgtgtctaacatgtacgagaacatctctacttacattacgactaagcgcaatactcacactgacaagattcagattagggtgggcgtgaagcagggcgaccctatgagccctcttcttttcaacttggctatggaccctcttctgtgcaagcttgaggagagcggcaagggctaccaccgtggccaatcttctattacggctatggctttcgctgacgaccttgtgcttctttctgactcttgggagaacatgaacactaacattagcattcttgagactttctgcaaccttactggccttaagactcagggccagaagtgccacggcttctacattaagcctactaaggactcttacactattaacgactgcgctgcttggactatcaacggcactcctcttaacatgattgaccctggcgagagcgaaaagtaccttggccttcagttcgacccttggattggcattgctcgtagcggcctttctactaagctggacttctggcttcagcgtattgaccaggctcctctgaagcctctgcaaaagactgacattcttaagacttacacgattcctcgtcttatttacattgctgaccactctgaggtgaagtctgctctgttggagactctggaccagaagattaggactgctgtcaaagagtggcttcaccttcctccttgcacgtgcgacgctattctttactctagcacgagggacggcggccttggcattaccaagctcgctggacttattccttctgttcaggctaggcgtctccaccgtattgctcagtctagtgacgacactatgaagtgcttcatggagaaggagaagatggagcagttgcacaagaagttgtggattcaggctggcggcgacagggagaatattcctagcatttgggaggctcctccctcctctgagccccctaacaacgtgtctactaactctgagtgggaggcccctactcagaaggataagttccctaagccttgcaactggaggaagaacgagttcaagaaatggactaaacttgcttctcagggccgtggcattgtgaacttcgagcgtgacaaaatttctaaccactggattcagtactaccgtcgtattcctcaccgtaagcttcttactgctctgcagcttagggctaacgtgtaccctactagggagttccttgctcgtggccgtcaggaccagtacattaaggcctgccgtcactgcgacgctgacaacgagtcttgcgctcacattattggcaactgccctgtgactcaggacgctcgtattaagcgtcacaactacatttgcgagcttcttcttgaggaagctaagaaaaaggactgggtggtgttcaaggagcctcacattcgtgacagcaacaaggagctttacaagcccgaccttattttcgtgaaggacggccgtgctcttgtggtggacgtgactgtgaggtacgaggctgctaagagcagccttgaggaggctgcagctgagaaggtgcgtaagtacaagcaccttgagacggaggtgcgtcaccttacgaacgctaaggacgtgacgttcgtgggcttccctcttggggctcgtggcaaatggcatcaggacaacttcaagctgctaactgagcttggactcagtaagtctcgtcaggtaaagatggctgagacgttctctactgtggctctgttcagctctgtggacatcgtgcacatgttcgcttctcgtgctcgtaagtctatggtgatgtgataataggctgccttctgcggggcttgccttctggccatgcccttcttctctcccttgcacctgtacctcttggtctttgaataaagcctgagtaggaaggaccggtaaaaaaaaaaaaaaaaaaaaaaaaaaaaaaacgttgactaaaaaaaaaaaaaaaaaaaaaaaaaaaaaaaaaaaaaaaaaaaaaaaaaaaaaaaaaaaaaaaaaaaaaa

SEQ ID NO: 11235 - DNA, 4502 bp, synthetic construct
  source 1..4502: mol_type = other DNA
gaaataagagagaaaagaagagtaagaagaaatataagagaattcgccaccatggctcctgctgccaagagggtcaagttggactctggcggctcagtgaccgtgaagttcaagtacaagggcgaggaaaaggaagtggacatcagcaagatcaagaaggtctggcgggtgggcaagatgatcagctttacctacgacgataacggcaagacaggcagaggcgccgtgtccgagaaggacgcccctaaagagctgctgcagatgctggaaaaaagcggctctgagacacctggaacaagcgagagcgccaccccggaatcccctaagagaaaggtgtccagcgccgagggcgctgccaaggaagagcctaaacggagaagcgccagactgagcgccaagccccccgccaaggtggaagccaagcctaagaaggccgccgctaaggacaagagcagcgataagaaagtccagaccaagggcaagcggggcgccaaaggcaaacaggccgaggtggccaaccaggagacaaaggaagatctgcctgctgagaacggcgaaaccaagaccgaggaatctccagcttctgacgaggccggagagaaggaggccaaaagcgacagcggctctgagacacctggaacaagcgagagcgccaccccggaatccctgttcgtgcctgaggagggctcttctgagaaggagtctgaggacgccccaaaaacttctcctcctacgcctggcaagcacggccttgagcaaactggcgaggagaaggtgatggtgactgtgcctgataagaacccgccttgtccttgctgcggcactcgtgttaactctgtgcttaaccttattgagcaccttaaggtgtctcacgggaagcggggcgtgtgcttccgttgcgccaaatgtggcaaggaaaactctaactaccactctgtggtgtgccacttcaagaagtgccgtggccctgagactgagaaggcccctgctggcgaatggatttgcgaggtgtgcaaccgtgacttcactactaagatcggcttgggccagcacaagcgtcttgctcaccctgctgtgcgtaatcaggagaggattgtggcctctcagcctaaggagacttctaaccgtggcgctcacaagcgttgctggactaaggaagaggaggagcttcttattcgtctggaggctcagttcgagggcaacaagaacattaacaagcttattgctgagcacattactactaaaactgctaagcagatttctgacaagcgtcgtcttttgtctcgtaagcctgctgaggaacctcgtgaggagcccggcacttgtcaccacactcgtcgtgctgctgcttctcttcgtactgagcctgagatgtctcaccacgctcaagccgaggaccgtgacaatggccctggacgtagacctcttcctggccgtgctgccgctggaggacgtactatggatgagattcgtcgtcaccctgacaagggcaacggccagcagcgtcctactaagcagaagagcgaggagcagctgcaggcttactacaagaaaactctggaggagcgcttgtctgctggcgctcttaacactttccctcgtgctttcaagcaggtgatggagggccgtgacattaagcttgtgattaaccagactgctcaggactgcttcggctgcctggagtctatttctcagattcgtactgctactcgtgacaagaaagacactgtgactcgtgagaagcaccctaagaagcccttccagaagtggatgaagaagagggctattaagaagggcaactaccttcgtttccagaggcttttctaccttgaccgtggcaagcttgccaagattattctggacgacattgagtgcctttcttgcgacattcctctttctgaaatttactctgtgttcaagactcgttgggagactactggctcttttaagtctctgggcgacttcaagacttacggcaaggctgacaacactgctttccgtgagcttatcactgcgaaggagattgaaaagaacgttcaggagatgtctaagggctctgctcctggccctgacggcattacactgggggacgttgtgaagatggaccctgagttcagccgtacaatggagattttcaacctgtggttgacgactggcaagattcccgacatggtgcgtggctgccgtactgtgcttattcctaagagctctaagcctgaccgtcttaaggacatcaacaactggcgtcctattacgattggctctattcttcttcgtctgttctctaggattgtgacggctcgtctgtctaaggcttgccctcttaaccctcgtcagcgtggcttcattagggctgctggctgctctgaaaaccttaagttgcttcagactattatttggtctgctaagcgtgagcaccgtcctctgggcgtggtgttcgtggacattgctaaggctttcgacactgtttctcatcagcacattattcacgctcttcagcagcgtgaggtggaccctcacattgtgggccttgtgtctaacatgtacgagaacatctctacttacattacgactaagcgcaatactcacactgacaagattcagattagggtgggcgtgaagcagggcgaccctatgagccctcttcttttcaacttggctatggaccctcttctgtgcaagcttgaggagagcggcaagggctaccaccgtggccaatcttctattacggctatggctttcgctgacgaccttgtgcttctttctgactcttgggagaacatgaacactaacattagcattcttgagactttctgcaaccttactggccttaagactcagggccagaagtgccacggcttctacattaagcctactaaggactcttacactattaacgactgcgctgcttggactatcaacggcactcctcttaacatgattgaccctggcgagagcgaaaagtaccttggccttcagttcgacccttggattggcattgctcgtagcggcctttctactaagctggacttctggcttcagcgtattgaccaggctcctctgaagcctctgcaaaagactgacattcttaagacttacacgattcctcgtcttatttacattgctgaccactctgaggtgaagtctgctctgttggagactctggaccagaagattaggactgctgtcaaagagtggcttcaccttcctccttgcacgtgcgacgctattctttactctagcacgagggacggcggccttggcattaccaagctcgctggacttattccttctgttcaggctaggcgtctccaccgtattgctcagtctagtgacgacactatgaagtgcttcatggagaaggagaagatggagcagttgcacaagaagttgtggattcaggctggcggcgacagggagaatattcctagcatttgggaggctcctccctcctctgagccccctaacaacgtgtctactaactctgagtgggaggcccctactcagaaggataagttccctaagccttgcaactggaggaagaacgagttcaagaaatggactaaacttgcttctcagggccgtggcattgtgaacttcgagcgtgacaaaatttctaaccactggattcagtactaccgtcgtattcctcaccgtaagcttcttactgctctgcagcttagggctaacgtgtaccctactagggagttccttgctcgtggccgtcaggaccagtacattaaggcctgccgtcactgcgacgctgacaacgagtcttgcgctcacattattggcaactgccctgtgactcaggacgctcgtattaagcgtcacaactacatttgcgagcttcttcttgaggaagctaagaaaaaggactgggtggtgttcaaggagcctcacattcgtgacagcaacaaggagctttacaagcccgaccttattttcgtgaaggacggccgtgctcttgtggtggacgtgactgtgaggtacgaggctgctaagagcagccttgaggaggctgcagctgagaaggtgcgtaagtacaagcaccttgagacggaggtgcgtcaccttacgaacgctaaggacgtgacgttcgtgggcttccctcttggggctcgtggcaaatggcatcaggacaacttcaagctgctaactgagcttggactcagtaagtctcgtcaggtaaagatggctgagacgttctctactgtggctctgttcagctctgtggacatcgtgcacatgttcgcttctcgtgctcgtaagtctatggtgatgtgataataggctgccttctgcggggcttgccttctggccatgcccttcttctctcccttgcacctgtacctcttggtctttgaataaagcctgagtaggaaggaccggtaaaaaaaaaaaaaaaaaaaaaaaaaaaaaaacgttgactaaaaaaaaaaaaaaaaaaaaaaaaaaaaaaaaaaaaaaaaaaaaaaaaaaaaaaaaaaaaaaaaaaaaaa

SEQ ID NO: 11236 - DNA, 4484 bp, synthetic construct
  source 1..4484: mol_type = other DNA
gaaataagagagaaaagaagagtaagaagaaatataagagaattcgccaccatggcccctaagaaaaagagaaaggtggtgaccgtgaagttcaagtacaagggcgaggaaaaggaagtggacatcagcaagatcaagaaggtctggcgggtgggcaagatgatcagctttacctacgacgataacggcaagacaggcagaggcgccgtgtccgagaaggacgcccctaaagagctgctgcagatgctggaaaaaagcggctctgagacacctggaacaagcgagagcgccaccccggaatcccccaagcgtaaagtgtctagcgctgagggcgctgctaaggaggagcctaagcgtcgttctgctcgtcttagcgctaagcctcctgccaaggtggaggctaagcctaagaaggctgctgccaaggacaagtctagcgacaagaaggtgcagactaagggcaagcgtggcgctaaggggaagcaggctgaggtggctaaccaggagactaaagaggaccttcctgctgagaacggcgagactaagactgaggagtctcctgcttctgacgaggctggcgagaaggaggctaaatctgactcaggctctgaaactcctgggacttctgagagcgctactcccgagtctctgttcgtgcctgaggagggctcttctgagaaggagtctgaggacgccccaaaaacttctcctcctacgcctggcaagcacggccttgagcaaactggcgaggagaaggtgatggtgactgtgcctgataagaacccgccttgtccttgctgcggcactcgtgttaactctgtgcttaaccttattgagcaccttaaggtgtctcacgggaagcggggcgtgtgcttccgttgcgccaaatgtggcaaggaaaactctaactaccactctgtggtgtgccacttcaagaagtgccgtggccctgagactgagaaggcccctgctggcgaatggatttgcgaggtgtgcaaccgtgacttcactactaagatcggcttgggccagcacaagcgtcttgctcaccctgctgtgcgtaatcaggagaggattgtggcctctcagcctaaggagacttctaaccgtggcgctcacaagcgttgctggactaaggaagaggaggagcttcttattcgtctggaggctcagttcgagggcaacaagaacattaacaagcttattgctgagcacattactactaaaactgctaagcagatttctgacaagcgtcgtcttttgtctcgtaagcctgctgaggaacctcgtgaggagcccggcacttgtcaccacactcgtcgtgctgctgcttctcttcgtactgagcctgagatgtctcaccacgctcaagccgaggaccgtgacaatggccctggacgtagacctcttcctggccgtgctgccgctggaggacgtactatggatgagattcgtcgtcaccctgacaagggcaacggccagcagcgtcctactaagcagaagagcgaggagcagctgcaggcttactacaagaaaactctggaggagcgcttgtctgctggcgctcttaacactttccctcgtgctttcaagcaggtgatggagggccgtgacattaagcttgtgattaaccagactgctcaggactgcttcggctgcctggagtctatttctcagattcgtactgctactcgtgacaagaaagacactgtgactcgtgagaagcaccctaagaagcccttccagaagtggatgaagaagagggctattaagaagggcaactaccttcgtttccagaggcttttctaccttgaccgtggcaagcttgccaagattattctggacgacattgagtgcctttcttgcgacattcctctttctgaaatttactctgtgttcaagactcgttgggagactactggctcttttaagtctctgggcgacttcaagacttacggcaaggctgacaacactgctttccgtgagcttatcactgcgaaggagattgaaaagaacgttcaggagatgtctaagggctctgctcctggccctgacggcattacactgggggacgttgtgaagatggaccctgagttcagccgtacaatggagattttcaacctgtggttgacgactggcaagattcccgacatggtgcgtggctgccgtactgtgcttattcctaagagctctaagcctgaccgtcttaaggacatcaacaactggcgtcctattacgattggctctattcttcttcgtctgttctctaggattgtgacggctcgtctgtctaaggcttgccctcttaaccctcgtcagcgtggcttcattagggctgctggctgctctgaaaaccttaagttgcttcagactattatttggtctgctaagcgtgagcaccgtcctctgggcgtggtgttcgtggacattgctaaggctttcgacactgtttctcatcagcacattattcacgctcttcagcagcgtgaggtggaccctcacattgtgggccttgtgtctaacatgtacgagaacatctctacttacattacgactaagcgcaatactcacactgacaagattcagattagggtgggcgtgaagcagggcgaccctatgagccctcttcttttcaacttggctatggaccctcttctgtgcaagcttgaggagagcggcaagggctaccaccgtggccaatcttctattacggctatggctttcgctgacgaccttgtgcttctttctgactcttgggagaacatgaacactaacattagcattcttgagactttctgcaaccttactggccttaagactcagggccagaagtgccacggcttctacattaagcctactaaggactcttacactattaacgactgcgctgcttggactatcaacggcactcctcttaacatgattgaccctggcgagagcgaaaagtaccttggccttcagttcgacccttggattggcattgctcgtagcggcctttctactaagctggacttctggcttcagcgtattgaccaggctcctctgaagcctctgcaaaagactgacattcttaagacttacacgattcctcgtcttatttacattgctgaccactctgaggtgaagtctgctctgttggagactctggaccagaagattaggactgctgtcaaagagtggcttcaccttcctccttgcacgtgcgacgctattctttactctagcacgagggacggcggccttggcattaccaagctcgctggacttattccttctgttcaggctaggcgtctccaccgtattgctcagtctagtgacgacactatgaagtgcttcatggagaaggagaagatggagcagttgcacaagaagttgtggattcaggctggcggcgacagggagaatattcctagcatttgggaggctcctccctcctctgagccccctaacaacgtgtctactaactctgagtgggaggcccctactcagaaggataagttccctaagccttgcaactggaggaagaacgagttcaagaaatggactaaacttgcttctcagggccgtggcattgtgaacttcgagcgtgacaaaatttctaaccactggattcagtactaccgtcgtattcctcaccgtaagcttcttactgctctgcagcttagggctaacgtgtaccctactagggagttccttgctcgtggccgtcaggaccagtacattaaggcctgccgtcactgcgacgctgacaacgagtcttgcgctcacattattggcaactgccctgtgactcaggacgctcgtattaagcgtcacaactacatttgcgagcttcttcttgaggaagctaagaaaaaggactgggtggtgttcaaggagcctcacattcgtgacagcaacaaggagctttacaagcccgaccttattttcgtgaaggacggccgtgctcttgtggtggacgtgactgtgaggtacgaggctgctaagagcagccttgaggaggctgcagctgagaaggtgcgtaagtacaagcaccttgagacggaggtgcgtcaccttacgaacgctaaggacgtgacgttcgtgggcttccctcttggggctcgtggcaaatggcatcaggacaacttcaagctgctaactgagcttggactcagtaagtctcgtcaggtaaagatggctgagacgttctctactgtggctctgttcagctctgtggacatcgtgcacatgttcgcttctcgtgctcgtaagtctatggtgatgtgataataggctgccttctgcggggcttgccttctggccatgcccttcttctctcccttgcacctgtacctcttggtctttgaataaagcctgagtaggaaggaccggtaaaaaaaaaaaaaaaaaaaaaaaaaaaaaaacgttgactaaaaaaaaaaaaaaaaaaaaaaaaaaaaaaaaaaaaaaaaaaaaaaaaaaaaaaaaaaaaaaaaaaaaaa

SEQ ID NO: 11237-11239 - skipped (3 entries)

SEQ ID NO: 11240 - DNA, 5264 bp, synthetic construct
  source 1..5264: mol_type = other DNA
gaaataagagagaaaagaagagtaagaagaaatataagagaattcgccaccatggcccctaagaaaaagcggaaggtgaatatcagcggctctagctgcggcagccccaacagcgccgacaccagcagcgacttcaaggacctgtggaccaagctgaaggaatgccacgaccgggaagtgcagggactccaggtgaaggtcaccaaactcaagcaagaaagaatcctggacgcccagagactggaagaattcttcaccaagaaccagcagctgagagagcagcagaaagtgctgcacgagacaatcaaggttctggaagatagactgcgggccggcctgtgcgacagatgcgccgtgaccgaggaacacatgcgcaaaaagcagcaggagttcgagaacattagacagcaaaatctgaaattgatcacagagctgatgaacgagagaaacacactgcaggaggagaacaagaagctgagcgagcagctgcaacagaagatcgagaatgatcagcaacaccaggccgctgagctggaatgtgaagaggacgtgatccccgacagcccaatcacagctttcagcttttctggcgtgaacagactgaggcggaaggaaaacccccacgtgcggtacatcgagcagacccataccaagctggaacacagcgtgtgtgccaacgagatgagaaaggtgtccaagtcctccacccatccccagcacaaccctaacgaaaatgagatcctggtggctgatacctacgaccagtctcagagccctatggccaaggcccacggcaccagctcttatacccctgataagagctccttcaacctggccaccgtggtggccgagacactgggcctgggcgtgcaggaggaaagcgagacacagggcccaatgagccctctgggagatgagctgtaccactgcctggaaggcaaccacaagaaacagccttttgagtccggctccgagactcctggaacaagcgagagcgctacacctgagggcagccctaagagaaaggtgtccagcgccgagggcgctgccaaggaagagcctaaacggagaagcgccagactgagcgccaagccccccgccaaggtggaagccaagcctaagaaggccgccgctaaggacaagagcagcgataagaaagtccagaccaagggcaagcggggcgccaaaggcaaacaggccgaggtggccaaccaggagacaaaggaagatctgcctgctgagaacggcgaaaccaagaccgaggaatctccagcttctgacgaggccggagagaaggaggccaaaagcgacagcggctctgagacacctggaacaagcgagagcgccaccccggaatcctatgaacaacttgcaccacaaccgtgtgtgggagaaactttacattctagcctcccacgagacagtgaactgtttgtgcctgaagaggggagcagcgagaaggagagcgaggacgcgccaaaaacatctcctccgacgcctgggaaacatggtttggaacagactggggaggaaaaagtgatggtgactgttcctgacaaaaatccaccttgtccttgctgtggtacccgggtaaactctgtgttgaatctgattgaacatctgaaagtgtcacacgggaaaaggggggtttgttttcggtgtgcaaaatgtggaaaggaaaatagtaactatcacagtgttgtttgtcattacaagaaatgcaggggtccagagacggagaaagccccagctggggagtggatttgtgaggtatgcaacagagattttacaaccaaaattggcctgggacaacacaagagattggcacacccagcagtgagaaatcaggaaaggatcgttgcttcccaaccgaaagaaacatcaaatagaggtgctcacaaaaggtgctggacaaaggaggaggaagaattactaataagactggaggctcagttcgagggaaacaaaaatattaataagcttattgcagaacacataaccaccaaaacagctaagcagatcagtgacaaaaggcgattgctgtccagaaagccagcagaggagccacgtgaggagcctggaacgtgtcatcacaccaggagagcagctgcgagcctgagaacggagcctgagatgagtcatcacgcccaggcagaggacagagataatggacctgggagacgccctctgccaggcagggcagctgccggagggagaacaatggacgagataagacgccaccctgataagggcaacggacagcagagacccaccaagcaaaaatcagaagaacagctgcaggcttactataaaaagacactagaggaacgactttcagctggggcacttaacaccttcccccgagcattcaagcaggtaatggaaggccgggatataaagctagtaatcaatcagacagcgcaggactgcttcggatgcctggaatccataagccaaataagaacggcaacccgagataaaaaggacacggtgacccgggagaaacacccaaagaaaccttttcagaagtggatgaagaagagagcaatcaaaaaaggtaattatcttcggttccagcgtttattttatcttgatagagggaaactggctaaaatcattttagatgatattgaatgcttgtcttgtgacataccactcagtgaaatttattcggtttttaaaacaagatgggaaacaactggtagctttaaaagccttggggactttaaaacttacgggaaggctgacaacactgccttcagagaattaattacggctaaagaaattgagaaaaatgtgcaggaaatgagcaaaggctcggctcccggtccagacgggattactcttggggacgtcgtaaagatggatcccgagttttcccggaccatggagattttcaatttatggttaacaactggtaaaatcccggacatggtgagggggtgcagaaccgttttgattccaaaatcatcaaagccggatcgtttgaaagacattaataactggagacctatcacgatcggttccatcttgctgagactgttctccaggattgtaacagctaggctgagcaaagcgtgccccctgaacccaaggcaaagaggctttatcagagcggcgggatgctctgaaaacttaaaactcctgcaaactataatttggtcggccaaaagagaacacagaccactgggtgttgtattcgtggacatcgccaaggcttttgacaccgtaagccaccagcacatcattcatgctttgcagcaaagagaggtggatccccacatcgtcggtctggtgagcaatatgtacgagaacatcagtacgtatatcaccacaaagaggaacacacacacagacaaaatccagatccgggttggagtaaagcagggtgacccgatgtcgccccttttatttaacctggcaatggaccctctattatgcaagctggaagagagtggcaaaggataccaccgaggacagagcagcatcacagcgatggcatttgcagacgatctggttttgctgagcgactcctgggaaaatatgaatacaaatattagcatactggagaccttctgcaatctgaccggactcaaaacacaggggcaaaagtgccacggcttttacatcaagccgacaaagaagtcttacaccatcaatgactgcgctgcctggactatcaacggcacacccctgaacatgatcgaccccggcgaatctgagaaatacctcggcctgcagtttgacccgtggattggaatagcaaggtccggtctctccacaaaactagatttttggcttcagcggatcgatcaagcaccacttaaacctctgcagaaaactgatattctcaaaacatacaccatccctcggctgatctacatagctgaccactcagaagtgaaaagcgcactactcgaaacccttgaccagaagatccggacagcggtcaaggaatggcttcacctacctccgtgcacctgcgatgccatcctgtactcgagcacgagagacggcggtttgggcatcaccaaattggcaggactgatccccagcgtgcaggcccgtagactgcatcggatcgcacagtcatctgacgatacgatgaaatgcttcatggaaaaagagaaaatggaacagctgcataagaaattgtggattcaagctggaggggacagagagaacataccctcgatttgggaagcaccaccgtcgagtgaaccaccaaacaacgtgagcacaaattcggaatgggaagcaccgacccagaaagataaatttccaaagccttgcaattggaggaaaaacgaattcaaaaaatggaccaaattggcatcccaaggccgcggaattgtaaattttgaaagagacaaaattagtaaccattggatccaatactacagacgcatacctcacaggaaactcctcactgcactacaactcagggccaacgtttaccccacgagagaatttctagccaggggtagacaagaccaatacatcaaggcgtgtaggcactgcgatgcggacaacgaatcctgcgcccacatcatcggcaactgcccagtgacacaggacgcccgaatcaagaggcacaattacatctgcgaactgcttctcgaggaggcgaagaagaaggactgggtagtgttcaaggaaccgcacataagggattccaacaaggaactgtacaaacctgacctgatatttgtgaaggatgggcgtgcacttgtcgtggatgtgacagtacggtatgaagcagccaaatcatcgctggaggaagccgctgcagagaaagtgagaaagtacaaacacctggaaacggaagtaagacatctcacgaatgcaaaggacgttacttttgtgggctttcccctaggagcgcgggggaaatggcaccaagataactttaaacttttgactgagcttggcctctccaaatcgaggcaagtgaaaatggcagagactttttccacagtagcgctcttttcatctgtggacattgtacatatgtttgccagtagggccagaaaatctatggttatgtgataataggctgccttctgcggggcttgccttctggccatgcccttcttctctcccttgcacctgtacctcttggtctttgaataaagcctgagtaggaaggaccggtaaaaaaaaaaaaaaaaaaaaaaaaaaaaaaacgttgactaaaaaaaaaaaaaaaaaaaaaaaaaaaaaaaaaaaaaaaaaaaaaaaaaaaaaaaaaaaaaaaaaaaaaa

SEQ ID NO: 11241-11242 - skipped (2 entries)

SEQ ID NO: 11243 - DNA, 5831 bp, synthetic construct
  source 1..5831: mol_type = other DNA
gaaataagagagaaaagaagagtaagaagaaatataagagaattcgccaccatggcccctaagaaaaagcggaaggtgaatatcagcggctctagctgcggcagccccaacagcgccgacaccagcagcgacttcaaggacctgtggaccaagctgaaggaatgccacgaccgggaagtgcagggactccaggtgaaggtcaccaaactcaagcaagaaagaatcctggacgcccagagactggaagaattcttcaccaagaaccagcagctgagagagcagcagaaagtgctgcacgagacaatcaaggttctggaagatagactgcgggccggcctgtgcgacagatgcgccgtgaccgaggaacacatgcgcaaaaagcagcaggagttcgagaacattagacagcaaaatctgaaattgatcacagagctgatgaacgagagaaacacactgcaggaggagaacaagaagctgagcgagcagctgcaacagaagatcgagaatgatcagcaacaccaggccgctgagctggaatgtgaagaggacgtgatccccgacagcccaatcacagctttcagcttttctggcgtgaacagactgaggcggaaggaaaacccccacgtgcggtacatcgagcagacccataccaagctggaacacagcgtgtgtgccaacgagatgagaaaggtgtccaagtcctccacccatccccagcacaaccctaacgaaaatgagatcctggtggctgatacctacgaccagtctcagagccctatggccaaggcccacggcaccagctcttatacccctgataagagctccttcaacctggccaccgtggtggccgagacactgggcctgggcgtgcaggaggaaagcgagacacagggcccaatgagccctctgggagatgagctgtaccactgcctggaaggcaaccacaagaaacagccttttgagtccggctccgagactcctggaacaagcgagagcgctacacctgagggcagccctaagagaaaggtgtccagcgccgagggcgctgccaaggaagagcctaaacggagaagcgccagactgagcgccaagccccccgccaaggtggaagccaagcctaagaaggccgccgctaaggacaagagcagcgataagaaagtccagaccaagggcaagcggggcgccaaaggcaaacaggccgaggtggccaaccaggagacaaaggaagatctgcctgctgagaacggcgaaaccaagaccgaggaatctccagcttctgacgaggccggagagaaggaggccaaaagcgacagcggctctgagacacctggaacaagcgagagcgccaccccggaatcctatgaacaacttgcaccacaaccgtgtgtgggagaaactttacattctagcctcccacgagacagtgaactgtttgtgcctgaagaggggagcagcgagaaggagagcgaggacgcgccaaaaacatctcctccgacgcctgggaaacatggtttggaacagactggggaggaaaaagtgatggtgactgttcctgacaaaaatccaccttgtccttgctgtggtacccgggtaaactctgtgttgaatctgattgaacatctgaaagtgtcacacgggaaaaggggggtttgttttcggtgtgcaaaatgtggaaaggaaaatagtaactatcacagtgttgtttgtcattttaagaaatgcaggggtccagagacggagaaagccccagctggggagtggatttgtgaggtatgcaacagagattttacaaccaaaattggcctgggacaacacaagagattggcacacccagcagtgagaaatcaggaaaggatcgttgcttcccaaccgaaagaaacatcaaatagaggtgctcacaaaaggtgctggacaaaggaggaggaagaattactaataagactggaggctcagttcgagggaaacaaaaatattaataagcttattgcagaacacataaccaccaaaacagctaagcagatcagtgacaaaaggcgattgctgtccagaaagccagcagaggagccacgtgaggagcctggaacgtgtcatcacaccaggagagcagctgcgagcctgagaacggagcctgagatgagtcatcacgcccaggcagaggacagagataatggacctgggagacgccctctgccaggcagggcagctgccggagggagaacaatggacgagataagacgccaccctgataagggcaacggacagcagagacccaccaagcaaaaatcagaagaacagctgcaggcttactataaaaagacactagaggaacgactttcagctggggcacttaacaccttcccccgagcattcaagcaggtaatggaaggccgggatataaagctagtaatcaatcagacagcgcaggactgcttcggatgcctggaatccataagccaaataagaacggcaacccgagataaaaaggacacggtgacccgggagaaacacccaaagaaaccttttcagaagtggatgaagaagagagcaatcaaaaaaggtaattatcttcggttccagcgtttattttatcttgatagagggaaactggctaaaatcattttagatgatattgaatgcttgtcttgtgacataccactcagtgaaatttattcggtttttaaaacaagatgggaaacaactggtagctttaaaagccttggggactttaaaacttacgggaaggctgacaacactgccttcagagaattaattacggctaaagaaattgagaaaaatgtgcaggaaatgagcaaaggctcggctcccggtccagacgggattactcttggggacgtcgtaaagatggatcccgagttttcccggaccatggagattttcaatttatggttaacaactggtaaaatcccggacatggtgagggggtgcagaaccgttttgattccaaaatcatcaaagccggatcgtttgaaagacattaataactggagacctatcacgatcggttccatcttgctgagactgttctccaggattgtaacagctaggctgagcaaagcgtgccccctgaacccaaggcaaagaggctttatcagagcggcgggatgctctgaaaacttaaaactcctgcaaactataatttggtcggccaaaagagaacacagaccactgggtgttgtattcgtggacatcgccaaggcttttgacaccgtaagccaccagcacatcattcatgctttgcagcaaagagaggtggatccccacatcgtcggtctggtgagcaatatgtacgagaacatcagtacgtatatcaccacaaagaggaacacacacacagacaaaatccagatccgggttggagtaaagcagggtgacccgatgtcgccccttttatttaacctggcaatggaccctctattatgcaagctggaagagagtggcaaaggataccaccgaggacagagcagcatcacagcgatggcatttgcagacgatctggttttgctgagcgactcctgggaaaatatgaatacaaatattagcatactggagaccttctgcaatctgaccggactcaaaacacaggggcaaaagtgccacggcttttacatcaagccgacaaagaagtcttacaccatcaatgactgcgctgcctggactatcaacggcacacccctgaacatgatcgaccccggcgaatctgagaaatacctcggcctgcagtttgacccgtggattggaatagcaaggtccggtctctccacaaaactagatttttggcttcagcggatcgatcaagcaccacttaaacctctgcagaaaactgatattctcaaaacatacaccatccctcggctgatctacatagctgaccactcagaagtgaaaagcgcactactcgaaacccttgaccagaagatccggacagcggtcaaggaatggcttcacctacctccgtgcacctgcgatgccatcctgtactcgagcacgagagacggcggtttgggcatcaccaaattggcaggactgatccccagcgtgcaggcccgtagactgcatcggatcgcacagtcatctgacgatacgatgaaatgcttcatggaaaaagagaaaatggaacagctgcataagaaattgtggattcaagctggaggggacagagagaacataccctcgatttgggaagcaccaccgtcgagtgaaccaccaaacaacgtgagcacaaattcggaatgggaagcaccgacccagaaagataaatttccaaagccttgcaattggaggaaaaacgaattcaaaaaatggaccaaattggcatcccaaggccgcggaattgtaaattttgaaagagacaaaattagtaaccattggatccaatactacagacgcatacctcacaggaaactcctcactgcactacaactcagggccaacgtttaccccacgagagaatttctagccaggggtagacaagaccaatacatcaaggcgtgtaggcactgcgatgcggacaacgaatcctgcgcccacatcatcggcaactgcccagtgacacaggacgcccgaatcaagaggcacaattacatctgcgaactgcttctcgaggaggcgaagaagaaggactgggtagtgttcaaggaaccgcacataagggattccaacaaggaactgtacaaacctgacctgatatttgtgaaggatgggcgtgcacttgtcgtggatgtgacagtacggtatgaagcagccaaatcatcgctggaggaagccgctgcagagaaagtgagaaagtacaaacacctggaaacggaagtaagacatctcacgaatgcaaaggacgttacttttgtgggctttcccctaggagcgcgggggaaatggcaccaagataactttaaacttttgactgagcttggcctctccaaatcgaggcaagtgaaaatggcagagactttttccacagtagcgctcttttcatctgtggacattgtacatatgtttgccagtagggccagaaaatctatggttatgagcggctctgagacacctggaacaagcgagagcgccaccccggaaggcagcctgctgaaggagggcagcagcaatcaaagagtgtttgattggatcgaggccaacctgagcgagcagcagatcgtttctaacaccctggtgcgggccctgatgaccgccgtgtgctacagcgccatcatcttcgagacacctctgagagtggacgtggccgtgctgaaggccagagccaagctgctgcagaagtacctgtgtgacgaacagaaagaactgcaggccctgtacgccctgcaagccctcgtggtgaccctggaacagcctccaaacctgctgcggatgttcttcgacgctctgtatgatgaagatgtggtgaaggaggacgccttctacagctgggagagcagcaaggaccccgccgagcagcagggaaagggcgtcgcactgaaaagcgtgacagcttttttcaagtggctgagagaagctgaagaggagtccgaccacaactctggcggctcaaaacggacagccgacggaagcgagttcgagtcaccaaagaagaagcggaaagtctgataataggctgccttctgcggggcttgccttctggccatgcccttcttctctcccttgcacctgtacctcttggtctttgaataaagcctgagtaggaaggaccggtaaaaaaaaaaaaaaaaaaaaaaaaaaaaaaacgttgactaaaaaaaaaaaaaaaaaaaaaaaaaaaaaaaaaaaaaaaaaaaaaaaaaaaaaaaaaaaaaaaaaaaaaa

SEQ ID NO: 11244 - DNA, 5810 bp, synthetic construct
  source 1..5810: mol_type = other DNA
gaaataagagagaaaagaagagtaagaagaaatataagagaattcgccaccatggccaaacggacagccgacggaagcgagttcgagtcaccaaagaagaagcggaaagtctctggcggctcactgctgaaggagggcagcagcaatcaaagagtgtttgattggatcgaggccaacctgagcgagcagcagatcgtttctaacaccctggtgcgggccctgatgaccgccgtgtgctacagcgccatcatcttcgagacacctctgagagtggacgtggccgtgctgaaggccagagccaagctgctgcagaagtacctgtgtgacgaacagaaagaactgcaggccctgtacgccctgcaagccctcgtggtgaccctggaacagcctccaaacctgctgcggatgttcttcgacgctctgtatgatgaagatgtggtgaaggaggacgccttctacagctgggagagcagcaaggaccccgccgagcagcagggaaagggcgtcgcactgaaaagcgtgacagcttttttcaagtggctgagagaagctgaagaggagtccgaccacaactccggctccgagactcctggaacaagcgagagcgctacacctgagggcagcaatatcagcggctctagctgcggcagccccaacagcgccgacaccagcagcgacttcaaggacctgtggaccaagctgaaggaatgccacgaccgggaagtgcagggactccaggtgaaggtcaccaaactcaagcaagaaagaatcctggacgcccagagactggaagaattcttcaccaagaaccagcagctgagagagcagcagaaagtgctgcacgagacaatcaaggttctggaagatagactgcgggccggcctgtgcgacagatgcgccgtgaccgaggaacacatgcgcaaaaagcagcaggagttcgagaacattagacagcaaaatctgaaattgatcacagagctgatgaacgagagaaacacactgcaggaggagaacaagaagctgagcgagcagctgcaacagaagatcgagaatgatcagcaacaccaggccgctgagctggaatgtgaagaggacgtgatccccgacagcccaatcacagctttcagcttttctggcgtgaacagactgaggcggaaggaaaacccccacgtgcggtacatcgagcagacccataccaagctggaacacagcgtgtgtgccaacgagatgagaaaggtgtccaagtcctccacccatccccagcacaaccctaacgaaaatgagatcctggtggctgatacctacgaccagtctcagagccctatggccaaggcccacggcaccagctcttatacccctgataagagctccttcaacctggccaccgtggtggccgagacactgggcctgggcgtgcaggaggaaagcgagacacagggcccaatgagccctctgggagatgagctgtaccactgcctggaaggcaaccacaagaaacagccttttgagtccggctccgagactcctggaacaagcgagagcgctacacctgagggcagccctaagagaaaggtgtccagcgccgagggcgctgccaaggaagagcctaaacggagaagcgccagactgagcgccaagccccccgccaaggtggaagccaagcctaagaaggccgccgctaaggacaagagcagcgataagaaagtccagaccaagggcaagcggggcgccaaaggcaaacaggccgaggtggccaaccaggagacaaaggaagatctgcctgctgagaacggcgaaaccaagaccgaggaatctccagcttctgacgaggccggagagaaggaggccaaaagcgacagcggctctgagacacctggaacaagcgagagcgccaccccggaatcctatgaacaacttgcaccacaaccgtgtgtgggagaaactttacattctagcctcccacgagacagtgaactgtttgtgcctgaagaggggagcagcgagaaggagagcgaggacgcgccaaaaacatctcctccgacgcctgggaaacatggtttggaacagactggggaggaaaaagtgatggtgactgttcctgacaaaaatccaccttgtccttgctgtggtacccgggtaaactctgtgttgaatctgattgaacatctgaaagtgtcacacgggaaaaggggggtttgttttcggtgtgcaaaatgtggaaaggaaaatagtaactatcacagtgttgtttgtcattttaagaaatgcaggggtccagagacggagaaagccccagctggggagtggatttgtgaggtatgcaacagagattttacaaccaaaattggcctgggacaacacaagagattggcacacccagcagtgagaaatcaggaaaggatcgttgcttcccaaccgaaagaaacatcaaatagaggtgctcacaaaaggtgctggacaaaggaggaggaagaattactaataagactggaggctcagttcgagggaaacaaaaatattaataagcttattgcagaacacataaccaccaaaacagctaagcagatcagtgacaaaaggcgattgctgtccagaaagccagcagaggagccacgtgaggagcctggaacgtgtcatcacaccaggagagcagctgcgagcctgagaacggagcctgagatgagtcatcacgcccaggcagaggacagagataatggacctgggagacgccctctgccaggcagggcagctgccggagggagaacaatggacgagataagacgccaccctgataagggcaacggacagcagagacccaccaagcaaaaatcagaagaacagctgcaggcttactataaaaagacactagaggaacgactttcagctggggcacttaacaccttcccccgagcattcaagcaggtaatggaaggccgggatataaagctagtaatcaatcagacagcgcaggactgcttcggatgcctggaatccataagccaaataagaacggcaacccgagataaaaaggacacggtgacccgggagaaacacccaaagaaaccttttcagaagtggatgaagaagagagcaatcaaaaaaggtaattatcttcggttccagcgtttattttatcttgatagagggaaactggctaaaatcattttagatgatattgaatgcttgtcttgtgacataccactcagtgaaatttattcggtttttaaaacaagatgggaaacaactggtagctttaaaagccttggggactttaaaacttacgggaaggctgacaacactgccttcagagaattaattacggctaaagaaattgagaaaaatgtgcaggaaatgagcaaaggctcggctcccggtccagacgggattactcttggggacgtcgtaaagatggatcccgagttttcccggaccatggagattttcaatttatggttaacaactggtaaaatcccggacatggtgagggggtgcagaaccgttttgattccaaaatcatcaaagccggatcgtttgaaagacattaataactggagacctatcacgatcggttccatcttgctgagactgttctccaggattgtaacagctaggctgagcaaagcgtgccccctgaacccaaggcaaagaggctttatcagagcggcgggatgctctgaaaacttaaaactcctgcaaactataatttggtcggccaaaagagaacacagaccactgggtgttgtattcgtggacatcgccaaggcttttgacaccgtaagccaccagcacatcattcatgctttgcagcaaagagaggtggatccccacatcgtcggtctggtgagcaatatgtacgagaacatcagtacgtatatcaccacaaagaggaacacacacacagacaaaatccagatccgggttggagtaaagcagggtgacccgatgtcgccccttttatttaacctggcaatggaccctctattatgcaagctggaagagagtggcaaaggataccaccgaggacagagcagcatcacagcgatggcatttgcagacgatctggttttgctgagcgactcctgggaaaatatgaatacaaatattagcatactggagaccttctgcaatctgaccggactcaaaacacaggggcaaaagtgccacggcttttacatcaagccgacaaagaagtcttacaccatcaatgactgcgctgcctggactatcaacggcacacccctgaacatgatcgaccccggcgaatctgagaaatacctcggcctgcagtttgacccgtggattggaatagcaaggtccggtctctccacaaaactagatttttggcttcagcggatcgatcaagcaccacttaaacctctgcagaaaactgatattctcaaaacatacaccatccctcggctgatctacatagctgaccactcagaagtgaaaagcgcactactcgaaacccttgaccagaagatccggacagcggtcaaggaatggcttcacctacctccgtgcacctgcgatgccatcctgtactcgagcacgagagacggcggtttgggcatcaccaaattggcaggactgatccccagcgtgcaggcccgtagactgcatcggatcgcacagtcatctgacgatacgatgaaatgcttcatggaaaaagagaaaatggaacagctgcataagaaattgtggattcaagctggaggggacagagagaacataccctcgatttgggaagcaccaccgtcgagtgaaccaccaaacaacgtgagcacaaattcggaatgggaagcaccgacccagaaagataaatttccaaagccttgcaattggaggaaaaacgaattcaaaaaatggaccaaattggcatcccaaggccgcggaattgtaaattttgaaagagacaaaattagtaaccattggatccaatactacagacgcatacctcacaggaaactcctcactgcactacaactcagggccaacgtttaccccacgagagaatttctagccaggggtagacaagaccaatacatcaaggcgtgtaggcactgcgatgcggacaacgaatcctgcgcccacatcatcggcaactgcccagtgacacaggacgcccgaatcaagaggcacaattacatctgcgaactgcttctcgaggaggcgaagaagaaggactgggtagtgttcaaggaaccgcacataagggattccaacaaggaactgtacaaacctgacctgatatttgtgaaggatgggcgtgcacttgtcgtggatgtgacagtacggtatgaagcagccaaatcatcgctggaggaagccgctgcagagaaagtgagaaagtacaaacacctggaaacggaagtaagacatctcacgaatgcaaaggacgttacttttgtgggctttcccctaggagcgcgggggaaatggcaccaagataactttaaacttttgactgagcttggcctctccaaatcgaggcaagtgaaaatggcagagactttttccacagtagcgctcttttcatctgtggacattgtacatatgtttgccagtagggccagaaaatctatggttatgtgataataggctgccttctgcggggcttgccttctggccatgcccttcttctctcccttgcacctgtacctcttggtctttgaataaagcctgagtaggaaggaccggtaaaaaaaaaaaaaaaaaaaaaaaaaaaaaaacgttgactaaaaaaaaaaaaaaaaaaaaaaaaaaaaaaaaaaaaaaaaaaaaaaaaaaaaaaaaaaaaaaaaaaaaaa

SEQ ID NO: 11245 - DNA, 6191 bp, synthetic construct
  source 1..6191: mol_type = other DNA
gaaataagagagaaaagaagagtaagaagaaatataagagaattcgccaccatggccaaacggacagccgacggaagcgagttcgagtcaccaaagaagaagcggaaagtctctggcggctcagaaagaaagaccagccagagagagcctgtgaccctggccctgaggctgagaccttataaggccgccacccagcagctgcggagcatcattcgcggactgaaggaaaacaccacaatcaccttcctggagacacctgctatggtggtgcagaccgccagagctaatcacgtgtctaagatcacattcaacagcagctgtctgtacatcagcgatagaaacgagttccagcggaaaaccatcaacaaccaagtgcctctggtgggcagcttcatgcacctgtctagcaacaaggacctgacaaaactgtacatccaggatctgtcccccatgtacgcccatatcagcatggtcgccacagacttcaacatggaattcagctctgcctgcgtgcacaatcaggacgtggtgagagagaacggcgagagctttgtgcgggccgacctaagccacagcgtggttacagagctgatccggtgggtggccccatacaccagagccaagcggaccaacaaaaagcagagcgctcctgccaataccgttcaaatgctggtccacgccaatcctcctacactgaagctgatcatctgcggctctggcgccaacaacgagctggaattcgtggctaacgagcacgtgtcctttcacgacgtgaagcccgtgcacctcatgctgaacaccaagaacttccacaacgccctgacccagtgcgccgtgaccaagctgagctgcgccatcagagtgctgtccgaccacgataacatcgtgcatctgcagtccaagaacaatagcttcaccgtggaaagctttgtgacagaggaaccctactctagatccggctccgagactcctggaacaagcgagagcgctacacctgagggcagcaatatcagcggctctagctgcggcagccccaacagcgccgacaccagcagcgacttcaaggacctgtggaccaagctgaaggaatgccacgaccgggaagtgcagggactccaggtgaaggtcaccaaactcaagcaagaaagaatcctggacgcccagagactggaagaattcttcaccaagaaccagcagctgagagagcagcagaaagtgctgcacgagacaatcaaggttctggaagatagactgcgggccggcctgtgcgacagatgcgccgtgaccgaggaacacatgcgcaaaaagcagcaggagttcgagaacattagacagcaaaatctgaaattgatcacagagctgatgaacgagagaaacacactgcaggaggagaacaagaagctgagcgagcagctgcaacagaagatcgagaatgatcagcaacaccaggccgctgagctggaatgtgaagaggacgtgatccccgacagcccaatcacagctttcagcttttctggcgtgaacagactgaggcggaaggaaaacccccacgtgcggtacatcgagcagacccataccaagctggaacacagcgtgtgtgccaacgagatgagaaaggtgtccaagtcctccacccatccccagcacaaccctaacgaaaatgagatcctggtggctgatacctacgaccagtctcagagccctatggccaaggcccacggcaccagctcttatacccctgataagagctccttcaacctggccaccgtggtggccgagacactgggcctgggcgtgcaggaggaaagcgagacacagggcccaatgagccctctgggagatgagctgtaccactgcctggaaggcaaccacaagaaacagccttttgagtccggctccgagactcctggaacaagcgagagcgctacacctgagggcagccctaagagaaaggtgtccagcgccgagggcgctgccaaggaagagcctaaacggagaagcgccagactgagcgccaagccccccgccaaggtggaagccaagcctaagaaggccgccgctaaggacaagagcagcgataagaaagtccagaccaagggcaagcggggcgccaaaggcaaacaggccgaggtggccaaccaggagacaaaggaagatctgcctgctgagaacggcgaaaccaagaccgaggaatctccagcttctgacgaggccggagagaaggaggccaaaagcgacagcggctctgagacacctggaacaagcgagagcgccaccccggaatcctatgaacaacttgcaccacaaccgtgtgtgggagaaactttacattctagcctcccacgagacagtgaactgtttgtgcctgaagaggggagcagcgagaaggagagcgaggacgcgccaaaaacatctcctccgacgcctgggaaacatggtttggaacagactggggaggaaaaagtgatggtgactgttcctgacaaaaatccaccttgtccttgctgtggtacccgggtaaactctgtgttgaatctgattgaacatctgaaagtgtcacacgggaaaaggggggtttgttttcggtgtgcaaaatgtggaaaggaaaatagtaactatcacagtgttgtttgtcattttaagaaatgcaggggtccagagacggagaaagccccagctggggagtggatttgtgaggtatgcaacagagattttacaaccaaaattggcctgggacaacacaagagattggcacacccagcagtgagaaatcaggaaaggatcgttgcttcccaaccgaaagaaacatcaaatagaggtgctcacaaaaggtgctggacaaaggaggaggaagaattactaataagactggaggctcagttcgagggaaacaaaaatattaataagcttattgcagaacacataaccaccaaaacagctaagcagatcagtgacaaaaggcgattgctgtccagaaagccagcagaggagccacgtgaggagcctggaacgtgtcatcacaccaggagagcagctgcgagcctgagaacggagcctgagatgagtcatcacgcccaggcagaggacagagataatggacctgggagacgccctctgccaggcagggcagctgccggagggagaacaatggacgagataagacgccaccctgataagggcaacggacagcagagacccaccaagcaaaaatcagaagaacagctgcaggcttactataaaaagacactagaggaacgactttcagctggggcacttaacaccttcccccgagcattcaagcaggtaatggaaggccgggatataaagctagtaatcaatcagacagcgcaggactgcttcggatgcctggaatccataagccaaataagaacggcaacccgagataaaaaggacacggtgacccgggagaaacacccaaagaaaccttttcagaagtggatgaagaagagagcaatcaaaaaaggtaattatcttcggttccagcgtttattttatcttgatagagggaaactggctaaaatcattttagatgatattgaatgcttgtcttgtgacataccactcagtgaaatttattcggtttttaaaacaagatgggaaacaactggtagctttaaaagccttggggactttaaaacttacgggaaggctgacaacactgccttcagagaattaattacggctaaagaaattgagaaaaatgtgcaggaaatgagcaaaggctcggctcccggtccagacgggattactcttggggacgtcgtaaagatggatcccgagttttcccggaccatggagattttcaatttatggttaacaactggtaaaatcccggacatggtgagggggtgcagaaccgttttgattccaaaatcatcaaagccggatcgtttgaaagacattaataactggagacctatcacgatcggttccatcttgctgagactgttctccaggattgtaacagctaggctgagcaaagcgtgccccctgaacccaaggcaaagaggctttatcagagcggcgggatgctctgaaaacttaaaactcctgcaaactataatttggtcggccaaaagagaacacagaccactgggtgttgtattcgtggacatcgccaaggcttttgacaccgtaagccaccagcacatcattcatgctttgcagcaaagagaggtggatccccacatcgtcggtctggtgagcaatatgtacgagaacatcagtacgtatatcaccacaaagaggaacacacacacagacaaaatccagatccgggttggagtaaagcagggtgacccgatgtcgccccttttatttaacctggcaatggaccctctattatgcaagctggaagagagtggcaaaggataccaccgaggacagagcagcatcacagcgatggcatttgcagacgatctggttttgctgagcgactcctgggaaaatatgaatacaaatattagcatactggagaccttctgcaatctgaccggactcaaaacacaggggcaaaagtgccacggcttttacatcaagccgacaaagaagtcttacaccatcaatgactgcgctgcctggactatcaacggcacacccctgaacatgatcgaccccggcgaatctgagaaatacctcggcctgcagtttgacccgtggattggaatagcaaggtccggtctctccacaaaactagatttttggcttcagcggatcgatcaagcaccacttaaacctctgcagaaaactgatattctcaaaacatacaccatccctcggctgatctacatagctgaccactcagaagtgaaaagcgcactactcgaaacccttgaccagaagatccggacagcggtcaaggaatggcttcacctacctccgtgcacctgcgatgccatcctgtactcgagcacgagagacggcggtttgggcatcaccaaattggcaggactgatccccagcgtgcaggcccgtagactgcatcggatcgcacagtcatctgacgatacgatgaaatgcttcatggaaaaagagaaaatggaacagctgcataagaaattgtggattcaagctggaggggacagagagaacataccctcgatttgggaagcaccaccgtcgagtgaaccaccaaacaacgtgagcacaaattcggaatgggaagcaccgacccagaaagataaatttccaaagccttgcaattggaggaaaaacgaattcaaaaaatggaccaaattggcatcccaaggccgcggaattgtaaattttgaaagagacaaaattagtaaccattggatccaatactacagacgcatacctcacaggaaactcctcactgcactacaactcagggccaacgtttaccccacgagagaatttctagccaggggtagacaagaccaatacatcaaggcgtgtaggcactgcgatgcggacaacgaatcctgcgcccacatcatcggcaactgcccagtgacacaggacgcccgaatcaagaggcacaattacatctgcgaactgcttctcgaggaggcgaagaagaaggactgggtagtgttcaaggaaccgcacataagggattccaacaaggaactgtacaaacctgacctgatatttgtgaaggatgggcgtgcacttgtcgtggatgtgacagtacggtatgaagcagccaaatcatcgctggaggaagccgctgcagagaaagtgagaaagtacaaacacctggaaacggaagtaagacatctcacgaatgcaaaggacgttacttttgtgggctttcccctaggagcgcgggggaaatggcaccaagataactttaaacttttgactgagcttggcctctccaaatcgaggcaagtgaaaatggcagagactttttccacagtagcgctcttttcatctgtggacattgtacatatgtttgccagtagggccagaaaatctatggttatgtgataataggctgccttctgcggggcttgccttctggccatgcccttcttctctcccttgcacctgtacctcttggtctttgaataaagcctgagtaggaaggaccggtaaaaaaaaaaaaaaaaaaaaaaaaaaaaaaacgttgactaaaaaaaaaaaaaaaaaaaaaaaaaaaaaaaaaaaaaaaaaaaaaaaaaaaaaaaaaaaaaaaaaaaaaa

SEQ ID NO: 11246 - DNA, 6224 bp, synthetic construct
  source 1..6224: mol_type = other DNA
gaaataagagagaaaagaagagtaagaagaaatataagagaattcgccaccatggccaaacggacagccgacggaagcgagttcgagtcaccaaagaagaagcggaaagtctctggcggctcagaacctccaaccctggctttcagactgaaggcctacaaggccgccatccagcagctcaggtgcgtggtgcggtccctgaaagacaacaccacagtgaccttcctgcctaccccagccctggtggtgcaaacagtgcggtcccagttcgtgggaaagatcgtgttcaactctagctgcctgtatgtgacagatagaacatttacacctaagaccatcaacaaccatgtgcctctggtgggcaatctgatgtacatgagctctaatagagaactgacaaagttcattgtgcaggacagtagcgacctgagcgcccgcgtgtgcatgagcgcccctgatttcaacatggactttagcagcgcatgcgtgcacagccaggatatcgtcgtcagagagaacggcaacagcgtggccagagtggacttcgacttcaacgtggtggccgagctgatcaagtggatcggacctcacatcagacccaagcggaatagcaagaaacagatcatgcctaccggcaccgtgcagatcaccctgatgcctaacccccccacagtgaaattcagcctggctcctaataccgaggtcgagttcaccgccggcaacagagtggctttccacgaagtgaagaacctgcgggccaccgtgcaagctagaaatctgtaccaggcctttaaccactgtgccgtgaccaagctgacctgtaccctgagaatcatgaccgaccacgagacagttgtgtacgtgggcagcaagaacaacgtttttaccatcgagaacttcctgtctgaagaacccttcacaagaaacgaggtgtcctacgagcggggcgtgctgaacagcaactaccaggccaacagcggcagctcttccggctccgagactcctggaacaagcgagagcgctacacctgagggcagcaatatcagcggctctagctgcggcagccccaacagcgccgacaccagcagcgacttcaaggacctgtggaccaagctgaaggaatgccacgaccgggaagtgcagggactccaggtgaaggtcaccaaactcaagcaagaaagaatcctggacgcccagagactggaagaattcttcaccaagaaccagcagctgagagagcagcagaaagtgctgcacgagacaatcaaggttctggaagatagactgcgggccggcctgtgcgacagatgcgccgtgaccgaggaacacatgcgcaaaaagcagcaggagttcgagaacattagacagcaaaatctgaaattgatcacagagctgatgaacgagagaaacacactgcaggaggagaacaagaagctgagcgagcagctgcaacagaagatcgagaatgatcagcaacaccaggccgctgagctggaatgtgaagaggacgtgatccccgacagcccaatcacagctttcagcttttctggcgtgaacagactgaggcggaaggaaaacccccacgtgcggtacatcgagcagacccataccaagctggaacacagcgtgtgtgccaacgagatgagaaaggtgtccaagtcctccacccatccccagcacaaccctaacgaaaatgagatcctggtggctgatacctacgaccagtctcagagccctatggccaaggcccacggcaccagctcttatacccctgataagagctccttcaacctggccaccgtggtggccgagacactgggcctgggcgtgcaggaggaaagcgagacacagggcccaatgagccctctgggagatgagctgtaccactgcctggaaggcaaccacaagaaacagccttttgagtccggctccgagactcctggaacaagcgagagcgctacacctgagggcagccctaagagaaaggtgtccagcgccgagggcgctgccaaggaagagcctaaacggagaagcgccagactgagcgccaagccccccgccaaggtggaagccaagcctaagaaggccgccgctaaggacaagagcagcgataagaaagtccagaccaagggcaagcggggcgccaaaggcaaacaggccgaggtggccaaccaggagacaaaggaagatctgcctgctgagaacggcgaaaccaagaccgaggaatctccagcttctgacgaggccggagagaaggaggccaaaagcgacagcggctctgagacacctggaacaagcgagagcgccaccccggaatcctatgaacaacttgcaccacaaccgtgtgtgggagaaactttacattctagcctcccacgagacagtgaactgtttgtgcctgaagaggggagcagcgagaaggagagcgaggacgcgccaaaaacatctcctccgacgcctgggaaacatggtttggaacagactggggaggaaaaagtgatggtgactgttcctgacaaaaatccaccttgtccttgctgtggtacccgggtaaactctgtgttgaatctgattgaacatctgaaagtgtcacacgggaaaaggggggtttgttttcggtgtgcaaaatgtggaaaggaaaatagtaactatcacagtgttgtttgtcattttaagaaatgcaggggtccagagacggagaaagccccagctggggagtggatttgtgaggtatgcaacagagattttacaaccaaaattggcctgggacaacacaagagattggcacacccagcagtgagaaatcaggaaaggatcgttgcttcccaaccgaaagaaacatcaaatagaggtgctcacaaaaggtgctggacaaaggaggaggaagaattactaataagactggaggctcagttcgagggaaacaaaaatattaataagcttattgcagaacacataaccaccaaaacagctaagcagatcagtgacaaaaggcgattgctgtccagaaagccagcagaggagccacgtgaggagcctggaacgtgtcatcacaccaggagagcagctgcgagcctgagaacggagcctgagatgagtcatcacgcccaggcagaggacagagataatggacctgggagacgccctctgccaggcagggcagctgccggagggagaacaatggacgagataagacgccaccctgataagggcaacggacagcagagacccaccaagcaaaaatcagaagaacagctgcaggcttactataaaaagacactagaggaacgactttcagctggggcacttaacaccttcccccgagcattcaagcaggtaatggaaggccgggatataaagctagtaatcaatcagacagcgcaggactgcttcggatgcctggaatccataagccaaataagaacggcaacccgagataaaaaggacacggtgacccgggagaaacacccaaagaaaccttttcagaagtggatgaagaagagagcaatcaaaaaaggtaattatcttcggttccagcgtttattttatcttgatagagggaaactggctaaaatcattttagatgatattgaatgcttgtcttgtgacataccactcagtgaaatttattcggtttttaaaacaagatgggaaacaactggtagctttaaaagccttggggactttaaaacttacgggaaggctgacaacactgccttcagagaattaattacggctaaagaaattgagaaaaatgtgcaggaaatgagcaaaggctcggctcccggtccagacgggattactcttggggacgtcgtaaagatggatcccgagttttcccggaccatggagattttcaatttatggttaacaactggtaaaatcccggacatggtgagggggtgcagaaccgttttgattccaaaatcatcaaagccggatcgtttgaaagacattaataactggagacctatcacgatcggttccatcttgctgagactgttctccaggattgtaacagctaggctgagcaaagcgtgccccctgaacccaaggcaaagaggctttatcagagcggcgggatgctctgaaaacttaaaactcctgcaaactataatttggtcggccaaaagagaacacagaccactgggtgttgtattcgtggacatcgccaaggcttttgacaccgtaagccaccagcacatcattcatgctttgcagcaaagagaggtggatccccacatcgtcggtctggtgagcaatatgtacgagaacatcagtacgtatatcaccacaaagaggaacacacacacagacaaaatccagatccgggttggagtaaagcagggtgacccgatgtcgccccttttatttaacctggcaatggaccctctattatgcaagctggaagagagtggcaaaggataccaccgaggacagagcagcatcacagcgatggcatttgcagacgatctggttttgctgagcgactcctgggaaaatatgaatacaaatattagcatactggagaccttctgcaatctgaccggactcaaaacacaggggcaaaagtgccacggcttttacatcaagccgacaaagaagtcttacaccatcaatgactgcgctgcctggactatcaacggcacacccctgaacatgatcgaccccggcgaatctgagaaatacctcggcctgcagtttgacccgtggattggaatagcaaggtccggtctctccacaaaactagatttttggcttcagcggatcgatcaagcaccacttaaacctctgcagaaaactgatattctcaaaacatacaccatccctcggctgatctacatagctgaccactcagaagtgaaaagcgcactactcgaaacccttgaccagaagatccggacagcggtcaaggaatggcttcacctacctccgtgcacctgcgatgccatcctgtactcgagcacgagagacggcggtttgggcatcaccaaattggcaggactgatccccagcgtgcaggcccgtagactgcatcggatcgcacagtcatctgacgatacgatgaaatgcttcatggaaaaagagaaaatggaacagctgcataagaaattgtggattcaagctggaggggacagagagaacataccctcgatttgggaagcaccaccgtcgagtgaaccaccaaacaacgtgagcacaaattcggaatgggaagcaccgacccagaaagataaatttccaaagccttgcaattggaggaaaaacgaattcaaaaaatggaccaaattggcatcccaaggccgcggaattgtaaattttgaaagagacaaaattagtaaccattggatccaatactacagacgcatacctcacaggaaactcctcactgcactacaactcagggccaacgtttaccccacgagagaatttctagccaggggtagacaagaccaatacatcaaggcgtgtaggcactgcgatgcggacaacgaatcctgcgcccacatcatcggcaactgcccagtgacacaggacgcccgaatcaagaggcacaattacatctgcgaactgcttctcgaggaggcgaagaagaaggactgggtagtgttcaaggaaccgcacataagggattccaacaaggaactgtacaaacctgacctgatatttgtgaaggatgggcgtgcacttgtcgtggatgtgacagtacggtatgaagcagccaaatcatcgctggaggaagccgctgcagagaaagtgagaaagtacaaacacctggaaacggaagtaagacatctcacgaatgcaaaggacgttacttttgtgggctttcccctaggagcgcgggggaaatggcaccaagataactttaaacttttgactgagcttggcctctccaaatcgaggcaagtgaaaatggcagagactttttccacagtagcgctcttttcatctgtggacattgtacatatgtttgccagtagggccagaaaatctatggttatgtgataataggctgccttctgcggggcttgccttctggccatgcccttcttctctcccttgcacctgtacctcttggtctttgaataaagcctgagtaggaaggaccggtaaaaaaaaaaaaaaaaaaaaaaaaaaaaaaacgttgactaaaaaaaaaaaaaaaaaaaaaaaaaaaaaaaaaaaaaaaaaaaaaaaaaaaaaaaaaaaaaaaaaaaaaa

SEQ ID NO: 11247 - skipped

SEQ ID NO: 11248 - DNA, 6491 bp, synthetic construct
  source 1..6491: mol_type = other DNA
gaaataagagagaaaagaagagtaagaagaaatataagagaattcgccaccatggccaaacggacagccgacggaagcgagttcgagtcaccaaagaagaagcggaaagtctctggcggctcatccaacaagagcaagaaccagaaacctaagcctcaaagaggccccagaggcagagtgcggggccagtctagaagcggccctgtggtgttccccagcggcgctgtgctggtgggcggaagatacatccctccacctaaaaaggccatcagaggaccacggcggggcctggtccaggcccctaagtctagcgagcggaccagccccagaaagcgcagaagcggctctgagacacctggaacaagcgagagcgccaccccggaatccgacagaaagacaagactgtctgagcctccaaccctggccctgagactgaagccctacaagaccgccatccagcagctgagaagcgtcatcagagccctgaaggaaaataccaccgttacattcctgcctacacccagcctgatcctgcagacagtgcgcagccactgcgtgtctaagatcacatttaattctagctgcctgtatatcaccgacaagtctttccagcctaagaccatcaacaacagcacccctctgctgggcaactttatgtacctgacctccagcaaggacctgactaaattctacgtgcaagacatctccgatctgagcgccaagatctctatgtgcgcccctgatttcaacatggaattcagcagcgcctgtgtgcatggccaggacatcgtcagagagagcgagaacagcgctgtgcacgtggacctggacttcggcgtggtggctgatctgctcaaatggatcggcccccacaccagagtgaagcggaacgtgaagaaagccccttgtcctacaggcacagtgcagatcctggtgcacgccggaccacctgctatcaagttcatccttacaaacggcagcgagctggaattcaccgccaacaaccgggtgtccttccacggcgtgaaaaacatgcggattaacgtgcaactgaaaaatttttaccagaccctgctgaactgcgccgtgaccaagctgccctgcaccctcaggattgtgaccgagcacgacaccctgctgtacgtcgccagcagaaacggcctgttcgccgtggagaacttcctgaccgaggaaccctttcagcggggtgatcctttcgacaagaactacgtgggaaatagcggcaagagcagatccggctccgagactcctggaacaagcgagagcgctacacctgagggcagcaatatcagcggctctagctgcggcagccccaacagcgccgacaccagcagcgacttcaaggacctgtggaccaagctgaaggaatgccacgaccgggaagtgcagggactccaggtgaaggtcaccaaactcaagcaagaaagaatcctggacgcccagagactggaagaattcttcaccaagaaccagcagctgagagagcagcagaaagtgctgcacgagacaatcaaggttctggaagatagactgcgggccggcctgtgcgacagatgcgccgtgaccgaggaacacatgcgcaaaaagcagcaggagttcgagaacattagacagcaaaatctgaaattgatcacagagctgatgaacgagagaaacacactgcaggaggagaacaagaagctgagcgagcagctgcaacagaagatcgagaatgatcagcaacaccaggccgctgagctggaatgtgaagaggacgtgatccccgacagcccaatcacagctttcagcttttctggcgtgaacagactgaggcggaaggaaaacccccacgtgcggtacatcgagcagacccataccaagctggaacacagcgtgtgtgccaacgagatgagaaaggtgtccaagtcctccacccatccccagcacaaccctaacgaaaatgagatcctggtggctgatacctacgaccagtctcagagccctatggccaaggcccacggcaccagctcttatacccctgataagagctccttcaacctggccaccgtggtggccgagacactgggcctgggcgtgcaggaggaaagcgagacacagggcccaatgagccctctgggagatgagctgtaccactgcctggaaggcaaccacaagaaacagccttttgagtccggctccgagactcctggaacaagcgagagcgctacacctgagggcagccctaagagaaaggtgtccagcgccgagggcgctgccaaggaagagcctaaacggagaagcgccagactgagcgccaagccccccgccaaggtggaagccaagcctaagaaggccgccgctaaggacaagagcagcgataagaaagtccagaccaagggcaagcggggcgccaaaggcaaacaggccgaggtggccaaccaggagacaaaggaagatctgcctgctgagaacggcgaaaccaagaccgaggaatctccagcttctgacgaggccggagagaaggaggccaaaagcgacagcggctctgagacacctggaacaagcgagagcgccaccccggaatcctatgaacaacttgcaccacaaccgtgtgtgggagaaactttacattctagcctcccacgagacagtgaactgtttgtgcctgaagaggggagcagcgagaaggagagcgaggacgcgccaaaaacatctcctccgacgcctgggaaacatggtttggaacagactggggaggaaaaagtgatggtgactgttcctgacaaaaatccaccttgtccttgctgtggtacccgggtaaactctgtgttgaatctgattgaacatctgaaagtgtcacacgggaaaaggggggtttgttttcggtgtgcaaaatgtggaaaggaaaatagtaactatcacagtgttgtttgtcattttaagaaatgcaggggtccagagacggagaaagccccagctggggagtggatttgtgaggtatgcaacagagattttacaaccaaaattggcctgggacaacacaagagattggcacacccagcagtgagaaatcaggaaaggatcgttgcttcccaaccgaaagaaacatcaaatagaggtgctcacaaaaggtgctggacaaaggaggaggaagaattactaataagactggaggctcagttcgagggaaacaaaaatattaataagcttattgcagaacacataaccaccaaaacagctaagcagatcagtgacaaaaggcgattgctgtccagaaagccagcagaggagccacgtgaggagcctggaacgtgtcatcacaccaggagagcagctgcgagcctgagaacggagcctgagatgagtcatcacgcccaggcagaggacagagataatggacctgggagacgccctctgccaggcagggcagctgccggagggagaacaatggacgagataagacgccaccctgataagggcaacggacagcagagacccaccaagcaaaaatcagaagaacagctgcaggcttactataaaaagacactagaggaacgactttcagctggggcacttaacaccttcccccgagcattcaagcaggtaatggaaggccgggatataaagctagtaatcaatcagacagcgcaggactgcttcggatgcctggaatccataagccaaataagaacggcaacccgagataaaaaggacacggtgacccgggagaaacacccaaagaaaccttttcagaagtggatgaagaagagagcaatcaaaaaaggtaattatcttcggttccagcgtttattttatcttgatagagggaaactggctaaaatcattttagatgatattgaatgcttgtcttgtgacataccactcagtgaaatttattcggtttttaaaacaagatgggaaacaactggtagctttaaaagccttggggactttaaaacttacgggaaggctgacaacactgccttcagagaattaattacggctaaagaaattgagaaaaatgtgcaggaaatgagcaaaggctcggctcccggtccagacgggattactcttggggacgtcgtaaagatggatcccgagttttcccggaccatggagattttcaatttatggttaacaactggtaaaatcccggacatggtgagggggtgcagaaccgttttgattccaaaatcatcaaagccggatcgtttgaaagacattaataactggagacctatcacgatcggttccatcttgctgagactgttctccaggattgtaacagctaggctgagcaaagcgtgccccctgaacccaaggcaaagaggctttatcagagcggcgggatgctctgaaaacttaaaactcctgcaaactataatttggtcggccaaaagagaacacagaccactgggtgttgtattcgtggacatcgccaaggcttttgacaccgtaagccaccagcacatcattcatgctttgcagcaaagagaggtggatccccacatcgtcggtctggtgagcaatatgtacgagaacatcagtacgtatatcaccacaaagaggaacacacacacagacaaaatccagatccgggttggagtaaagcagggtgacccgatgtcgccccttttatttaacctggcaatggaccctctattatgcaagctggaagagagtggcaaaggataccaccgaggacagagcagcatcacagcgatggcatttgcagacgatctggttttgctgagcgactcctgggaaaatatgaatacaaatattagcatactggagaccttctgcaatctgaccggactcaaaacacaggggcaaaagtgccacggcttttacatcaagccgacaaagaagtcttacaccatcaatgactgcgctgcctggactatcaacggcacacccctgaacatgatcgaccccggcgaatctgagaaatacctcggcctgcagtttgacccgtggattggaatagcaaggtccggtctctccacaaaactagatttttggcttcagcggatcgatcaagcaccacttaaacctctgcagaaaactgatattctcaaaacatacaccatccctcggctgatctacatagctgaccactcagaagtgaaaagcgcactactcgaaacccttgaccagaagatccggacagcggtcaaggaatggcttcacctacctccgtgcacctgcgatgccatcctgtactcgagcacgagagacggcggtttgggcatcaccaaattggcaggactgatccccagcgtgcaggcccgtagactgcatcggatcgcacagtcatctgacgatacgatgaaatgcttcatggaaaaagagaaaatggaacagctgcataagaaattgtggattcaagctggaggggacagagagaacataccctcgatttgggaagcaccaccgtcgagtgaaccaccaaacaacgtgagcacaaattcggaatgggaagcaccgacccagaaagataaatttccaaagccttgcaattggaggaaaaacgaattcaaaaaatggaccaaattggcatcccaaggccgcggaattgtaaattttgaaagagacaaaattagtaaccattggatccaatactacagacgcatacctcacaggaaactcctcactgcactacaactcagggccaacgtttaccccacgagagaatttctagccaggggtagacaagaccaatacatcaaggcgtgtaggcactgcgatgcggacaacgaatcctgcgcccacatcatcggcaactgcccagtgacacaggacgcccgaatcaagaggcacaattacatctgcgaactgcttctcgaggaggcgaagaagaaggactgggtagtgttcaaggaaccgcacataagggattccaacaaggaactgtacaaacctgacctgatatttgtgaaggatgggcgtgcacttgtcgtggatgtgacagtacggtatgaagcagccaaatcatcgctggaggaagccgctgcagagaaagtgagaaagtacaaacacctggaaacggaagtaagacatctcacgaatgcaaaggacgttacttttgtgggctttcccctaggagcgcgggggaaatggcaccaagataactttaaacttttgactgagcttggcctctccaaatcgaggcaagtgaaaatggcagagactttttccacagtagcgctcttttcatctgtggacattgtacatatgtttgccagtagggccagaaaatctatggttatgtgataataggctgccttctgcggggcttgccttctggccatgcccttcttctctcccttgcacctgtacctcttggtctttgaataaagcctgagtaggaaggaccggtaaaaaaaaaaaaaaaaaaaaaaaaaaaaaaacgttgactaaaaaaaaaaaaaaaaaaaaaaaaaaaaaaaaaaaaaaaaaaaaaaaaaaaaaaaaaaaaaaaaaaaaaa

SEQ ID NO: 11249 - DNA, 4603 bp, synthetic construct
  source 1..4603: mol_type = other DNA
ggtctagttacaactgggcatcgctgcagagatcgcacctcctcgtggtcccgctggtagcccttcgaagggtgactaagtcgatctctgccccaggtacggagccgttgggactcaccagtccaacgtaactcctgcctaaattcggtgaaacaaattcctcggtaaaaagccccatggcttcttgcccgaaacctggccccccggtttcagcaggggcaatgagtttggaaagtggactgaccacccactccgttctcgccatcgaacgtggtcccaattcgttggcaaattccggatcagactttgggggggggggtctggggctaccgttacgcctattgagggtatcggtcggcactcagacctcccgctccgactgggtagacctggtgtcctggagccacccaggacccacgtctaagtcccagcaggttgacctggtgtctttatttcctaaacaccgggttgacctgttatccaaaaacgaccaggtagacctggtggctcaatttttaccatctaaatttccccccaatttggcagaaaatgatttggctttgctggtgaacttagagttctacagatcggatttgcatgtgtatgagtgtgttcattttgctgcacattgggagggattaagtggtttgcctgaggtgtatgaacaacttgcaccacaaccgtgtgtgggagaaactttacattctagcctcccacgagacagtgaactgtttgtgcctgaagaggggagcagcgagaaggagagcgaggacgcgccaaaaacatctcctccgacgcctgggaaacatggtttggaacagactggggaggaaaaagtgatggtgactgttcctgacaaaaatccaccttgtccttgctgtggtacccgggtaaactctgtgttgaatctgattgaacatctgaaagtgtcacacgggaaaaggggggtttgttttcggtgtgcaaaatgtggaaaggaaaatagtaactatcacagtgttgtttgtcattttccaaaatgcaggggtccagagacggagaaagccccagctggggagtggatttgtgaggtatgcaacagagattttacaaccaaaattggcctgggacaacacaagagattggcacacccagcagtgagaaatcaggaaaggatcgttgcttcccaaccgaaagaaacatcaaatagaggtgctcacaaaaggtgctggacaaaggaggaggaagaattactaataagactggaggctcagttcgagggaaacaaaaatattaataagcttattgcagaacacataaccaccaaaacagctaagcagatcagtgacaaaaggcgattgctgtccagaaagccagcagaggagccacgtgaggagcctggaacgtgtcatcacaccaggagagcagctgcgagcctgagaacggagcctgagatgagtcatcacgcccaggcagaggacagagataatggacctgggagacgccctctgccaggcagggcagctgccggagggagaacaatggacgagataagacgccaccctgataagggcaacggacagcagagacccaccaagcaaaaatcagaagaacagctgcaggcttactataaaaagacactagaggaacgactttcagctggggcacttaacaccttcccccgagcattcaagcaggtaatggaaggccgggatataaagctagtaatcaatcagacagcgcaggactgcttcggatgcctggaatccataagccaaataagaacggcaacccgagataaaaaggacacggtgacccgggagaaacacccaaagaaaccttttcagaagtggatgaaggacagagcaatcaaaaaaggtaattatcttcggttccagcgtttattttatcttgatagagggaaactggctaaaatcattttagatgatattgaatgcttgtcttgtgacataccactcagtgaaatttattcggtttttaaaacaagatgggaaacaactggtagctttaaaagccttggggactttaaaacttacgggaaggctgacaacactgccttcagagaattaattacggctaaagaaattgagaaaaatgtgcaggaaatgagcaaaggctcggctcccggtccagacgggattactcttggggacgtcgtaaagatggatcccgagttttcccggaccatggagattttcaatttatggttaacaactggtaaaatcccggacatggtgagggggtgcagaaccgttttgattccaaaatcatcaaagccggatcgtttgaaagacattaataactggagacctatcacgatcggttccatcttgctgagactgttctccaggattgtaacagctaggctgagcaaagcgtgccccctgaacccaaggcaaagaggctttatcagagcggcgggatgctctgaaaacttaaaactcctgcaaactataatttggtcggccaaaagagaacacagaccactgggtgttgtattcgtggacatcgccaaggcttttgacaccgtaagccaccagcacatcattcatgctttgcagcaaagagaggtggatccccacatcgtcggtctggtgagcaatatgtacgagaacatcagtacgtatatcaccacaaagaggaacacacacacagacaaaatccagatccgggttggagtaaagcagggtgacccgatgtcgccccttttatttaacctggcaatggaccctctattatgcaagctggaagagagtggcaaaggataccaccgaggacagagcagcatcacagcgatggcatttgcagacgatctggttttgctgagcgactcctgggaaaatatgaatacaaatattagcatactggagaccttctgcaatctgaccggactcaaaacacaggggcaaaagtgccacggcttttacatcaagccgacaaaggactcttacaccatcaatgactgcgctgcctggactatcaacggcacacccctgaacatgatcgaccccggcgaatctgagaaatacctcggcctgcagtttgacccgtggattggaatagcaaggtccggtctctccacaaaactagatttttggcttcagcggatcgatcaagcaccacttaaacctctgcagaaaactgatattctcaaaacatacaccatccctcggctgatctacatagctgaccactcagaagtgaaaactgcactactcgaaacccttgaccagaagatccggacagcggtcaaggaatggcttcacctacctccgtgcacctgcgatgccatcctgtactcgagcacgagagacggcggtttgggcatcaccaaattggcaggactgatccccagcgtgcaggcccgtagactgcatcggatcgcacagtcatctgacgatacgatgaaatgcttcatggaaaaagagaaaatggaacagctgcataagaaattgtggattcaagctggaggggacagagagaacataccctcgatttgggaagcaccaccgtcgagtgaaccaccaaacaacgtgagcacaaattcggaatgggaagcaccgacccagaaagataaatttccaaagccttgcaattggaggaaaaacgaattcaaaaaatggaccaaattggcatcccaaggccgcggaattgtaaattttgaaagagacaaaattagtaaccattggatccaatactacagacgcatacctcacaggaaactcctcactgcactacaactcagggccaacgtttaccccacgagagaatttctagccaggggtagacaagaccaatacatcaaggcgtgtaggcactgcgatgcggacattgaatcctgcgcccacatcatcggcaactgcccagtgacacaggacgcccgaatcaagaggcacaattacatctgcgaactgcttctcgaggaggcgaagaagaaggactgggtagtgttcaaggaaccgcacataagggattccaacaaggaactgtacaaacctgacctgatatttgtgaaggatgcccgtgcacttgtcgtggatgtgacagtacggtatgaagcagccaaatcatcgctggaggaagccgctgcagagaaagtgagaaaggccaaacacctggaaacggaagtaagacatctcacgaatgcaaaggacgttacttttgtgggctttcccctaggagcggccgggaaatggcaccaagataactttaaacttttgactgagcttggcctctccaaatcgaggcaagtgaaaatggcagagactttttccacagtagcgctcttttcatctgtggacattgtacatatgtttgccagtagggccagaaaatctatggttatgtaaaccggtagacatgataagatacattgatgagtttggacaaaccacaactagaatgcagtgaaaaaaatgctttatttgtgaaatttgtgatgctattgctttatttgtaaccattataagctgcaataaacaagttaacaacaacaaaaaaaaaaaaaaaaaaaaaaaaaaaaaaacgttgactaaaaaaaaaaaaaaaaaaaaaaaaaaaaaaaaaaaaaaaaaaaaaaaaaaaaaaaaaaaaaaaaaaaaaa

SEQ ID NO: 11250 - skipped

SEQ ID NO: 11251 - DNA, 5389 bp, synthetic construct
  source 1..5389: mol_type = other DNA
ggtctagttacaactgggcatcgctgcagagatcgcacctcctcgtggtcccgctggtagcccttcgaagggtgactaagtcgatctctgccccaggtacggagccgttgggactcaccagtccaacgtaactcctgcctaaattcggtgaaacaaattcctcggtaaaaagccccatggcccctaagaaaaagcggaaggtgaatatcagcggctctagctgcggcagccccaacagcgccgacaccagcagcgacttcaaggacctgtggaccaagctgaaggaatgccacgaccgggaagtgcagggactccaggtgaaggtcaccaaactcaagcaagaaagaatcctggacgcccagagactggaagaattcttcaccaagaaccagcagctgagagagcagcagaaagtgctgcacgagacaatcaaggttctggaagatagactgcgggccggcctgtgcgacagatgcgccgtgaccgaggaacacatgcgcaaaaagcagcaggagttcgagaacattagacagcaaaatctgaaattgatcacagagctgatgaacgagagaaacacactgcaggaggagaacaagaagctgagcgagcagctgcaacagaagatcgagaatgatcagcaacaccaggccgctgagctggaatgtgaagaggacgtgatccccgacagcccaatcacagctttcagcttttctggcgtgaacagactgaggcggaaggaaaacccccacgtgcggtacatcgagcagacccataccaagctggaacacagcgtgtgtgccaacgagatgagaaaggtgtccaagtcctccacccatccccagcacaaccctaacgaaaatgagatcctggtggctgatacctacgaccagtctcagagccctatggccaaggcccacggcaccagctcttatacccctgataagagctccttcaacctggccaccgtggtggccgagacactgggcctgggcgtgcaggaggaaagcgagacacagggcccaatgagccctctgggagatgagctgtaccactgcctggaaggcaaccacaagaaacagccttttgagtccggctccgagactcctggaacaagcgagagcgctacacctgagggcagccctaagagaaaggtgtccagcgccgagggcgctgccaaggaagagcctaaacggagaagcgccagactgagcgccaagccccccgccaaggtggaagccaagcctaagaaggccgccgctaaggacaagagcagcgataagaaagtccagaccaagggcaagcggggcgccaaaggcaaacaggccgaggtggccaaccaggagacaaaggaagatctgcctgctgagaacggcgaaaccaagaccgaggaatctccagcttctgacgaggccggagagaaggaggccaaaagcgacagcggctctgagacacctggaacaagcgagagcgccaccccggaatcctacgaacagctggctccccagccctgtgtaggcgagacattacacagcagcctgcccagagacagcgagctgttcgttccggaagagggctctagcgagaaggagagcgaggacgctcctaagaccagccctcctacccctggcaaacacggcctggagcaaacaggcgaggagaaggtcatggtgaccgtgcccgacaagaaccctccctgtccttgctgtggcacaagagtcaacagcgtgctgaacctcatcgagcacctgaaggtgtcccacggcaagagaagagtgtgcttcagatgcgccaagtgcggcaaggagaacagcaactaccacagcgtcgtgtgccacttcaagaagtgcagaggccctgagaccgagaaggctcccgctggcgaatggatttgcgaggtgtgcaacagagacttcaccaccaagatcggcctgggccagcacaagcggttagctcaccctgctgtgagaaaccaggagagaatcgtggccagccagcccaaggagacaagcaacaggggcgctcacaagagatgctggaccaaggaggaagaggagctgctcatcagactggaggctcagttcgagggccacaagaacatcaataagcttatcgccgagcacatcaccacaaagaccgccaagcagatcagcgacaagaggagactgctgtccagaaagcccgccgaggagcctagaatggaacctggtacatgtcaccacaccagaagagccgccgctagcctgagaaccgagcccgaaatgtctcaccaggctcaggccgaggacagagacaacggccctggcaggagacctcttcccggcagacccgctgctggaggcagaaccatggacgagatcaggagacaccccgataagggcaacggccagcagagacccacaaagcagaagtccgaggaacagctccaggcctactacaagaaaaccctggaggagagactgtccgcgggagctctgaacaccttccctagagccttcaaacaagtcatggagggcagagacatcaagctggtgatcaaccagaccgcccaggactgcttcggctgccttgagtctatcagccagatcaggaccgccacacgggataagaaggacaccggcaccagagagaagcaccccaagagacccttccagaaatggatgaagaagagggccatcaagaagggcaattacctgagattccagaggctgttctacctggacagaggcaagctggccaagatcatcctggacgacatcgagtgcctgagctgcgacatccctctgagcgagatctacagcgtgttcaagaccagatgggagaccaccggcagcttcaagtctctgggcgacttcaagacatacggcaaggccgacaacaccgccttcagagagctcatcaccgctaaggagatcgagaagaacgtgcaggagatgagcaagggcagcgctcctggccccgatggaattacactgggcgatgtggtgaagatggaccccgagttcagcagaacaatggagatcttcaacctgtggctcaccacaggcaagatccccgacatggtgagaggctgcagaaccgtgcttatccccaagagcagcaagcccgacagactgaaggatatcaacaactggagacccatcaccatcggcagcatcctgctgcggctgttcagccggattgtgaccgctagactgagcaaagcctgtcccctgaaccccagacagagaggcttcatcagagccgctggctgcagcgagaacctgaagctgctccagacaatcatctggagcgccaagagagagcacagacccctgggcgttgttttcgtggacatcgccaaggccttcgacaccgtgtcccatcagcacattatccacgccctgcagcagagggaggtcgaccctcatattgtgggcctggtgtccaacatgtacgagaacatctccacctatattacgaccaagagaaacacccacacagacaagatccagatccgggtcggcgtcaagcagggcgatcctatgtctcctctgctgttcaacctcgccatggaccctctgctctgcaagctcgaggagtctggaaagggctaccatagaggccaatcatcgatcaccgccatggccttcgccgacgacctggtgcttttaagcgacagctgggagaacatgaacaccaacatctctatcctggagacattctgcaaccttaccggcctgaaaacccagggccagaagtgtcatggcttctacatcaaacccaccaagaagagctacaccatcaacgactgcgccgcctggacaatcaacggcacccctctcaacatgatcgaccccggcgagtctgagaagtacctgggcctgcagttcgatccctggatcggcatcgctagaagcggcttgagcaccaagctggacttttggctccaacgcatagaccaggcccccctgaagcctcttcagaaactggacattttgaaaacttatacgatccccagactcatctacatcgccgaccactccgaggtcaagagcgctctgctggaaaccctggaccagaaaatcagaaccgccgtcaaggaatggctgcacctgcccccttgcacatgcgacgctatcctgtacagcagcaccagggacggcggcttaggaatcaccaagttagccggcctcatccccagcgtgcaggctaggagactccacagaatcgcccagagcagcgacgacaccatgaagtgcttcatggagaaggaaagaatggagcagctgcacaagaagctgtggatccaagcgggcggagatcgtgagaacattcccagcatctgggaggcccctcccagctcagaacctcccaataacgtgtccaccaattctgaatgggaggctcccacccagaaggataagtttcccaagccctgcaactggcggaagaacgagttcaaaaaatggacaaagctggctagccagggcaggggcatcgtgaacttcgaaagggacaagattagcaaccactggatccagtactacagaggcatcccccacagaaagctcctcaccgccctccagttacgtgcaaacgtgtacccaaccagagaattcctggccagaggcagacaggaccagtacatcaaggcctgccggcactgcgatgccgataacgagagctgtgctcacatcatcggcaactgccccgtcacccaggacgccagaatcaagagacacaactacatctgcgagttacttctggaggaagccaagaagaaggattgggttgtgttcaaggagccccacatcagagactccaacaaggagctgtacaagccagacctcatcttcgtgaaggacggcagagccctggtggtggacgtcaccgtcagatacgaggctgctaagtccagccttgaggaggctgccgccgagaaagtgcggaagtacaagcacctggaaacagaggtcagacacctcaccaacgccaaggacgttaccttcgtgggcttccccctaggtgctagaggcaaatggcaccaggacaacttcaagctgcttaccgagctgggcctctccaagagccgacaggttaagatggccgagaccttcagcaccgtcgccctgttctcttctgtggacattgtgcacatgttcgcctccagagccagaaagagcatggtgatgtgataataggctgccttctgcggggcttgccttctggccatgcccttcttctctcccttgcacctgtacctcttggtctttgaataaagcctgagtaggaaggaccggtaaaaaaaaaaaaaaaaaaaaaaaaaaaaaaacgttgactaaaaaaaaaaaaaaaaaaaaaaaaaaaaaaaaaaaaaaaaaaaaaaaaaaaaaaaaaaaaaaaaaaaaaa

SEQ ID NO: 11252 - DNA, 5389 bp, synthetic construct
  source 1..5389: mol_type = other DNA
ggtctagttacaactgggcatcgctgcagagatcgcacctcctcgtggtcccgctggtagcccttcgaagggtgactaagtcgatctctgccccaggtacggagccgttgggactcaccagtccaacgtaactcctgcctaaattcggtgaaacaaattcctcggtaaaaagccccatggcccctaagaaaaagcggaaggtgaatatcagcggctctagctgcggcagccccaacagcgccgacaccagcagcgacttcaaggacctgtggaccaagctgaaggaatgccacgaccgggaagtgcagggactccaggtgaaggtcaccaaactcaagcaagaaagaatcctggacgcccagagactggaagaattcttcaccaagaaccagcagctgagagagcagcagaaagtgctgcacgagacaatcaaggttctggaagatagactgcgggccggcctgtgcgacagatgcgccgtgaccgaggaacacatgcgcaaaaagcagcaggagttcgagaacattagacagcaaaatctgaaattgatcacagagctgatgaacgagagaaacacactgcaggaggagaacaagaagctgagcgagcagctgcaacagaagatcgagaatgatcagcaacaccaggccgctgagctggaatgtgaagaggacgtgatccccgacagcccaatcacagctttcagcttttctggcgtgaacagactgaggcggaaggaaaacccccacgtgcggtacatcgagcagacccataccaagctggaacacagcgtgtgtgccaacgagatgagaaaggtgtccaagtcctccacccatccccagcacaaccctaacgaaaatgagatcctggtggctgatacctacgaccagtctcagagccctatggccaaggcccacggcaccagctcttatacccctgataagagctccttcaacctggccaccgtggtggccgagacactgggcctgggcgtgcaggaggaaagcgagacacagggcccaatgagccctctgggagatgagctgtaccactgcctggaaggcaaccacaagaaacagccttttgagtccggctccgagactcctggaacaagcgagagcgctacacctgagggcagccctaagagaaaggtgtccagcgccgagggcgctgccaaggaagagcctaaacggagaagcgccagactgagcgccaagccccccgccaaggtggaagccaagcctaagaaggccgccgctaaggacaagagcagcgataagaaagtccagaccaagggcaagcggggcgccaaaggcaaacaggccgaggtggccaaccaggagacaaaggaagatctgcctgctgagaacggcgaaaccaagaccgaggaatctccagcttctgacgaggccggagagaaggaggccaaaagcgacagcggctctgagacacctggaacaagcgagagcgccaccccggaatcctacgaacagctggctccccagccctgtgtaggcgagacattacacagcagcctgcccagagacagcgagctgttcgttccggaagagggctctagcgagaaggagagcgaggacgctcctaagaccagccctcctacccctggcaaacacggcctggagcaaacaggcgaggagaaggtcatggtgaccgtgcccgacaagaaccctccctgtccttgctgtggcacaagagtcaacagcgtgctgaacctcatcgagcacctgaaggtgtcccacggcaagagaagagtgtgcttcagatgcgccaagtgcggcaaggagaacagcaactaccacagcgtcgtgtgccacttcaagaagtgcagaggccctgagaccgagaaggctcccgctggcgaatggatttgcgaggtgtgcaacagagacttcaccaccaagatcggcctgggccagcacaagcggttagctcaccctgctgtgagaaaccaggagagaatcgtggccagccagcccaaggagacaagcaacaggggcgctcacaagagatgctggaccaaggaggaagaggagctgctcatcagactggaggctcagttcgagggccacaagaacatcaataagcttatcgccgagcacatcaccacaaagaccgccaagcagatcagcgacaagaggagactgctgtccagaaagcccgccgaggagcctagaatggaacctggtacatgtcaccacaccagaagagccgccgctagcctgagaaccgagcccgaaatgtctcaccacgctcaggccgaggacagagacaacggccctggcaggagacctcttcccggcagacccgctgctggaggcagaaccatggacgagatcaggagacaccccgataagggcaacggccagcagagacccacaaagcagaagtccgaggaacagctccaggcctactacaagaaaaccctggaggagagactgtccgcgggagctctgaacaccttccctagagccttcaaacaagtcatggagggcagagacatcaagctggtgatcaaccagaccgcccaggactgcttcggctgccttgagtctatcagccagatcaggaccgccacacgggataagaaggacaccggcaccagagagaagcaccccaagagacccttccagaaatggatgaagaagagggccatcaagaagggcaattacctgagattccagaggctgttctacctggacagaggcaagctggccaagatcatcctggacgacatcgagtgcctgagctgcgacatccctctgagcgagatctacagcgtgttcaagaccagatgggagaccaccggcagcttcaagtctctgggcgacttcaagacatacggcaaggccgacaacaccgccttcagagagctcatcaccgctaaggagatcgagaagaacgtgcaggagatgagcaagggcagcgctcctggccccgatggaattacactgggcgatgtggtgaagatggaccccgagttcagcagaacaatggagatcttcaacctgtggctcaccacaggcaagatccccgacatggtgagaggctgcagaaccgtgcttatccccaagagcagcaagcccgacagactgaaggatatcaacaactggagacccatcaccatcggcagcatcctgctgcggctgttcagccggattgtgaccgctagactgagcaaagcctgtcccctgaaccccagacagagaggcttcatcagagccgctggctgcagcgagaacctgaagctgctccagacaatcatctggagcgccaagagagagcacagacccctgggcgttgttttcgtggacatcgccaaggccttcgacaccgtgtcccatcagcacattatccacgccctgcagcagagggaggtcgaccctcatattgtgggcctggtgtccaacatgtacgagaacatctccacctatattacgaccaagagaaacacccacacagacaagatccagatccgggtcggcgtcaagcagggcgatcctatgtctcctctgctgttcaacctcgccatggaccctctgctctgcaagctcgaggagtctggaaagggctaccatagaggccaatcatcgatcaccgccatggccttcgccgacgacctggtgcttttaagcgacagctgggagaacatgaacaccaacatctctatcctggagacattctgcaaccttaccggcctgaaaacccagggccagaagtgtcatggcttctacatcaaacccaccaagaagagctacaccatcaacgactgcgccgcctggacaatcaacggcacccctctcaacatgatcgaccccggcgagtctgagaagtacctgggcctgcagttcgatccctggatcggcatcgctagaagcggcttgagcaccaagctggacttttggctccaacgcatagaccaggcccccctgaagcctcttcagaaactggacattttgaaaacttatacgatccccagactcatctacatcgccgaccactccgaggtcaagagcgctctgctggaaaccctggaccagaaaatcagaaccgccgtcaaggaatggctgcacctgcccccttgcacatgcgacgctatcctgtacagcagcaccagggacggcggcttaggaatcaccaagttagccggcctcatccccagcgtgcaggctaggagactccacagaatcgcccagagcagcgacgacaccatgaagtgcttcatggagaaggaaagaatggagcagctgcacaagaagctgtggatccaagcgggcggagatcgtgagaacattcccagcatctgggaggcccctcccagctcagaacctcccaataacgtgtccaccaattctgaatgggaggctcccacccagaaggataagtttcccaagccctgcaactggcggaagaacgagttcaaaaaatggacaaagctggctagccagggcaggggcatcgtgaacttcgaaagggacaagattagcaaccactggatccagtactacagaggcatcccccacagaaagctcctcaccgccctccagttacgtgcaaacgtgtacccaaccagagaattcctggccagaggcagacaggaccagtacatcaaggcctgccggcactgcgatgccgataacgagagctgtgctcacatcatcggcaactgccccgtcacccaggacgccagaatcaagagacacaactacatctgcgagttacttctggaggaagccaagaagaaggattgggttgtgttcaaggagccccacatcagagactccaacaaggagctgtacaagccagacctcatcttcgtgaaggacggcagagccctggtggtggacgtcaccgtcagatacgaggctgctaagtccagccttgaggaggctgccgccgagaaagtgcggaagtacaagcacctggaaacagaggtcagacacctcaccaacgccaaggacgttaccttcgtgggcttccccctaggtgctagaggcaaatggcaccaggacaacttcaagctgcttaccgagctgggcctctccaagagccgacaggttaagatggccgagaccttcagcaccgtcgccctgttctcttctgtggacattgtgcacatgttcgcctccagagccagaaagagcatggtgatgtgataataggctgccttctgcggggcttgccttctggccatgcccttcttctctcccttgcacctgtacctcttggtctttgaataaagcctgagtaggaaggaccggtaaaaaaaaaaaaaaaaaaaaaaaaaaaaaaacgttgactaaaaaaaaaaaaaaaaaaaaaaaaaaaaaaaaaaaaaaaaaaaaaaaaaaaaaaaaaaaaaaaaaaaaaa

SEQ ID NO: 11253 - DNA, 5389 bp, synthetic construct
  source 1..5389: mol_type = other DNA
ggtctagttacaactgggcatcgctgcagagatcgcacctcctcgtggtcccgctggtagcccttcgaagggtgactaagtcgatctctgccccaggtacggagccgttgggactcaccagtccaacgtaactcctgcctaaattcggtgaaacaaattcctcggtaaaaagccccatggcccctaagaaaaagcggaaggtgaatatcagcggctctagctgcggcagccccaacagcgccgacaccagcagcgacttcaaggacctgtggaccaagctgaaggaatgccacgaccgggaagtgcagggactccaggtgaaggtcaccaaactcaagcaagaaagaatcctggacgcccagagactggaagaattcttcaccaagaaccagcagctgagagagcagcagaaagtgctgcacgagacaatcaaggttctggaagatagactgcgggccggcctgtgcgacagatgcgccgtgaccgaggaacacatgcgcaaaaagcagcaggagttcgagaacattagacagcaaaatctgaaattgatcacagagctgatgaacgagagaaacacactgcaggaggagaacaagaagctgagcgagcagctgcaacagaagatcgagaatgatcagcaacaccaggccgctgagctggaatgtgaagaggacgtgatccccgacagcccaatcacagctttcagcttttctggcgtgaacagactgaggcggaaggaaaacccccacgtgcggtacatcgagcagacccataccaagctggaacacagcgtgtgtgccaacgagatgagaaaggtgtccaagtcctccacccatccccagcacaaccctaacgaaaatgagatcctggtggctgatacctacgaccagtctcagagccctatggccaaggcccacggcaccagctcttatacccctgataagagctccttcaacctggccaccgtggtggccgagacactgggcctgggcgtgcaggaggaaagcgagacacagggcccaatgagccctctgggagatgagctgtaccactgcctggaaggcaaccacaagaaacagccttttgagtccggctccgagactcctggaacaagcgagagcgctacacctgagggcagccctaagagaaaggtgtccagcgccgagggcgctgccaaggaagagcctaaacggagaagcgccagactgagcgccaagccccccgccaaggtggaagccaagcctaagaaggccgccgctaaggacaagagcagcgataagaaagtccagaccaagggcaagcggggcgccaaaggcaaacaggccgaggtggccaaccaggagacaaaggaagatctgcctgctgagaacggcgaaaccaagaccgaggaatctccagcttctgacgaggccggagagaaggaggccaaaagcgacagcggctctgagacacctggaacaagcgagagcgccaccccggaatcctacgaacagctggctccccagccctgtgtaggcgagacattacacagcagcctgcccagagacagcgagctgttcgttccggaagagggctctagcgagaaggagagcgaggacgctcctaagaccagccctcctacccctggcaaacacggcctggagcaaacaggcgaggagaaggtcatggtgaccgtgcccgacaagaaccctccctgtccttgctgtggcacaagagtcaacagcgtgctgaacctcatcgagcacctgaaggtgtcccacggcaagagaagagtgtgcttcagatgcgccaagtgcggcaaggagaacagcaactaccacagcgtcgtgtgccacttcaagaagtgcagaggccctgagaccgagaaggctcccgctggcgaatggatttgcgaggtgtgcaacagagacttcaccaccaagatcggcctgggccagcacaagcggttagctcaccctgctgtgagaaaccaggagagaatcgtggccagccagcccaaggagacaagcaacaggggcgctcacaagagatgctggaccaaggaggaagaggagctgctcatcagactggaggctcagttcgagggccacaagaacatcaataagcttatcgccgagcacatcaccacaaagaccgccaagcagatcagcgacaagaggagactgctgtccagaaagcccgccgaggagcctagaatggaacctggtacatgtcaccacaccagaagagccgccgctagcctgagaaccgagcccgaaatgtctcaccacgctcaggccgaggacagagacaacggccctggcaggagacctcttcccggcagacccgctgctggaggcagaaccatggacgagatcaggagacaccccgataagggcaacggccagcagagacccacaaagcagaagtccgaggaacagctccaggcctactacaagaaaaccctggaggagagactgtccgcgggagctctgaacaccttccctagagccttcaaacaagtcatggagggcagagacatcaagctggtgatcaaccagaccgcccaggactgcttcggctgccttgagtctatcagccagatcaggaccgccacacgggataagaaggacaccggcaccagagagaagcaccccaagagacccttccagaaatggatgaagaagagggccatcaagaagggcaattacctgagattccagaggctgttctacctggacagaggcaagctggccaagatcatcctggacgacatcgagtgcctgagctgcgacatccctctgagcgagatctacagcgtgttcaagaccagatgggagaccaccggcagcttcaagtctctgggcgacttcaagacatacggcaaggccgacaacaccgccttcagagagctcatcaccgctaaggagatcgagaagaacgtgcaggagatgagcaagggcagcgctcctggccccgatggaattacactgggcgatgtggtgaagatggaccccgagttcagcagaacaatggagatcttcaacctgtggctcaccacaggcaagatccccgacatggtgagaggctgcagaaccgtgcttatccccaagagcagcaagcccgacagactgaaggatatcaacaactggagacccatcaccatcggcagcatcctgctgcggctgttcagccggattgtgaccgctagactgagcaaagcctgtcccctgaaccccagacagagaggcttcatcagagccgctggctgcagcgagaacctgaagctgctccagacaatcatctggagcgccaagagagagcacagacccctgggcgttgttttcgtggacatcgccaaggccttcgacaccgtgtcccatcagcacattatccacgccctgcagcagagggaggtcgaccctcatattgtgggcctggtgtccaacatgtacgagaacatctccacctatattacgaccaagagaaacacccacacagacaagatccagatccgggtcggcgtcaagcagggcgatcctatgtctcctctgctgttcaacctcgccatggaccctctgctctgcaagctcgaggagtctggaaagggctaccatagaggccaatcatcgatcaccgccatggccttcgccgacgacctggtgcttttaagcgacagctgggagaacatgaacaccaacatctctatcctggagacattctgcaaccttaccggcctgaaaacccagggccagaagtgtcatggcttctacatcaaacccaccaagaagagctacaccatcaacgactgcgccgcctggacaatcaacggcacccctctcaacatgatcgaccccggcgagtctgagaagtacctgggcctgcagttcgatccctggatcggcatcgctagaagcggcttgagcaccaagctggacttttggctccaacgcatagaccaggcccccctgaagcctcttcagaaactggacattttgaaaacttatacgatccccagactcatctacatcgccgaccactccgaggtcaagagcgctctgctggaaaccctggaccagaaaatcagaaccgccgtcaaggaatggctgcacctgcccccttgcacatgcgacgctatcctgtacagcagcaccagggacggcggcttaggaatcaccaagttagccggcctcatccccagcgtgcaggctaggagactccacagaatcgcccagagcagcgacgacaccatgaagtgcttcatggagaaggaaagaatggagcagctgcacaagaagctgtggatccaagcgggcggagatcgtgagaacattcccagcatctgggaggcccctcccagctcagaacctcccaataacgtgtccaccaattctgaatgggaggctcccacccagaaggataagtttcccaagccctgcaactggcggaagaacgagttcaaaaaatggacaaagctggctagccagggcaggggcatcgtgaacttcgaaagggacaagattagcaaccactggatccagtactacagaagaatcccccacagaaagctcctcaccgccctccagttacgtgcaaacgtgtacccaaccagagaattcctggccagaggcagacaggaccagtacatcaaggcctgccggcactgcgatgccgataacgagagctgtgctcacatcatcggcaactgccccgtcacccaggacgccagaatcaagagacacaactacatctgcgagttacttctggaggaagccaagaagaaggattgggttgtgttcaaggagccccacatcagagactccaacaaggagctgtacaagccagacctcatcttcgtgaaggacggcagagccctggtggtggacgtcaccgtcagatacgaggctgctaagtccagccttgaggaggctgccgccgagaaagtgcggaagtacaagcacctggaaacagaggtcagacacctcaccaacgccaaggacgttaccttcgtgggcttccccctaggtgctagaggcaaatggcaccaggacaacttcaagctgcttaccgagctgggcctctccaagagccgacaggttaagatggccgagaccttcagcaccgtcgccctgttctcttctgtggacattgtgcacatgttcgcctccagagccagaaagagcatggtgatgtgataataggctgccttctgcggggcttgccttctggccatgcccttcttctctcccttgcacctgtacctcttggtctttgaataaagcctgagtaggaaggaccggtaaaaaaaaaaaaaaaaaaaaaaaaaaaaaaacgttgactaaaaaaaaaaaaaaaaaaaaaaaaaaaaaaaaaaaaaaaaaaaaaaaaaaaaaaaaaaaaaaaaaaaaaa

SEQ ID NO: 11254 - DNA, 5389 bp, synthetic construct
  source 1..5389: mol_type = other DNA
ggtctagttacaactgggcatcgctgcagagatcgcacctcctcgtggtcccgctggtagcccttcgaagggtgactaagtcgatctctgccccaggtacggagccgttgggactcaccagtccaacgtaactcctgcctaaattcggtgaaacaaattcctcggtaaaaagccccatggcccctaagaaaaagcggaaggtgaatatcagcggctctagctgcggcagccccaacagcgccgacaccagcagcgacttcaaggacctgtggaccaagctgaaggaatgccacgaccgggaagtgcagggactccaggtgaaggtcaccaaactcaagcaagaaagaatcctggacgcccagagactggaagaattcttcaccaagaaccagcagctgagagagcagcagaaagtgctgcacgagacaatcaaggttctggaagatagactgcgggccggcctgtgcgacagatgcgccgtgaccgaggaacacatgcgcaaaaagcagcaggagttcgagaacattagacagcaaaatctgaaattgatcacagagctgatgaacgagagaaacacactgcaggaggagaacaagaagctgagcgagcagctgcaacagaagatcgagaatgatcagcaacaccaggccgctgagctggaatgtgaagaggacgtgatccccgacagcccaatcacagctttcagcttttctggcgtgaacagactgaggcggaaggaaaacccccacgtgcggtacatcgagcagacccataccaagctggaacacagcgtgtgtgccaacgagatgagaaaggtgtccaagtcctccacccatccccagcacaaccctaacgaaaatgagatcctggtggctgatacctacgaccagtctcagagccctatggccaaggcccacggcaccagctcttatacccctgataagagctccttcaacctggccaccgtggtggccgagacactgggcctgggcgtgcaggaggaaagcgagacacagggcccaatgagccctctgggagatgagctgtaccactgcctggaaggcaaccacaagaaacagccttttgagtccggctccgagactcctggaacaagcgagagcgctacacctgagggcagccctaagagaaaggtgtccagcgccgagggcgctgccaaggaagagcctaaacggagaagcgccagactgagcgccaagccccccgccaaggtggaagccaagcctaagaaggccgccgctaaggacaagagcagcgataagaaagtccagaccaagggcaagcggggcgccaaaggcaaacaggccgaggtggccaaccaggagacaaaggaagatctgcctgctgagaacggcgaaaccaagaccgaggaatctccagcttctgacgaggccggagagaaggaggccaaaagcgacagcggctctgagacacctggaacaagcgagagcgccaccccggaatcctacgaacagctggctccccagccctgtgtaggcgagacattacacagcagcctgcccagagacagcgagctgttcgttccggaagagggctctagcgagaaggagagcgaggacgctcctaagaccagccctcctacccctggcaaacacggcctgagacaaacaggcgaggagaaggtcatggtgaccgtgcccgacaagaaccctccctgtccttgctgtggcacaagagtcaacagcgtgctgaacctcatcgagcacctgaaggtgtcccacggcaagagaggcgtgtgcttcagatgcgccaagtgcggcaaggagagaagcaactaccacagcgtcgtgtgccacttcaagaagtgcagaggccctgagaccgagaaggctcccgctggcgaatggatttgcgaggtgtgcaacagagacttcaccaccaagatcggcctgggccagcacaagcggttagctcaccctgctgtgagaaaccaggagagaatcgtggccagccagcccaaggagacaagcaacaggggcgctcacaagagatgctggaccaaggaggaagaggagctgctcatcagactggaggctcagttcgagggcaacaagaacatcaataagcttatcgccgagcacatcaccacaaagaccgccaagcagatcagcgacaagaggagactgctgtccagaaagcccgccgaggagcctagaatggaacctggtacatgtcaccacaccagaagagccgccgctagcctgagaaccgagcccgaaatgtctcaccacgctcaggccgaggacagagacaacggccctggcaggagacctcttcccggcagagctgctgctggaggcagaaccatggacgagatcaggagacaccccgataagggcaacggccagcagagacccacaaagcagaagtccgaggaacagctccaggcctactacaagaaaaccctggaggagagactgtccgcgggagctctgaacaccttccctagagccttcaaacaagtcatggagggcagagacatcaagctggtgatcaaccagaccgcccaggactgcttcggctgccttgagtctatcagccagatcaggaccgccacacgggataagaagtacaccgtcaccagagagaagcaccccaagaagcccttccagaaatggatgaagaagagggccatcaagaagggcaattacctgagattccagaggctgttctacctggacagaggcaagctggccaagatcatcctggacgacatcgagtgcctgagctgcgacatccctctgagcgagatctacagcgtgttcaagaccagatgggagaccaccggcagcttcaagtctctgggcgacttcaagacatacggcaaggccgacaacaccgccttcagagagctcatcaccgctaaggagatcgagaagaacgtgcaggagatgagcaagggcagcgctcctggccccgatggaattacactgggcgatgtggtgaagatggaccccgagttcagcagaacaatggagatcttcaacctgtggctcaccacaggcaagatccccgacatggtgagaggctgcagaaccgtgcttatccccaagagcagcgaccccgacagactgaaggatatcaacaactggagacccatcaccatcggcagcatcctgctgcggctgttcagccggattgtgaccgctagactgagcaaagcctgtcccctgaaccccagacagagaggcttcatcagagccgctggctgcagcgagaacctgaagctgctccagacaatcatctggagcgccaagagagagcacagacccctgggcgttgttttcgtggacatcgccaaggccttcgacaccgtgtcccatcagcacattatccacgccctgcagcagagggaggtcgaccctcatattgtgggcctggtgtccaacatgtacgagaacatctccacctatattacgaccaagagaaacacccacacagacaagatccagatccgggtcggcgtcaagcagggcgatcctatgtctcctctgctgttcaacctcgccatggaccctctgctctgcaagctcgaggagtctggaaagggctaccatagaggccaatcatcgatcaccgccatggccttcgccgacgacctggtgcttttaagcgacagctgggagaacatgaacaccaacatcaaaatcctggagacattctgcaaccttaccggcctgaaaacccagggccagaagtgtcatggcttctacatcaaacccaccaagaagagctacaccatcaacgactgcgccgcctggacaatcaacggcacccctctcaacatgatcgaccccggcgagtctgagaagtacctgggcctgcagttcgatccctggatcggcatcgctagaagcggcttgagcaccaagctggacttttggctccaacgcatagaccaggcccccctgaagcctcttcagaaactggacattttgaaaacttatacgatccccagactcatctacatcgccgaccactccgaggtcaagagcgctagactggaaaccctggaccagaaaatcagaaccgccgtcaaggaatggctgcacctgcccccttgcacatgcgacgctatcctgtacagcagcaccagggacggcggcttaggaatcaccaagttagccggcctcatccccagcgtgcaggctaggagactccacagaatcgcccagagcagcgacgacaccatgaagtgcttcatggagaaggaaaagatggagcagctgcacaagaagctgtggatccaagcgggcggagatcgtgagaacattcccagcatctgggaggcccctcccagctcagaacctcccaataacgtgtccaccaattctgaatgggaggctcccacccagaaggataagtttcccaagccctgcaactggcggaagaacgagttcaaaaaatggacaaagctggctagccagggcaggggcatcgtgaacttcgaaagggacaagattagcaaccactggatccagtactacagaagaatcccccacagaaagctcctcaccgccctccagttacgtgcaaacgtgtacccaaccagagaattcctggccagaggcagacaggaccagtacatcaaggcctgccggcactgcgatgccgataacgagagctgtgctcacatcatcggcaactgccccgtcacccaggacgccagaatcaagagacacaactacatctgcgagttacttctggaggaagccaagaagaaggattgggttgtgttcaaggagccccacatcagagactccaacaaggagctgtacaagccagacctcatcttcgtgaaggacggcagagccctggtggtggacgtcaccgtcagatacgaggctgctaagtccagccttgaggaggctgccgccgagaaagtgcggaagtacaagcacctggaaacagaggtcagacacctcaccaacgccaaggacgttaccttcgtgggcttccccctaggtgctagaggcaaatggcaccaggacaacttcaagctgcttaccgagctgggcctctccaagagccgacaggttaagatggccgagaccttcagcaccgtcgccctgttctcttctgtggacattgtgcacatgttcgcctccagagccagaaagagcatggtgatgtgataataggctgccttctgcggggcttgccttctggccatgcccttcttctctcccttgcacctgtacctcttggtctttgaataaagcctgagtaggaaggaccggtaaaaaaaaaaaaaaaaaaaaaaaaaaaaaaacgttgactaaaaaaaaaaaaaaaaaaaaaaaaaaaaaaaaaaaaaaaaaaaaaaaaaaaaaaaaaaaaaaaaaaaaaa

SEQ ID NO: 11255 - DNA, 6467 bp, synthetic construct
  source 1..6467: mol_type = other DNA
gaaataagagagaaaagaagagtaagaagaaatataagagaattcgccaccatggcccctaagaaaaagcggaaggtggacagaaagacaagactgtctgagcctccaaccctggccctgagactgaagccctacaagaccgccatccagcagctgagaagcgtcatcagagccctgaaggaaaataccaccgttacattcctgcctacacccagcctgatcctgcagacagtgcgcagccactgcgtgtctaagatcacatttaattctagctgcctgtatatcaccgacaagtctttccagcctaagaccatcaacaacagcacccctctgctgggcaactttatgtacctgacctccagcaaggacctgactaaattctacgtgcaagacatctccgatctgagcgccaagatctctatgtgcgcccctgatttcaacatggaattcagcagcgcctgtgtgcatggccaggacatcgtcagagagagcgagaacagcgctgtgcacgtggacctggacttcggcgtggtggctgatctgctcaaatggatcggcccccacaccagagtgaagcggaacgtgaagaaagccccttgtcctacaggcacagtgcagatcctggtgcacgccggaccacctgctatcaagttcatccttacaaacggcagcgagctggaattcaccgccaacaaccgggtgtccttccacggcgtgaaaaacatgcggattaacgtgcaactgaaaaatttttaccagaccctgctgaactgcgccgtgaccaagctgccctgcaccctcaggattgtgaccgagcacgacaccctgctgtacgtcgccagcagaaacggcctgttcgccgtggagaacttcctgaccgaggaaccctttcagcggggtgatcctttcgacaagaactacgtgggaaatagcggcaagagcagatccggctccgagactcctggaacaagcgagagcgctacacctgagggcagcaatatcagcggctctagctgcggcagccccaacagcgccgacaccagcagcgacttcaaggacctgtggaccaagctgaaggaatgccacgaccgggaagtgcagggactccaggtgaaggtcaccaaactcaagcaagaaagaatcctggacgcccagagactggaagaattcttcaccaagaaccagcagctgagagagcagcagaaagtgctgcacgagacaatcaaggttctggaagatagactgcgggccggcctgtgcgacagatgcgccgtgaccgaggaacacatgcgcaaaaagcagcaggagttcgagaacattagacagcaaaatctgaaattgatcacagagctgatgaacgagagaaacacactgcaggaggagaacaagaagctgagcgagcagctgcaacagaagatcgagaatgatcagcaacaccaggccgctgagctggaatgtgaagaggacgtgatccccgacagcccaatcacagctttcagcttttctggcgtgaacagactgaggcggaaggaaaacccccacgtgcggtacatcgagcagacccataccaagctggaacacagcgtgtgtgccaacgagatgagaaaggtgtccaagtcctccacccatccccagcacaaccctaacgaaaatgagatcctggtggctgatacctacgaccagtctcagagccctatggccaaggcccacggcaccagctcttatacccctgataagagctccttcaacctggccaccgtggtggccgagacactgggcctgggcgtgcaggaggaaagcgagacacagggcccaatgagccctctgggagatgagctgtaccactgcctggaaggcaaccacaagaaacagccttttgagtccggctccgagactcctggaacaagcgagagcgctacacctgagggcagccctaagagaaaggtgtccagcgccgagggcgctgccaaggaagagcctaaacggagaagcgccagactgagcgccaagccccccgccaaggtggaagccaagcctaagaaggccgccgctaaggacaagagcagcgataagaaagtccagaccaagggcaagcggggcgccaaaggcaaacaggccgaggtggccaaccaggagacaaaggaagatctgcctgctgagaacggcgaaaccaagaccgaggaatctccagcttctgacgaggccggagagaaggaggccaaaagcgacagcggctctgagacacctggaacaagcgagagcgccaccccggaatcctatgaacaacttgcaccacaaccgtgtgtgggagaaactttacattctagcctcccacgagacagtgaactgtttgtgcctgaagaggggagcagcgagaaggagagcgaggacgcgccaaaaacatctcctccgacgcctgggaaacatggtttggaacagactggggaggaaaaagtgatggtgactgttcctgacaaaaatccaccttgtccttgctgtggtacccgggtaaactctgtgttgaatctgattgaacatctgaaagtgtcacacgggaaaaggggggtttgttttcggtgtgcaaaatgtggaaaggaaaatagtaactatcacagtgttgtttgtcattttaagaaatgcaggggtccagagacggagaaagccccagctggggagtggatttgtgaggtatgcaacagagattttacaaccaaaattggcctgggacaacacaagagattggcacacccagcagtgagaaatcaggaaaggatcgttgcttcccaaccgaaagaaacatcaaatagaggtgctcacaaaaggtgctggacaaaggaggaggaagaattactaataagactggaggctcagttcgagggaaacaaaaatattaataagcttattgcagaacacataaccaccaaaacagctaagcagatcagtgacaaaaggcgattgctgtccagaaagccagcagaggagccacgtgaggagcctggaacgtgtcatcacaccaggagagcagctgcgagcctgagaacggagcctgagatgagtcatcacgcccaggcagaggacagagataatggacctgggagacgccctctgccaggcagggcagctgccggagggagaacaatggacgagataagacgccaccctgataagggcaacggacagcagagacccaccaagcaaaaatcagaagaacagctgcaggcttactataaaaagacactagaggaacgactttcagctggggcacttaacaccttcccccgagcattcaagcaggtaatggaaggccgggatataaagctagtaatcaatcagacagcgcaggactgcttcggatgcctggaatccataagccaaataagaacggcaacccgagataaaaaggacacggtgacccgggagaaacacccaaagaaaccttttcagaagtggatgaagaagagagcaatcaaaaaaggtaattatcttcggttccagcgtttattttatcttgatagagggaaactggctaaaatcattttagatgatattgaatgcttgtcttgtgacataccactcagtgaaatttattcggtttttaaaacaagatgggaaacaactggtagctttaaaagccttggggactttaaaacttacgggaaggctgacaacactgccttcagagaattaattacggctaaagaaattgagaaaaatgtgcaggaaatgagcaaaggctcggctcccggtccagacgggattactcttggggacgtcgtaaagatggatcccgagttttcccggaccatggagattttcaatttatggttaacaactggtaaaatcccggacatggtgagggggtgcagaaccgttttgattccaaaatcatcaaagccggatcgtttgaaagacattaataactggagacctatcacgatcggttccatcttgctgagactgttctccaggattgtaacagctaggctgagcaaagcgtgccccctgaacccaaggcaaagaggctttatcagagcggcgggatgctctgaaaacttaaaactcctgcaaactataatttggtcggccaaaagagaacacagaccactgggtgttgtattcgtggacatcgccaaggcttttgacaccgtaagccaccagcacatcattcatgctttgcagcaaagagaggtggatccccacatcgtcggtctggtgagcaatatgtacgagaacatcagtacgtatatcaccacaaagaggaacacacacacagacaaaatccagatccgggttggagtaaagcagggtgacccgatgtcgccccttttatttaacctggcaatggaccctctattatgcaagctggaagagagtggcaaaggataccaccgaggacagagcagcatcacagcgatggcatttgcagacgatctggttttgctgagcgactcctgggaaaatatgaatacaaatattagcatactggagaccttctgcaatctgaccggactcaaaacacaggggcaaaagtgccacggcttttacatcaagccgacaaagaagtcttacaccatcaatgactgcgctgcctggactatcaacggcacacccctgaacatgatcgaccccggcgaatctgagaaatacctcggcctgcagtttgacccgtggattggaatagcaaggtccggtctctccacaaaactagatttttggcttcagcggatcgatcaagcaccacttaaacctctgcagaaaactgatattctcaaaacatacaccatccctcggctgatctacatagctgaccactcagaagtgaaaagcgcactactcgaaacccttgaccagaagatccggacagcggtcaaggaatggcttcacctacctccgtgcacctgcgatgccatcctgtactcgagcacgagagacggcggtttgggcatcaccaaattggcaggactgatccccagcgtgcaggcccgtagactgcatcggatcgcacagtcatctgacgatacgatgaaatgcttcatggaaaaagagaaaatggaacagctgcataagaaattgtggattcaagctggaggggacagagagaacataccctcgatttgggaagcaccaccgtcgagtgaaccaccaaacaacgtgagcacaaattcggaatgggaagcaccgacccagaaagataaatttccaaagccttgcaattggaggaaaaacgaattcaaaaaatggaccaaattggcatcccaaggccgcggaattgtaaattttgaaagagacaaaattagtaaccattggatccaatactacagacgcatacctcacaggaaactcctcactgcactacaactcagggccaacgtttaccccacgagagaatttctagccaggggtagacaagaccaatacatcaaggcgtgtaggcactgcgatgcggacaacgaatcctgcgcccacatcatcggcaactgcccagtgacacaggacgcccgaatcaagaggcacaattacatctgcgaactgcttctcgaggaggcgaagaagaaggactgggtagtgttcaaggaaccgcacataagggattccaacaaggaactgtacaaacctgacctgatatttgtgaaggatgggcgtgcacttgtcgtggatgtgacagtacggtatgaagcagccaaatcatcgctggaggaagccgctgcagagaaagtgagaaagtacaaacacctggaaacggaagtaagacatctcacgaatgcaaaggacgttacttttgtgggctttcccctaggagcgcgggggaaatggcaccaagataactttaaacttttgactgagcttggcctctccaaatcgaggcaagtgaaaatggcagagactttttccacagtagcgctcttttcatctgtggacattgtacatatgtttgccagtagggccagaaaatctatggttatgagcggctctgagacacctggaacaagcgagagcgccaccccggaatctaccaaccccaagcctcagaaaaagaacaagcggaacaccaatagacggcctcaagacgtgaagttccccggcggcggacagatcgtgggcggagtctacctgctgcctcgcagaggcccaagactgggcgtgcgggccacaagaaagaccagcgagcggagccagcctagatctggcggctcaaaacggacagccgacggaagcgagttcgagtcaccaaagaagaagcggaaagtctgataataggctgccttctgcggggcttgccttctggccatgcccttcttctctcccttgcacctgtacctcttggtctttgaataaagcctgagtaggaaggaccggtaaaaaaaaaaaaaaaaaaaaaaaaaaaaaaacgttgactaaaaaaaaaaaaaaaaaaaaaaaaaaaaaaaaaaaaaaaaaaaaaaaaaaaaaaaaaaaaaaaaaaaaaa

SEQ ID NO: 11256 - DNA, 6449 bp, synthetic construct
  source 1..6449: mol_type = other DNA
gaaataagagagaaaagaagagtaagaagaaatataagagaattcgccaccatggccaaacggacagccgacggaagcgagttcgagtcaccaaagaagaagcggaaagtctctggcggctcatctaccaaccccaagcctcagaaaaagaacaagcggaacaccaatagacggcctcaagacgtgaagttccccggcggcggacagatcgtgggcggagtctacctgctgcctcgcagaggcccaagactgggcgtgcgggccacaagaaagaccagcgagcggagccagcctagaagcggctctgagacacctggaacaagcgagagcgccaccccggaatccgacagaaagacaagactgtctgagcctccaaccctggccctgagactgaagccctacaagaccgccatccagcagctgagaagcgtcatcagagccctgaaggaaaataccaccgttacattcctgcctacacccagcctgatcctgcagacagtgcgcagccactgcgtgtctaagatcacatttaattctagctgcctgtatatcaccgacaagtctttccagcctaagaccatcaacaacagcacccctctgctgggcaactttatgtacctgacctccagcaaggacctgactaaattctacgtgcaagacatctccgatctgagcgccaagatctctatgtgcgcccctgatttcaacatggaattcagcagcgcctgtgtgcatggccaggacatcgtcagagagagcgagaacagcgctgtgcacgtggacctggacttcggcgtggtggctgatctgctcaaatggatcggcccccacaccagagtgaagcggaacgtgaagaaagccccttgtcctacaggcacagtgcagatcctggtgcacgccggaccacctgctatcaagttcatccttacaaacggcagcgagctggaattcaccgccaacaaccgggtgtccttccacggcgtgaaaaacatgcggattaacgtgcaactgaaaaatttttaccagaccctgctgaactgcgccgtgaccaagctgccctgcaccctcaggattgtgaccgagcacgacaccctgctgtacgtcgccagcagaaacggcctgttcgccgtggagaacttcctgaccgaggaaccctttcagcggggtgatcctttcgacaagaactacgtgggaaatagcggcaagagcagatccggctccgagactcctggaacaagcgagagcgctacacctgagggcagcaatatcagcggctctagctgcggcagccccaacagcgccgacaccagcagcgacttcaaggacctgtggaccaagctgaaggaatgccacgaccgggaagtgcagggactccaggtgaaggtcaccaaactcaagcaagaaagaatcctggacgcccagagactggaagaattcttcaccaagaaccagcagctgagagagcagcagaaagtgctgcacgagacaatcaaggttctggaagatagactgcgggccggcctgtgcgacagatgcgccgtgaccgaggaacacatgcgcaaaaagcagcaggagttcgagaacattagacagcaaaatctgaaattgatcacagagctgatgaacgagagaaacacactgcaggaggagaacaagaagctgagcgagcagctgcaacagaagatcgagaatgatcagcaacaccaggccgctgagctggaatgtgaagaggacgtgatccccgacagcccaatcacagctttcagcttttctggcgtgaacagactgaggcggaaggaaaacccccacgtgcggtacatcgagcagacccataccaagctggaacacagcgtgtgtgccaacgagatgagaaaggtgtccaagtcctccacccatccccagcacaaccctaacgaaaatgagatcctggtggctgatacctacgaccagtctcagagccctatggccaaggcccacggcaccagctcttatacccctgataagagctccttcaacctggccaccgtggtggccgagacactgggcctgggcgtgcaggaggaaagcgagacacagggcccaatgagccctctgggagatgagctgtaccactgcctggaaggcaaccacaagaaacagccttttgagtccggctccgagactcctggaacaagcgagagcgctacacctgagggcagccctaagagaaaggtgtccagcgccgagggcgctgccaaggaagagcctaaacggagaagcgccagactgagcgccaagccccccgccaaggtggaagccaagcctaagaaggccgccgctaaggacaagagcagcgataagaaagtccagaccaagggcaagcggggcgccaaaggcaaacaggccgaggtggccaaccaggagacaaaggaagatctgcctgctgagaacggcgaaaccaagaccgaggaatctccagcttctgacgaggccggagagaaggaggccaaaagcgacagcggctctgagacacctggaacaagcgagagcgccaccccggaatcctatgaacaacttgcaccacaaccgtgtgtgggagaaactttacattctagcctcccacgagacagtgaactgtttgtgcctgaagaggggagcagcgagaaggagagcgaggacgcgccaaaaacatctcctccgacgcctgggaaacatggtttggaacagactggggaggaaaaagtgatggtgactgttcctgacaaaaatccaccttgtccttgctgtggtacccgggtaaactctgtgttgaatctgattgaacatctgaaagtgtcacacgggaaaaggggggtttgttttcggtgtgcaaaatgtggaaaggaaaatagtaactatcacagtgttgtttgtcattttaagaaatgcaggggtccagagacggagaaagccccagctggggagtggatttgtgaggtatgcaacagagattttacaaccaaaattggcctgggacaacacaagagattggcacacccagcagtgagaaatcaggaaaggatcgttgcttcccaaccgaaagaaacatcaaatagaggtgctcacaaaaggtgctggacaaaggaggaggaagaattactaataagactggaggctcagttcgagggaaacaaaaatattaataagcttattgcagaacacataaccaccaaaacagctaagcagatcagtgacaaaaggcgattgctgtccagaaagccagcagaggagccacgtgaggagcctggaacgtgtcatcacaccaggagagcagctgcgagcctgagaacggagcctgagatgagtcatcacgcccaggcagaggacagagataatggacctgggagacgccctctgccaggcagggcagctgccggagggagaacaatggacgagataagacgccaccctgataagggcaacggacagcagagacccaccaagcaaaaatcagaagaacagctgcaggcttactataaaaagacactagaggaacgactttcagctggggcacttaacaccttcccccgagcattcaagcaggtaatggaaggccgggatataaagctagtaatcaatcagacagcgcaggactgcttcggatgcctggaatccataagccaaataagaacggcaacccgagataaaaaggacacggtgacccgggagaaacacccaaagaaaccttttcagaagtggatgaagaagagagcaatcaaaaaaggtaattatcttcggttccagcgtttattttatcttgatagagggaaactggctaaaatcattttagatgatattgaatgcttgtcttgtgacataccactcagtgaaatttattcggtttttaaaacaagatgggaaacaactggtagctttaaaagccttggggactttaaaacttacgggaaggctgacaacactgccttcagagaattaattacggctaaagaaattgagaaaaatgtgcaggaaatgagcaaaggctcggctcccggtccagacgggattactcttggggacgtcgtaaagatggatcccgagttttcccggaccatggagattttcaatttatggttaacaactggtaaaatcccggacatggtgagggggtgcagaaccgttttgattccaaaatcatcaaagccggatcgtttgaaagacattaataactggagacctatcacgatcggttccatcttgctgagactgttctccaggattgtaacagctaggctgagcaaagcgtgccccctgaacccaaggcaaagaggctttatcagagcggcgggatgctctgaaaacttaaaactcctgcaaactataatttggtcggccaaaagagaacacagaccactgggtgttgtattcgtggacatcgccaaggcttttgacaccgtaagccaccagcacatcattcatgctttgcagcaaagagaggtggatccccacatcgtcggtctggtgagcaatatgtacgagaacatcagtacgtatatcaccacaaagaggaacacacacacagacaaaatccagatccgggttggagtaaagcagggtgacccgatgtcgccccttttatttaacctggcaatggaccctctattatgcaagctggaagagagtggcaaaggataccaccgaggacagagcagcatcacagcgatggcatttgcagacgatctggttttgctgagcgactcctgggaaaatatgaatacaaatattagcatactggagaccttctgcaatctgaccggactcaaaacacaggggcaaaagtgccacggcttttacatcaagccgacaaagaagtcttacaccatcaatgactgcgctgcctggactatcaacggcacacccctgaacatgatcgaccccggcgaatctgagaaatacctcggcctgcagtttgacccgtggattggaatagcaaggtccggtctctccacaaaactagatttttggcttcagcggatcgatcaagcaccacttaaacctctgcagaaaactgatattctcaaaacatacaccatccctcggctgatctacatagctgaccactcagaagtgaaaagcgcactactcgaaacccttgaccagaagatccggacagcggtcaaggaatggcttcacctacctccgtgcacctgcgatgccatcctgtactcgagcacgagagacggcggtttgggcatcaccaaattggcaggactgatccccagcgtgcaggcccgtagactgcatcggatcgcacagtcatctgacgatacgatgaaatgcttcatggaaaaagagaaaatggaacagctgcataagaaattgtggattcaagctggaggggacagagagaacataccctcgatttgggaagcaccaccgtcgagtgaaccaccaaacaacgtgagcacaaattcggaatgggaagcaccgacccagaaagataaatttccaaagccttgcaattggaggaaaaacgaattcaaaaaatggaccaaattggcatcccaaggccgcggaattgtaaattttgaaagagacaaaattagtaaccattggatccaatactacagacgcatacctcacaggaaactcctcactgcactacaactcagggccaacgtttaccccacgagagaatttctagccaggggtagacaagaccaatacatcaaggcgtgtaggcactgcgatgcggacaacgaatcctgcgcccacatcatcggcaactgcccagtgacacaggacgcccgaatcaagaggcacaattacatctgcgaactgcttctcgaggaggcgaagaagaaggactgggtagtgttcaaggaaccgcacataagggattccaacaaggaactgtacaaacctgacctgatatttgtgaaggatgggcgtgcacttgtcgtggatgtgacagtacggtatgaagcagccaaatcatcgctggaggaagccgctgcagagaaagtgagaaagtacaaacacctggaaacggaagtaagacatctcacgaatgcaaaggacgttacttttgtgggctttcccctaggagcgcgggggaaatggcaccaagataactttaaacttttgactgagcttggcctctccaaatcgaggcaagtgaaaatggcagagactttttccacagtagcgctcttttcatctgtggacattgtacatatgtttgccagtagggccagaaaatctatggttatgtgataataggctgccttctgcggggcttgccttctggccatgcccttcttctctcccttgcacctgtacctcttggtctttgaataaagcctgagtaggaaggaccggtaaaaaaaaaaaaaaaaaaaaaaaaaaaaaaacgttgactaaaaaaaaaaaaaaaaaaaaaaaaaaaaaaaaaaaaaaaaaaaaaaaaaaaaaaaaaaaaaaaaaaaaaa

SEQ ID NO: 11257 - DNA, 6182 bp, synthetic construct
  source 1..6182: mol_type = other DNA
gaaataagagagaaaagaagagtaagaagaaatataagagaattcgccaccatggcccctaagaaaaagcggaaggtggacagaaagacaagactgtctgagcctccaaccctggccctgagactgaagccctacaagaccgccatccagcagctgagaagcgtcatcagagccctgaaggaaaataccaccgttacattcctgcctacacccagcctgatcctgcagacagtgcgcagccactgcgtgtctaagatcacatttaattctagctgcctgtatatcaccgacaagtctttccagcctaagaccatcaacaacagcacccctctgctgggcaactttatgtacctgacctccagcaaggacctgactaaattctacgtgcaagacatctccgatctgagcgccaagatctctatgtgcgcccctgatttcaacatggaattcagcagcgcctgtgtgcatggccaggacatcgtcagagagagcgagaacagcgctgtgcacgtggacctggacttcggcgtggtggctgatctgctcaaatggatcggcccccacaccagagtgaagcggaacgtgaagaaagccccttgtcctacaggcacagtgcagatcctggtgcacgccggaccacctgctatcaagttcatccttacaaacggcagcgagctggaattcaccgccaacaaccgggtgtccttccacggcgtgaaaaacatgcggattaacgtgcaactgaaaaatttttaccagaccctgctgaactgcgccgtgaccaagctgccctgcaccctcaggattgtgaccgagcacgacaccctgctgtacgtcgccagcagaaacggcctgttcgccgtggagaacttcctgaccgaggaaccctttcagcggggtgatcctttcgacaagaactacgtgggaaatagcggcaagagcagatccggctccgagactcctggaacaagcgagagcgctacacctgagggcagcaatatcagcggctctagctgcggcagccccaacagcgccgacaccagcagcgacttcaaggacctgtggaccaagctgaaggaatgccacgaccgggaagtgcagggactccaggtgaaggtcaccaaactcaagcaagaaagaatcctggacgcccagagactggaagaattcttcaccaagaaccagcagctgagagagcagcagaaagtgctgcacgagacaatcaaggttctggaagatagactgcgggccggcctgtgcgacagatgcgccgtgaccgaggaacacatgcgcaaaaagcagcaggagttcgagaacattagacagcaaaatctgaaattgatcacagagctgatgaacgagagaaacacactgcaggaggagaacaagaagctgagcgagcagctgcaacagaagatcgagaatgatcagcaacaccaggccgctgagctggaatgtgaagaggacgtgatccccgacagcccaatcacagctttcagcttttctggcgtgaacagactgaggcggaaggaaaacccccacgtgcggtacatcgagcagacccataccaagctggaacacagcgtgtgtgccaacgagatgagaaaggtgtccaagtcctccacccatccccagcacaaccctaacgaaaatgagatcctggtggctgatacctacgaccagtctcagagccctatggccaaggcccacggcaccagctcttatacccctgataagagctccttcaacctggccaccgtggtggccgagacactgggcctgggcgtgcaggaggaaagcgagacacagggcccaatgagccctctgggagatgagctgtaccactgcctggaaggcaaccacaagaaacagccttttgagtccggctccgagactcctggaacaagcgagagcgctacacctgagggcagccctaagagaaaggtgtccagcgccgagggcgctgccaaggaagagcctaaacggagaagcgccagactgagcgccaagccccccgccaaggtggaagccaagcctaagaaggccgccgctaaggacaagagcagcgataagaaagtccagaccaagggcaagcggggcgccaaaggcaaacaggccgaggtggccaaccaggagacaaaggaagatctgcctgctgagaacggcgaaaccaagaccgaggaatctccagcttctgacgaggccggagagaaggaggccaaaagcgacagcggctctgagacacctggaacaagcgagagcgccaccccggaatcctatgaacaacttgcaccacaaccgtgtgtgggagaaactttacattctagcctcccacgagacagtgaactgtttgtgcctgaagaggggagcagcgagaaggagagcgaggacgcgccaaaaacatctcctccgacgcctgggaaacatggtttggaacagactggggaggaaaaagtgatggtgactgttcctgacaaaaatccaccttgtccttgctgtggtacccgggtaaactctgtgttgaatctgattgaacatctgaaagtgtcacacgggaaaaggggggtttgttttcggtgtgcaaaatgtggaaaggaaaatagtaactatcacagtgttgtttgtcattttaagaaatgcaggggtccagagacggagaaagccccagctggggagtggatttgtgaggtatgcaacagagattttacaaccaaaattggcctgggacaacacaagagattggcacacccagcagtgagaaatcaggaaaggatcgttgcttcccaaccgaaagaaacatcaaatagaggtgctcacaaaaggtgctggacaaaggaggaggaagaattactaataagactggaggctcagttcgagggaaacaaaaatattaataagcttattgcagaacacataaccaccaaaacagctaagcagatcagtgacaaaaggcgattgctgtccagaaagccagcagaggagccacgtgaggagcctggaacgtgtcatcacaccaggagagcagctgcgagcctgagaacggagcctgagatgagtcatcacgcccaggcagaggacagagataatggacctgggagacgccctctgccaggcagggcagctgccggagggagaacaatggacgagataagacgccaccctgataagggcaacggacagcagagacccaccaagcaaaaatcagaagaacagctgcaggcttactataaaaagacactagaggaacgactttcagctggggcacttaacaccttcccccgagcattcaagcaggtaatggaaggccgggatataaagctagtaatcaatcagacagcgcaggactgcttcggatgcctggaatccataagccaaataagaacggcaacccgagataaaaaggacacggtgacccgggagaaacacccaaagaaaccttttcagaagtggatgaagaagagagcaatcaaaaaaggtaattatcttcggttccagcgtttattttatcttgatagagggaaactggctaaaatcattttagatgatattgaatgcttgtcttgtgacataccactcagtgaaatttattcggtttttaaaacaagatgggaaacaactggtagctttaaaagccttggggactttaaaacttacgggaaggctgacaacactgccttcagagaattaattacggctaaagaaattgagaaaaatgtgcaggaaatgagcaaaggctcggctcccggtccagacgggattactcttggggacgtcgtaaagatggatcccgagttttcccggaccatggagattttcaatttatggttaacaactggtaaaatcccggacatggtgagggggtgcagaaccgttttgattccaaaatcatcaaagccggatcgtttgaaagacattaataactggagacctatcacgatcggttccatcttgctgagactgttctccaggattgtaacagctaggctgagcaaagcgtgccccctgaacccaaggcaaagaggctttatcagagcggcgggatgctctgaaaacttaaaactcctgcaaactataatttggtcggccaaaagagaacacagaccactgggtgttgtattcgtggacatcgccaaggcttttgacaccgtaagccaccagcacatcattcatgctttgcagcaaagagaggtggatccccacatcgtcggtctggtgagcaatatgtacgagaacatcagtacgtatatcaccacaaagaggaacacacacacagacaaaatccagatccgggttggagtaaagcagggtgacccgatgtcgccccttttatttaacctggcaatggaccctctattatgcaagctggaagagagtggcaaaggataccaccgaggacagagcagcatcacagcgatggcatttgcagacgatctggttttgctgagcgactcctgggaaaatatgaatacaaatattagcatactggagaccttctgcaatctgaccggactcaaaacacaggggcaaaagtgccacggcttttacatcaagccgacaaaggactcttacaccatcaatgactgcgctgcctggactatcaacggcacacccctgaacatgatcgaccccggcgaatctgagaaatacctcggcctgcagtttgacccgtggattggaatagcaaggtccggtctctccacaaaactagatttttggcttcagcggatcgatcaagcaccacttaaacctctgcagaaaactgatattctcaaaacatacaccatccctcggctgatctacatagctgaccactcagaagtgaaaagcgcactactcgaaacccttgaccagaagatccggacagcggtcaaggaatggcttcacctacctccgtgcacctgcgatgccatcctgtactcgagcacgagagacggcggtttgggcatcaccaaattggcaggactgatccccagcgtgcaggcccgtagactgcatcggatcgcacagtcatctgacgatacgatgaaatgcttcatggaaaaagagaaaatggaacagctgcataagaaattgtggattcaagctggaggggacagagagaacataccctcgatttgggaagcaccaccgtcgagtgaaccaccaaacaacgtgagcacaaattcggaatgggaagcaccgacccagaaagataaatttccaaagccttgcaattggaggaaaaacgaattcaaaaaatggaccaaattggcatcccaaggccgcggaattgtaaattttgaaagagacaaaattagtaaccattggatccaatactacagacgcatacctcacaggaaactcctcactgcactacaactcagggccaacgtttaccccacgagagaatttctagccaggggtagacaagaccaatacatcaaggcgtgtaggcactgcgatgcggacaacgaatcctgcgcccacatcatcggcaactgcccagtgacacaggacgcccgaatcaagaggcacaattacatctgcgaactgcttctcgaggaggcgaagaagaaggactgggtagtgttcaaggaaccgcacataagggattccaacaaggaactgtacaaacctgacctgatatttgtgaaggatgggcgtgcacttgtcgtggatgtgacagtacggtatgaagcagccaaatcatcgctggaggaagccgctgcagagaaagtgagaaagtacaaacacctggaaacggaagtaagacatctcacgaatgcaaaggacgttacttttgtgggctttcccctaggagcggccgggaaatggcaccaagataactttaaacttttgactgagcttggcctctccaaatcgaggcaagtgaaaatggcagagactttttccacagtagcgctcttttcatctgtggacattgtacatatgtttgccagtagggccagaaaatctatggttatgtgataataggctgccttctgcggggcttgccttctggccatgcccttcttctctcccttgcacctgtacctcttggtctttgaataaagcctgagtaggaaggaccggtaaaaaaaaaaaaaaaaaaaaaaaaaaaaaaacgttgactaaaaaaaaaaaaaaaaaaaaaaaaaaaaaaaaaaaaaaaaaaaaaaaaaaaaaaaaaaaaaaaaaaaaaa

SEQ ID NO: 11258 - DNA, 5264 bp, synthetic construct
  source 1..5264: mol_type = other DNA
gaaataagagagaaaagaagagtaagaagaaatataagagaattcgccaccatggcccctaagaaaaagcggaaggtgaatatcagcggctctagctgcggcagccccaacagcgccgacaccagcagcgacttcaaggacctgtggaccaagctgaaggaatgccacgaccgggaagtgcagggactccaggtgaaggtcaccaaactcaagcaagaaagaatcctggacgcccagagactggaagaattcttcaccaagaaccagcagctgagagagcagcagaaagtgctgcacgagacaatcaaggttctggaagatagactgcgggccggcctgtgcgacagatgcgccgtgaccgaggaacacatgcgcaaaaagcagcaggagttcgagaacattagacagcaaaatctgaaattgatcacagagctgatgaacgagagaaacacactgcaggaggagaacaagaagctgagcgagcagctgcaacagaagatcgagaatgatcagcaacaccaggccgctgagctggaatgtgaagaggacgtgatccccgacagcccaatcacagctttcagcttttctggcgtgaacagactgaggcggaaggaaaacccccacgtgcggtacatcgagcagacccataccaagctggaacacagcgtgtgtgccaacgagatgagaaaggtgtccaagtcctccacccatccccagcacaaccctaacgaaaatgagatcctggtggctgatacctacgaccagtctcagagccctatggccaaggcccacggcaccagctcttatacccctgataagagctccttcaacctggccaccgtggtggccgagacactgggcctgggcgtgcaggaggaaagcgagacacagggcccaatgagccctctgggagatgagctgtaccactgcctggaaggcaaccacaagaaacagccttttgagtccggctccgagactcctggaacaagcgagagcgctacacctgagggcagccctaagagaaaggtgtccagcgccgagggcgctgccaaggaagagcctaaacggagaagcgccagactgagcgccaagccccccgccaaggtggaagccaagcctaagaaggccgccgctaaggacaagagcagcgataagaaagtccagaccaagggcaagcggggcgccaaaggcaaacaggccgaggtggccaaccaggagacaaaggaagatctgcctgctgagaacggcgaaaccaagaccgaggaatctccagcttctgacgaggccggagagaaggaggccaaaagcgacagcggctctgagacacctggaacaagcgagagcgccaccccggaatcctatgaacaacttgcaccacaaccgtgtgtgggagaaactttacattctagcctcccacgagacagtgaactgtttgtgcctgaagaggggagcagcgagaaggagagcgaggacgcgccaaaaacatctcctccgacgcctgggaaacatggtttggaacagactggggaggaaaaagtgatggtgactgttcctgacaaaaatccaccttgtccttgctgtggtacccgggtaaactctgtgttgaatctgattgaacatctgaaagtgtcacacgggaaaaggggggtttgttttcggtgtgcaaaatgtggaaaggaaaatagtaactatcacagtgttgtttgtcattttaagaaatgcaggggtccagagacggagaaagccccagctggggagtggatttgtgaggtatgcaacagagattttacaaccaaaattggcctgggacaacacaagagattggcacacccagcagtgagaaatcaggaaaggatcgttgcttcccaaccgaaagaaacatcaaatagaggtgctcacaaaaggtgctggacaaaggaggaggaagaattactaataagactggaggctcagttcgagggaaacaaaaatattaataagcttattgcagaacacataaccaccaaaacagctaagcagatcagtgacaaaaggcgattgctgtccagaaagccagcagaggagccacgtgaggagcctggaacgtgtcatcacaccaggagagcagctgcgagcctgagaacggagcctgagatgagtcatcacgcccaggcagaggacagagataatggacctgggagacgccctctgccaggcagggcagctgccggagggagaacaatggacgagataagacgccaccctgataagggcaacggacagcagagacccaccaagcaaaaatcagaagaacagctgcaggcttactataaaaagacactagaggaacgactttcagctggggcacttaacaccttcccccgagcattcaagcaggtaatggaaggccgggatataaagctagtaatcaatcagacagcgcaggactgcttcggatgcctggaatccataagccaaataagaacggcaacccgagataaaaaggacacggtgacccgggagaaacacccaaagaaaccttttcagaagtggatgaagaagagagcaatcaaaaaaggtaattatcttcggttccagcgtttattttatcttgatagagggaaactggctaaaatcattttagatgatattgaatgcttgtcttgtgacataccactcagtgaaatttattcggtttttaaaacaagatgggaaacaactggtagctttaaaagccttggggactttaaaacttacgggaaggctgacaacactgccttcagagaattaattacggctaaagaaattgagaaaaatgtgcaggaaatgagcaaaggctcggctcccggtccagacgggattactcttggggacgtcgtaaagatggatcccgagttttcccggaccatggagattttcaatttatggttaacaactggtaaaatcccggacatggtgagggggtgcagaaccgttttgattccaaaatcatcaaagccggatcgtttgaaagacattaataactggagacctatcacgatcggttccatcttgctgagactgttctccaggattgtaacagctaggctgagcaaagcgtgccccctgaacccaaggcaaagaggctttatcagagcggcgggatgctctgaaaacttaaaactcctgcaaactataatttggtcggccaaaagagaacacagaccactgggtgttgtattcgtggacatcgccaaggcttttgacaccgtaagccaccagcacatcattcatgctttgcagcaaagagaggtggatccccacatcgtcggtctggtgagcaatatgtacgagaacatcagtacgtatatcaccacaaagaggaacacacacacagacaaaatccagatccgggttggagtaaagcagggtgacccgatgtcgccccttttatttaacctggcaatggaccctctattatgcaagctggaagagagtggcaaaggataccaccgaggacagagcagcatcacagcgatggcatttgcagacgatctggttttgctgagcgactcctgggaaaatatgaatacaaatattagcatactggagaccttctgcaatctgaccggactcaaaacacaggggcaaaagtgccacggcttttacatcaagccgacaaaggactcttacaccatcaatgactgcgctgcctggactatcaacggcacacccctgaacatgatcgaccccggcgaatctgagaaatacctcggcctgcagtttgacccgtggattggaatagcaaggtccggtctctccacaaaactagatttttggcttcagcggatcgatcaagcaccacttaaacctctgcagaaaactgatattctcaaaacatacaccatccctcggctgatctacatagctgaccactcagaagtgaaaagcgcactactcgaaacccttgaccagaagatccggacagcggtcaaggaatggcttcacctacctccgtgcacctgcgatgccatcctgtactcgagcacgagagacggcggtttgggcatcaccaaattggcaggactgatccccagcgtgcaggcccgtagactgcatcggatcgcacagtcatctgacgatacgatgaaatgcttcatggaaaaagagaaaatggaacagctgcataagaaattgtggattcaagctggaggggacagagagaacataccctcgatttgggaagcaccaccgtcgagtgaaccaccaaacaacgtgagcacaaattcggaatgggaagcaccgacccagaaagataaatttccaaagccttgcaattggaggaaaaacgaattcaaaaaatggaccaaattggcatcccaaggccgcggaattgtaaattttgaaagagacaaaattagtaaccattggatccaatactacagacgcatacctcacaggaaactcctcactgcactacaactcagggccaacgtttaccccacgagagaatttctagccaggggtagacaagaccaatacatcaaggcgtgtaggcactgcgatgcggacaacgaatcctgcgcccacatcatcggcaactgcccagtgacacaggacgcccgaatcaagaggcacaattacatctgcgaactgcttctcgaggaggcgaagaagaaggactgggtagtgttcaaggaaccgcacataagggattccaacaaggaactgtacaaacctgacctgatatttgtgaaggatgggcgtgcacttgtcgtggatgtgacagtacggtatgaagcagccaaatcatcgctggaggaagccgctgcagagaaagtgagaaagtacaaacacctggaaacggaagtaagacatctcacgaatgcaaaggacgttacttttgtgggctttcccctaggagcggccgggaaatggcaccaagataactttaaacttttgactgagcttggcctctccaaatcgaggcaagtgaaaatggcagagactttttccacagtagcgctcttttcatctgtggacattgtacatatgtttgccagtagggccagaaaatctatggttatgtgataataggctgccttctgcggggcttgccttctggccatgcccttcttctctcccttgcacctgtacctcttggtctttgaataaagcctgagtaggaaggaccggtaaaaaaaaaaaaaaaaaaaaaaaaaaaaaaacgttgactaaaaaaaaaaaaaaaaaaaaaaaaaaaaaaaaaaaaaaaaaaaaaaaaaaaaaaaaaaaaaaaaaaaaaa

SEQ ID NO: 11259 - DNA, 6413 bp, synthetic construct
  source 1..6413: mol_type = other DNA
gaaataagagagaaaagaagagtaagaagaaatataagagaattcgccaccatggcccctaagaaaaagcggaaggtgtggaagcctggagatgagtgcttcgccctgtactgggaggacaacaagttttatagagccgaggtggaagctctgcactctagcggcatgaccgccgtggtgaaattcatcgactacggcaattacgaggaagtcctgctgagcaacatcaagcccatccagacagaggcctgggaagagtccggctccgagactcctggaacaagcgagagcgctacacctgagggcagcgacagaaagacaagactgtctgagcctccaaccctggccctgagactgaagccctacaagaccgccatccagcagctgagaagcgtcatcagagccctgaaggaaaataccaccgttacattcctgcctacacccagcctgatcctgcagacagtgcgcagccactgcgtgtctaagatcacatttaattctagctgcctgtatatcaccgacaagtctttccagcctaagaccatcaacaacagcacccctctgctgggcaactttatgtacctgacctccagcaaggacctgactaaattctacgtgcaagacatctccgatctgagcgccaagatctctatgtgcgcccctgatttcaacatggaattcagcagcgcctgtgtgcatggccaggacatcgtcagagagagcgagaacagcgctgtgcacgtggacctggacttcggcgtggtggctgatctgctcaaatggatcggcccccacaccagagtgaagcggaacgtgaagaaagccccttgtcctacaggcacagtgcagatcctggtgcacgccggaccacctgctatcaagttcatccttacaaacggcagcgagctggaattcaccgccaacaaccgggtgtccttccacggcgtgaaaaacatgcggattaacgtgcaactgaaaaatttttaccagaccctgctgaactgcgccgtgaccaagctgccctgcaccctcaggattgtgaccgagcacgacaccctgctgtacgtcgccagcagaaacggcctgttcgccgtggagaacttcctgaccgaggaaccctttcagcggggtgatcctttcgacaagaactacgtgggaaatagcggcaagagcagatccggctccgagactcctggaacaagcgagagcgctacacctgagggcagcaatatcagcggctctagctgcggcagccccaacagcgccgacaccagcagcgacttcaaggacctgtggaccaagctgaaggaatgccacgaccgggaagtgcagggactccaggtgaaggtcaccaaactcaagcaagaaagaatcctggacgcccagagactggaagaattcttcaccaagaaccagcagctgagagagcagcagaaagtgctgcacgagacaatcaaggttctggaagatagactgcgggccggcctgtgcgacagatgcgccgtgaccgaggaacacatgcgcaaaaagcagcaggagttcgagaacattagacagcaaaatctgaaattgatcacagagctgatgaacgagagaaacacactgcaggaggagaacaagaagctgagcgagcagctgcaacagaagatcgagaatgatcagcaacaccaggccgctgagctggaatgtgaagaggacgtgatccccgacagcccaatcacagctttcagcttttctggcgtgaacagactgaggcggaaggaaaacccccacgtgcggtacatcgagcagacccataccaagctggaacacagcgtgtgtgccaacgagatgagaaaggtgtccaagtcctccacccatccccagcacaaccctaacgaaaatgagatcctggtggctgatacctacgaccagtctcagagccctatggccaaggcccacggcaccagctcttatacccctgataagagctccttcaacctggccaccgtggtggccgagacactgggcctgggcgtgcaggaggaaagcgagacacagggcccaatgagccctctgggagatgagctgtaccactgcctggaaggcaaccacaagaaacagccttttgagtccggctccgagactcctggaacaagcgagagcgctacacctgagggcagccctaagagaaaggtgtccagcgccgagggcgctgccaaggaagagcctaaacggagaagcgccagactgagcgccaagccccccgccaaggtggaagccaagcctaagaaggccgccgctaaggacaagagcagcgataagaaagtccagaccaagggcaagcggggcgccaaaggcaaacaggccgaggtggccaaccaggagacaaaggaagatctgcctgctgagaacggcgaaaccaagaccgaggaatctccagcttctgacgaggccggagagaaggaggccaaaagcgacagcggctctgagacacctggaacaagcgagagcgccaccccggaatcctatgaacaacttgcaccacaaccgtgtgtgggagaaactttacattctagcctcccacgagacagtgaactgtttgtgcctgaagaggggagcagcgagaaggagagcgaggacgcgccaaaaacatctcctccgacgcctgggaaacatggtttggaacagactggggaggaaaaagtgatggtgactgttcctgacaaaaatccaccttgtccttgctgtggtacccgggtaaactctgtgttgaatctgattgaacatctgaaagtgtcacacgggaaaaggggggtttgttttcggtgtgcaaaatgtggaaaggaaaatagtaactatcacagtgttgtttgtcattttaagaaatgcaggggtccagagacggagaaagccccagctggggagtggatttgtgaggtatgcaacagagattttacaaccaaaattggcctgggacaacacaagagattggcacacccagcagtgagaaatcaggaaaggatcgttgcttcccaaccgaaagaaacatcaaatagaggtgctcacaaaaggtgctggacaaaggaggaggaagaattactaataagactggaggctcagttcgagggaaacaaaaatattaataagcttattgcagaacacataaccaccaaaacagctaagcagatcagtgacaaaaggcgattgctgtccagaaagccagcagaggagccacgtgaggagcctggaacgtgtcatcacaccaggagagcagctgcgagcctgagaacggagcctgagatgagtcatcacgcccaggcagaggacagagataatggacctgggagacgccctctgccaggcagggcagctgccggagggagaacaatggacgagataagacgccaccctgataagggcaacggacagcagagacccaccaagcaaaaatcagaagaacagctgcaggcttactataaaaagacactagaggaacgactttcagctggggcacttaacaccttcccccgagcattcaagcaggtaatggaaggccgggatataaagctagtaatcaatcagacagcgcaggactgcttcggatgcctggaatccataagccaaataagaacggcaacccgagataaaaaggacacggtgacccgggagaaacacccaaagaaaccttttcagaagtggatgaagaagagagcaatcaaaaaaggtaattatcttcggttccagcgtttattttatcttgatagagggaaactggctaaaatcattttagatgatattgaatgcttgtcttgtgacataccactcagtgaaatttattcggtttttaaaacaagatgggaaacaactggtagctttaaaagccttggggactttaaaacttacgggaaggctgacaacactgccttcagagaattaattacggctaaagaaattgagaaaaatgtgcaggaaatgagcaaaggctcggctcccggtccagacgggattactcttggggacgtcgtaaagatggatcccgagttttcccggaccatggagattttcaatttatggttaacaactggtaaaatcccggacatggtgagggggtgcagaaccgttttgattccaaaatcatcaaagccggatcgtttgaaagacattaataactggagacctatcacgatcggttccatcttgctgagactgttctccaggattgtaacagctaggctgagcaaagcgtgccccctgaacccaaggcaaagaggctttatcagagcggcgggatgctctgaaaacttaaaactcctgcaaactataatttggtcggccaaaagagaacacagaccactgggtgttgtattcgtggacatcgccaaggcttttgacaccgtaagccaccagcacatcattcatgctttgcagcaaagagaggtggatccccacatcgtcggtctggtgagcaatatgtacgagaacatcagtacgtatatcaccacaaagaggaacacacacacagacaaaatccagatccgggttggagtaaagcagggtgacccgatgtcgccccttttatttaacctggcaatggaccctctattatgcaagctggaagagagtggcaaaggataccaccgaggacagagcagcatcacagcgatggcatttgcagacgatctggttttgctgagcgactcctgggaaaatatgaatacaaatattagcatactggagaccttctgcaatctgaccggactcaaaacacaggggcaaaagtgccacggcttttacatcaagccgacaaaggactcttacaccatcaatgactgcgctgcctggactatcaacggcacacccctgaacatgatcgaccccggcgaatctgagaaatacctcggcctgcagtttgacccgtggattggaatagcaaggtccggtctctccacaaaactagatttttggcttcagcggatcgatcaagcaccacttaaacctctgcagaaaactgatattctcaaaacatacaccatccctcggctgatctacatagctgaccactcagaagtgaaaagcgcactactcgaaacccttgaccagaagatccggacagcggtcaaggaatggcttcacctacctccgtgcacctgcgatgccatcctgtactcgagcacgagagacggcggtttgggcatcaccaaattggcaggactgatccccagcgtgcaggcccgtagactgcatcggatcgcacagtcatctgacgatacgatgaaatgcttcatggaaaaagagaaaatggaacagctgcataagaaattgtggattcaagctggaggggacagagagaacataccctcgatttgggaagcaccaccgtcgagtgaaccaccaaacaacgtgagcacaaattcggaatgggaagcaccgacccagaaagataaatttccaaagccttgcaattggaggaaaaacgaattcaaaaaatggaccaaattggcatcccaaggccgcggaattgtaaattttgaaagagacaaaattagtaaccattggatccaatactacagacgcatacctcacaggaaactcctcactgcactacaactcagggccaacgtttaccccacgagagaatttctagccaggggtagacaagaccaatacatcaaggcgtgtaggcactgcgatgcggacaacgaatcctgcgcccacatcatcggcaactgcccagtgacacaggacgcccgaatcaagaggcacaattacatctgcgaactgcttctcgaggaggcgaagaagaaggactgggtagtgttcaaggaaccgcacataagggattccaacaaggaactgtacaaacctgacctgatatttgtgaaggatgggcgtgcacttgtcgtggatgtgacagtacggtatgaagcagccaaatcatcgctggaggaagccgctgcagagaaagtgagaaagtacaaacacctggaaacggaagtaagacatctcacgaatgcaaaggacgttacttttgtgggctttcccctaggagcgcgggggaaatggcaccaagataactttaaacttttgactgagcttggcctctccaaatcgaggcaagtgaaaatggcagagactttttccacagtagcgctcttttcatctgtggacattgtacatatgtttgccagtagggccagaaaatctatggttatgtgataataggctgccttctgcggggcttgccttctggccatgcccttcttctctcccttgcacctgtacctcttggtctttgaataaagcctgagtaggaaggaccggtaaaaaaaaaaaaaaaaaaaaaaaaaaaaaaacgttgactaaaaaaaaaaaaaaaaaaaaaaaaaaaaaaaaaaaaaaaaaaaaaaaaaaaaaaaaaaaaaaaaaaaaaa

SEQ ID NO: 11260 - skipped

SEQ ID NO: 11261 - DNA, 6182 bp, synthetic construct
  source 1..6182: mol_type = other DNA
gaaataagagagaaaagaagagtaagaagaaatataagagaattcgccaccatggcccctaagaaaaagcggaaggtggacagaaagacaagactgtctgagcctccaaccctggccctgagactgaagccctacaagaccgccatccagcagctgagaagcgtcatcagagccctgaaggaaaataccaccgttacattcctgcctacacccagcctgatcctgcagacagtgcgcagccactgcgtgtctaagatcacatttaattctagctgcctgtatatcaccgacaagtctttccagcctaagaccatcaacaacagcacccctctgctgggcaactttatgtacctgacctccagcaaggacctgactaaattctacgtgcaagacatctccgatctgagcgccaagatctctatgtgcgcccctgatttcaacatggaattcagcagcgcctgtgtgcatggccaggacatcgtcagagagagcgagaacagcgctgtgcacgtggacctggacttcggcgtggtggctgatctgctcaaatggatcggcccccacaccagagtgaagcggaacgtgaagaaagccccttgtcctacaggcacagtgcagatcctggtgcacgccggaccacctgctatcaagttcatccttacaaacggcagcgagctggaattcaccgccaacaaccgggtgtccttccacggcgtgaaaaacatgcggattaacgtgcaactgaaaaatttttaccagaccctgctgaactgcgccgtgaccaagctgccctgcaccctcaggattgtgaccgagcacgacaccctgctgtacgtcgccagcagaaacggcctgttcgccgtggagaacttcctgaccgaggaaccctttcagcggggtgatcctttcgacaagaactacgtgggaaatagcggcaagagcagatccggctccgagactcctggaacaagcgagagcgctacacctgagggcagcaatatcagcggctctagctgcggcagccccaacagcgccgacaccagcagcgacttcaaggacctgtggaccaagctgaaggaatgccacgaccgggaagtgcagggactccaggtgaaggtcaccaaactcaagcaagaaagaatcctggacgcccagagactggaagaattcttcaccaagaaccagcagctgagagagcagcagaaagtgctgcacgagacaatcaaggttctggaagatagactgcgggccggcctgtgcgacagatgcgccgtgaccgaggaacacatgcgcaaaaagcagcaggagttcgagaacattagacagcaaaatctgaaattgatcacagagctgatgaacgagagaaacacactgcaggaggagaacaagaagctgagcgagcagctgcaacagaagatcgagaatgatcagcaacaccaggccgctgagctggaatgtgaagaggacgtgatccccgacagcccaatcacagctttcagcttttctggcgtgaacagactgaggcggaaggaaaacccccacgtgcggtacatcgagcagacccataccaagctggaacacagcgtgtgtgccaacgagatgagaaaggtgtccaagtcctccacccatccccagcacaaccctaacgaaaatgagatcctggtggctgatacctacgaccagtctcagagccctatggccaaggcccacggcaccagctcttatacccctgataagagctccttcaacctggccaccgtggtggccgagacactgggcctgggcgtgcaggaggaaagcgagacacagggcccaatgagccctctgggagatgagctgtaccactgcctggaaggcaaccacaagaaacagccttttgagtccggctccgagactcctggaacaagcgagagcgctacacctgagggcagccctaagagaaaggtgtccagcgccgagggcgctgccaaggaagagcctaaacggagaagcgccagactgagcgccaagccccccgccaaggtggaagccaagcctaagaaggccgccgctaaggacaagagcagcgataagaaagtccagaccaagggcaagcggggcgccaaaggcaaacaggccgaggtggccaaccaggagacaaaggaagatctgcctgctgagaacggcgaaaccaagaccgaggaatctccagcttctgacgaggccggagagaaggaggccaaaagcgacagcggctctgagacacctggaacaagcgagagcgccaccccggaatcctatgaacaacttgcaccacaaccgtgtgtgggagaaactttacattctagcctcccacgagacagtgaactgtttgtgcctgaagaggggagcagcgagaaggagagcgaggacgcgccaaaaacatctcctccgacgcctgggaaacatggtttggaacagactggggaggaaaaagtgatggtgactgttcctgacaaaaatccaccttgtccttgctgtggtacccgggtaaactctgtgttgaatctgattgaacatctgaaagtgtcacacgggaaaaggggggtttgttttcggtgtgcaaaatgtggaaaggaaaatagtaactatcacagtgttgtttgtcattttaagaaatgcaggggtccagagacggagaaagccccagctggggagtggatttgtgaggtatgcaacagagattttacaaccaaaattggcctgggacaacacaagagattggcacacccagcagtgagaaatcaggaaaggatcgttgcttcccaaccgaaagaaacatcaaatagaggtgctcacaaaaggtgctggacaaaggaggaggaagaattactaataagactggaggctcagttcgagggaaacaaaaatattaataagcttattgcagaacacataaccaccaaaacagctaagcagatcagtgacaaaaggcgattgctgtccagaaagccagcagaggagccacgtgaggagcctggaacgtgtcatcacaccaggagagcagctgcgagcctgagaacggagcctgagatgagtcatcacgcccaggcagaggacagagataatggacctgggagacgccctctgccaggcagggcagctgccggagggagaacaatggacgagataagacgccaccctgataagggcaacggacagcagagacccaccaagcaaaaatcagaagaacagctgcaggcttactataaaaagacactagaggaacgactttcagctggggcacttaacaccttcccccgagcattcaagcaggtaatggaaggccgggatataaagctagtaatcaatcagacagcgcaggactgcttcggatgcctggaatccataagccaaataagaacggcaacccgagataaaaaggacacggtgacccgggagaaacacccaaagaaaccttttcagaagtggatgaagaagagagcaatcaaaaaaggtaattatcttcggttccagcgtttatttcaccttgatagagggaaactggctaaaatcattttagatgatattgaatgcttgtcttgtgacataccactcagtgaaatttattcggtttttaaaacaagatgggaaacaactggtagctttaaaagccttggggactttaaaacttacgggaaggctgacaacactgccttcagagaattaattacggctaaagaaattgagaaaaatgtgcaggaaatgagcaaaggctcggctcccggtccagacgggattactcttggggacagagtaaagatggatcccgagttttcccggaccatggagattttcaatttatggttaacaactggtaaaatcccggacatggtgagggggtgcagaaccgttttgattccaaaatcatcaaagccggatcgtttgaaagacattaataactggagacctatcacgatcggttccatcttgctgagactgttctccaggattgtaacagctaggctgagcaaagcgtgccccctgaacccaaggcaaagaggctttatcagagcggcgggatgctctgaaaacttaaaactcctgcaaactataatttggtcggccaaaagagaacacagaccactgggtgttgtattcgtggacatcgccaaggcttttgacaccgtaagccaccagcacatcattcatgctttgcagcaaagagaggtggatccccacatcgtcggtctggtgagcaatatgtacgagaacatcagtacgtatatcaccacaaagaggaacacacacacagacaaaatccagatccgggttggagtaaagcagggtgacccgatgtcgccccttttatttaacctggcaatggaccctctattatgcaagctggaagagagtggcaaaggataccaccgaggacagagcagcatcacagcgatggcatttgcagacgatctggttttgctgagcgactcctgggaaaatatgaatacaaatattagcatactggagaccttctgcaatctgaccggactcaaaacacaggggcaaaagtgccacggcttttacatcaagccgacaaagaagtcttacaccatcaatgactgcgctgcctggactatcaacggcacacccctgaacatgatcgaccccggcgaatctgagaaatacctcggcctgcagtttgacccgtggattggaatagcaaggtccggtctctccacaaaactagatttttggcttcagcggatcgatcaagcaccacttaaacctctgcagaaaactgatattctcaaaacatacaccatccctcggctgatctacatagctgaccactcagaagtgaaaagcgcactactcgaaacccttgaccagaagatccggacagcggtcaaggaatggcttcacctacctccgtgcacctgcgatgccatcctgtactcgagcacgagagacggcggtttgggcatcaccaaattggcaggactgatccccagcgtgcaggcccgtagactgcatcggatcgcacagtcatctgacgatacgatgaaatgcttcatggaaaaagagaaaatggaacagctgcataagaaattgtggattcaagctggaggggacagagagaacataccctcgatttgggaagcaccaccgtcgagtgaaccaccaaacaacgtgagcacaaattcggaatgggaagcaccgacccagaaagataaatttccaaagccttgcaattggaggaaaaacgaattcaaaaaatggaccaaattggcatcccaaggccgcggaattgtaaattttgaaagagacaaaattagtaaccattggatccaatactacagacgcatacctcacaggaaactcctcactgcactacaactcagggccaacgtttaccccacgagagaatttctagccaggggtagacaagaccaatacatcaaggcgtgtaggcactgcgatgcggacaacgaatcctgcgcccacatcatcggcaactgcccagtgacacaggacgcccgaatcaagaggcacaattacatctgcgaactgcttctcgaggaggcgaagaagaaggactgggtagtgttcaaggaaccgcacataagggattccaacaaggaactgtacaaacctgacctgatatttgtgaaggatgggcgtgcacttgtcgtggatgtgacagtacggtatgaagcagccaaatcatcgctggaggaagccgctgcagagaaagtgagaaagtacaaacacctggaaacggaagtaagacatctcacgaatgcaaaggacgttacttttgtgggctttcccctaggagcgcgggggaaatggcaccaagataactttaaacttttgactgagcttggcctctccaaatcgaggcaagtgaaaatggcagagactttttccacagtagcgctcttttcatctgtggacattgtacatatgtttgccagtagggccagaaaatctatggttatgtgataataggctgccttctgcggggcttgccttctggccatgcccttcttctctcccttgcacctgtacctcttggtctttgaataaagcctgagtaggaaggaccggtaaaaaaaaaaaaaaaaaaaaaaaaaaaaaaacgttgactaaaaaaaaaaaaaaaaaaaaaaaaaaaaaaaaaaaaaaaaaaaaaaaaaaaaaaaaaaaaaaaaaaaaaa

SEQ ID NO: 11262 - DNA, 6182 bp, synthetic construct
  source 1..6182: mol_type = other DNA
gaaataagagagaaaagaagagtaagaagaaatataagagaattcgccaccatggcccctaagaaaaagcggaaggtggacagaaagacaagactgtctgagcctccaaccctggccctgagactgaagccctacaagaccgccatccagcagctgagaagcgtcatcagagccctgaaggaaaataccaccgttacattcctgcctacacccagcctgatcctgcagacagtgcgcagccactgcgtgtctaagatcacatttaattctagctgcctgtatatcaccgacaagtctttccagcctaagaccatcaacaacagcacccctctgctgggcaactttatgtacctgacctccagcaaggacctgactaaattctacgtgcaagacatctccgatctgagcgccaagatctctatgtgcgcccctgatttcaacatggaattcagcagcgcctgtgtgcatggccaggacatcgtcagagagagcgagaacagcgctgtgcacgtggacctggacttcggcgtggtggctgatctgctcaaatggatcggcccccacaccagagtgaagcggaacgtgaagaaagccccttgtcctacaggcacagtgcagatcctggtgcacgccggaccacctgctatcaagttcatccttacaaacggcagcgagctggaattcaccgccaacaaccgggtgtccttccacggcgtgaaaaacatgcggattaacgtgcaactgaaaaatttttaccagaccctgctgaactgcgccgtgaccaagctgccctgcaccctcaggattgtgaccgagcacgacaccctgctgtacgtcgccagcagaaacggcctgttcgccgtggagaacttcctgaccgaggaaccctttcagcggggtgatcctttcgacaagaactacgtgggaaatagcggcaagagcagatccggctccgagactcctggaacaagcgagagcgctacacctgagggcagcaatatcagcggctctagctgcggcagccccaacagcgccgacaccagcagcgacttcaaggacctgtggaccaagctgaaggaatgccacgaccgggaagtgcagggactccaggtgaaggtcaccaaactcaagcaagaaagaatcctggacgcccagagactggaagaattcttcaccaagaaccagcagctgagagagcagcagaaagtgctgcacgagacaatcaaggttctggaagatagactgcgggccggcctgtgcgacagatgcgccgtgaccgaggaacacatgcgcaaaaagcagcaggagttcgagaacattagacagcaaaatctgaaattgatcacagagctgatgaacgagagaaacacactgcaggaggagaacaagaagctgagcgagcagctgcaacagaagatcgagaatgatcagcaacaccaggccgctgagctggaatgtgaagaggacgtgatccccgacagcccaatcacagctttcagcttttctggcgtgaacagactgaggcggaaggaaaacccccacgtgcggtacatcgagcagacccataccaagctggaacacagcgtgtgtgccaacgagatgagaaaggtgtccaagtcctccacccatccccagcacaaccctaacgaaaatgagatcctggtggctgatacctacgaccagtctcagagccctatggccaaggcccacggcaccagctcttatacccctgataagagctccttcaacctggccaccgtggtggccgagacactgggcctgggcgtgcaggaggaaagcgagacacagggcccaatgagccctctgggagatgagctgtaccactgcctggaaggcaaccacaagaaacagccttttgagtccggctccgagactcctggaacaagcgagagcgctacacctgagggcagccctaagagaaaggtgtccagcgccgagggcgctgccaaggaagagcctaaacggagaagcgccagactgagcgccaagccccccgccaaggtggaagccaagcctaagaaggccgccgctaaggacaagagcagcgataagaaagtccagaccaagggcaagcggggcgccaaaggcaaacaggccgaggtggccaaccaggagacaaaggaagatctgcctgctgagaacggcgaaaccaagaccgaggaatctccagcttctgacgaggccggagagaaggaggccaaaagcgacagcggctctgagacacctggaacaagcgagagcgccaccccggaatcctatgaacaacttgcaccacaaccgtgtgtgggagaaactttacattctagcctcccacgagacagtgaactgtttgtgcctgaagaggggagcagcgagaaggagagcgaggacgcgccaaaaacatctcctccgacgcctgggaaacatggtttggaacagactggggaggaaaaagtgatggtgactgttcctgacaaaaatccaccttgtccttgctgtggtacccgggtaaactctgtgttgaatctgattgaacatctgaaagtgtcacacgggaaaaggggggtttgttttcggtgtgcaaaatgtggaaaggaaaatagtaactatcacagtgttgtttgtcattttaagaaatgcaggggtccagagacggagaaagccccagctggggagtggatttgtgaggtatgcaacagagattttacaaccaaaattggcctgggacaacacaagagattggcacacccagcagtgagaaatcaggaaaggatcgttgcttcccaaccgaaagaaacatcaaatagaggtgctcacaaaaggtgctggacaaaggaggaggaagaattactaataagactggaggctcagttcgagggaaacaaaaatattaataagcttattgcagaacacataaccaccaaaacagctaagcagatcagtgacaaaaggcgattgctgtccagaaagccagcagaggagccacgtgaggagcctggaacgtgtcatcacaccaggagagcagctgcgagcctgagaacggagcctgagatgagtcatcacgcccaggcagaggacagagataatggacctgggagacgccctctgccaggcagggcagctgccggagggagaacaatggacgagataagacgccaccctgataagggcaacggacagcagagacccaccaagcaaaaatcagaagaacagctgcaggcttactataaaaagacactagaggaacgactttcagctggggcacttaacaccttcccccgagcattcaagcaggtaatggaaggccgggatataaagctagtaatcaatcagacagcgcaggactgcttcggatgcctggaatccataagccaaataagaacggcaacccgagataaaaaggacacggtgacccgggagaaacacccaaagaaaccttttcagaagtggatgaagaagagagcaatcaaaaaaggtaattatcttcggttccagcgtttatttcaccttgatagagggaaactggctaaaatcattttagatgatattgaatgcttgtcttgtgacataccactcagtgaaatttattcggtttttaaaacaagatgggaaacaactggtagctttaaaagccttggggactttaaaacttacgggaaggctgacaacactgccttcagagaattaattacggctaaagaaattgagaaaaatgtgcaggaaatgagcaaaggctcggctcccggtccagacgggattactcttggggacgtcgtaaagatggatcccgagttttcccggaccatggagattttcaatttatggttaacaactggtaaaatcccggacatggtgagggggtgcagaaccgttttgattccaaaatcatcaaagccggatcgtttgaaagacattaataactggagacctatcacgatcggttccatcttgctgagactgttctccaggattgtaacagctaggctgagcaaagcgtgccccctgaacccaaggcaaagaggctttatcagagcggcgggatgctctgaaaacttaaaactcctgcaaactataatttggtcggccaaaagagaacacagaccactgggtgttgtattcgtggacatcgccaaggcttttgacaccgtaagccaccagcacatcattcatgctttgcagcaaagagaggtggatccccacatcgtcggtctggtgagcaatatgtacgagaacatcagtacgtatatcaccacaaagaggaacacacacacagacaaaatccagatccgggttggagtaaagcagggtgacccgatgtcgccccttttatttaacctggcaatggaccctctattatgcaagctggaagagagtggcaaaggataccaccgaggacagagcagcatcacagcgatggcatttgcagacgatctggttttgctgagcgactcctgggaaaatatgaatacaaatattagcatactggagaccttctgcaatctgaccggactcaaaacacaggggcaaaagtgccacggcttttacatcaagccgacaaagaagtcttacaccatcaatgactgcgctgcctggactatcaacggcacacccctgaacatgatcgaccccggcgaatctgagaaatacctcggcctgcagtttgacccgtggattggaatagcaaggtccggtctctccacaaaactagatttttggcttcagcggatcgatcaagcaccacttaaacctctgcagaaaactgatattctcaaaacatacaccatccctcggctgatctacatagctgaccactcagaagtgaaaagcgcactactcgaaacccttgaccagaagatccggacagcggtcaaggaatggcttcacctacctccgtgcacctgcgatgccatcctgtactcgagcacgagagacggcggtttgggcatcaccaaattggcaggactgatccccagcgtgcaggcccgtagactgcatcggatcgcacagtcatctgacgatacgatgaaatgcttcatggaaaaagagaaaatggaacagctgcataagaaattgtggattcaagctggaggggacagagagaacataccctcgatttgggaagcaccaccgtcgagtgaaccaccaaacaacgtgagcacaaattcggaatgggaagcaccgacccagaaagataaatttccaaagccttgcaattggaggaaaaacgaattcaaaaaatggaccaaattggcatcccaaggccgcggaattgtaaattttgaaagagacaaaattagtaaccattggatccaatactacagacgcatacctcacaggaaactcctcactgcactacaactcagggccaacgtttaccccacgagagaatttctagccaggggtagacaagaccaatacatcaaggcgtgtaggcactgcgatgcggacaacgaatcctgcgcccacatcatcggcaactgcccagtgacacaggacgcccgaatcaagaggcacaattacatctgcgaactgcttctcgaggaggcgaagaagaaggactgggtagtgttcaaggaaccgcacataagggattccaacaaggaactgtacaaacctgacctgatatttgtgaaggatgggcgtgcacttgtcgtggatgtgacagtacggtatgaagcagccaaatcatcgctggaggaagccgctgcagagaaagtgagaaagtacaaacacctggaaacggaagtaagacatctcacgaatgcaaaggacgttacttttgtgggctttcccctaggagcgcgggggaaatggcaccaagataactttaaacttttgactgagcttggcctctccaaatcgaggcaagtgaaaatggcagagactttttccacagtagcgctcttttcatctgtggacattgtacatatgtttgccagtagggccagaaaatctatggttatgtgataataggctgccttctgcggggcttgccttctggccatgcccttcttctctcccttgcacctgtacctcttggtctttgaataaagcctgagtaggaaggaccggtaaaaaaaaaaaaaaaaaaaaaaaaaaaaaaacgttgactaaaaaaaaaaaaaaaaaaaaaaaaaaaaaaaaaaaaaaaaaaaaaaaaaaaaaaaaaaaaaaaaaaaaaa

SEQ ID NO: 11263 - DNA, 6182 bp, synthetic construct
  source 1..6182: mol_type = other DNA
gaaataagagagaaaagaagagtaagaagaaatataagagaattcgccaccatggcccctaagaaaaagcggaaggtggacagaaagacaagactgtctgagcctccaaccctggccctgagactgaagccctacaagaccgccatccagcagctgagaagcgtcatcagagccctgaaggaaaataccaccgttacattcctgcctacacccagcctgatcctgcagacagtgcgcagccactgcgtgtctaagatcacatttaattctagctgcctgtatatcaccgacaagtctttccagcctaagaccatcaacaacagcacccctctgctgggcaactttatgtacctgacctccagcaaggacctgactaaattctacgtgcaagacatctccgatctgagcgccaagatctctatgtgcgcccctgatttcaacatggaattcagcagcgcctgtgtgcatggccaggacatcgtcagagagagcgagaacagcgctgtgcacgtggacctggacttcggcgtggtggctgatctgctcaaatggatcggcccccacaccagagtgaagcggaacgtgaagaaagccccttgtcctacaggcacagtgcagatcctggtgcacgccggaccacctgctatcaagttcatccttacaaacggcagcgagctggaattcaccgccaacaaccgggtgtccttccacggcgtgaaaaacatgcggattaacgtgcaactgaaaaatttttaccagaccctgctgaactgcgccgtgaccaagctgccctgcaccctcaggattgtgaccgagcacgacaccctgctgtacgtcgccagcagaaacggcctgttcgccgtggagaacttcctgaccgaggaaccctttcagcggggtgatcctttcgacaagaactacgtgggaaatagcggcaagagcagatccggctccgagactcctggaacaagcgagagcgctacacctgagggcagcaatatcagcggctctagctgcggcagccccaacagcgccgacaccagcagcgacttcaaggacctgtggaccaagctgaaggaatgccacgaccgggaagtgcagggactccaggtgaaggtcaccaaactcaagcaagaaagaatcctggacgcccagagactggaagaattcttcaccaagaaccagcagctgagagagcagcagaaagtgctgcacgagacaatcaaggttctggaagatagactgcgggccggcctgtgcgacagatgcgccgtgaccgaggaacacatgcgcaaaaagcagcaggagttcgagaacattagacagcaaaatctgaaattgatcacagagctgatgaacgagagaaacacactgcaggaggagaacaagaagctgagcgagcagctgcaacagaagatcgagaatgatcagcaacaccaggccgctgagctggaatgtgaagaggacgtgatccccgacagcccaatcacagctttcagcttttctggcgtgaacagactgaggcggaaggaaaacccccacgtgcggtacatcgagcagacccataccaagctggaacacagcgtgtgtgccaacgagatgagaaaggtgtccaagtcctccacccatccccagcacaaccctaacgaaaatgagatcctggtggctgatacctacgaccagtctcagagccctatggccaaggcccacggcaccagctcttatacccctgataagagctccttcaacctggccaccgtggtggccgagacactgggcctgggcgtgcaggaggaaagcgagacacagggcccaatgagccctctgggagatgagctgtaccactgcctggaaggcaaccacaagaaacagccttttgagtccggctccgagactcctggaacaagcgagagcgctacacctgagggcagccctaagagaaaggtgtccagcgccgagggcgctgccaaggaagagcctaaacggagaagcgccagactgagcgccaagccccccgccaaggtggaagccaagcctaagaaggccgccgctaaggacaagagcagcgataagaaagtccagaccaagggcaagcggggcgccaaaggcaaacaggccgaggtggccaaccaggagacaaaggaagatctgcctgctgagaacggcgaaaccaagaccgaggaatctccagcttctgacgaggccggagagaaggaggccaaaagcgacagcggctctgagacacctggaacaagcgagagcgccaccccggaatcctatgaacaacttgcaccacaaccgtgtgtgggagaaactttacattctagcctcccacgagacagtgaactgtttgtgcctgaagaggggagcagcgagaaggagagcgaggacgcgccaaaaacatctcctccgacgcctgggaaacatggtttggaacagactggggaggaaaaagtgatggtgactgttcctgacaaaaatccaccttgtccttgctgtggtacccgggtaaactctgtgttgaatctgattgaacatctgaaagtgtcacacgggaaaaggggggtttgttttcggtgtgcaaaatgtggaaaggaaaatagtaactatcacagtgttgtttgtcattttaagaaatgcaggggtccagagacggagaaagccccagctggggagtggatttgtgaggtatgcaacagagattttacaaccaaaattggcctgggacaacacaagagattggcacacccagcagtgagaaatcaggaaaggatcgttgcttcccaaccgaaagaaacatcaaatagaggtgctcacaaaaggtgctggacaaaggaggaggaagaattactaataagactggaggctcagttcgagggaaacaaaaatattaataagcttattgcagaacacataaccaccaaaacagctaagcagatcagtgacaaaaggcgattgctgtccagaaagccagcagaggagccacgtgaggagcctggaacgtgtcatcacaccaggagagcagctgcgagcctgagaacggagcctgagatgagtcatcacgcccaggcagaggacagagataatggacctgggagacgccctctgccaggcagggcagctgccggagggagaacaatggacgagataagacgccaccctgataagggcaacggacagcagagacccaccaagcaaaaatcagaagaacagctgcaggcttactataaaaagacactagaggaacgactttcagctggggcacttaacaccttcccccgagcattcaagcaggtaatggaaggccgggatataaagctagtaatcaatcagacagcgcaggactgcttcggatgcctggaatccataagccaaataagaacggcaacccgagataaaaaggacacggtgacccgggagaaacacccaaagaaaccttttcagaagtggatgaagaagagagcaatcaaaaaaggtaattatcttcggttccagcgtttattttatcttgatagagggaaactggctaaaatcattttagatgatattgaatgcttgtcttgtgacataccactcagtgaaatttattcggtttttaaaacaagatgggaaacaactggtagctttaaaagccttggggactttaaaacttacgggaaggctgacaacactgccttcagagaattaattacggctaaagaaattgagaaaaatgtgcaggaaatgagcaaaggctcggctcccggtccagacgggattactcttggggacgtcgtaaagatggatcccgagttttcccggaccatggagattttcaatttatggttaacaactggtaaaatcccggacatggtgagggggtgcagaaccgttttgattccaaaatcatcaaagccggatcgtttgaaagacattaataactggagacctatcacgatcggttccatcttgctgagactgttctccaggattgtaacagctaggctgagcaaagcgtgccccctgaacccaaggcaaagaggctttatcagagcggcgggatgctctgaaaacttaaaactcctgcaaactataatttggtcggccaaaagagaacacagaccactgggtgttgtattcgtggacatcgccaaggcttttgacaccgtaagccaccagcacatcattcatgctttgcagcaaagagaggtggatccccacatcgtcggtctggtgagcaatatgtacgagaacatcagtacgtatatcaccacaaagaggaacacacacacagacaaaatccagatccgggttggagtaaagcagggtgacccgatgtcgccccttttatttaacctggcaatggaccctctattatgcaagctggaagagagtggcaaaggataccaccgaggacagagcagcatcacagcgatggcatttgcagacgatctggttttgctgagcgactcctgggaaaatatgaatacaaatattagcatactggagaccttctgcaatctgaccggactcaaaacacaggggcaaaagtgccacggcttttacatcaagccgacaaagaagtcttacaccatcaatgactgcgctgcctggactatcaacggcacacccctgaacatgatcgaccccggcgaatctgagaaatacctcggcctgcagtttgacccgtggattggaatagcaaggtccggtctctccacaaaactagatttttggcttcagcggatcgatcaagcaccacttaaacctctgcagaaaactgatattctcaaaacatacaccatccctcggctgatctacatagctgaccactcagaagtgaaaagcgcactactcgaaacccttgaccagaagatccggacagcggtcaaggaatggcttcacctacctccgtgcacctgcgatgccatcctgtactcgagcacgagagacggcggtttgggcatcaccaaattggcaggactgatccccagcgtgcaggcccgtagactgcatcggatcgcacagtcatctgacgatacgatgaaatgcttcatggaaaaagagaaaatggaacagctgcataagaaattgtggattcaagctggaggggacagagagaacataccctcgatttgggaagcaccaccgtcgagtgaaccaccaaacaacgtgagcacaaattcggaatgggaagcaccgacccagaaagataaatttccaaagccttgcaattggaggaaaaacgaattcaaaaaatggaccaaattggcatcccaaggccgcggaattgtaaattttgaaagagacaaaattagtaaccattggatccaatactacagacgcatacctcacaggaaactcctcactgcactacaactcagggccaacgtttaccccacgagagaatttctagccaggggtagacaagaccaatacatcaaggcgtgtaggcactgcgatgcggacaacgaatcctgcgcccacatcatcggcaactgcccagtgacacaggacgcccgaatcaagaggcacaattacatctgcgaactgcttctcgaggaggcgaagaagaaggactgggtagtgttcaaggaaccgcacataagggattccaacaaggaactgtacaaacctgacctgatatttgtgaaggatgggcgtgcacttgtcgtggatgtgacagtacggtatgaagcagccaaatcatcgctggaggaagccgctgcagagaaagtgagaaagtacaaacacctggaaacggaagtaagacatctcacgaatgcaaaggacgttacttttgtgggctttcccctaggagcgcgggggaaatggcaccaagataactttaaacttttgactgagcttggcctctccaaatcgaggcaagtgaaaatggcagagactttttccacagtagcgctcttttcatctgtggacattgtacatatgtttgccagtagggccagaaaatctatggttatgtgataataggctgccttctgcggggcttgccttctggccatgcccttcttctctcccttgcacctgtacctcttggtctttgaataaagcctgagtaggaaggaccggtaaaaaaaaaaaaaaaaaaaaaaaaaaaaaaacgttgactaaaaaaaaaaaaaaaaaaaaaaaaaaaaaaaaaaaaaaaaaaaaaaaaaaaaaaaaaaaaaaaaaaaaaa

SEQ ID NO: 11264 - DNA, 6181 bp, synthetic construct
  source 1..6181: mol_type = other DNA
acatttgcttctgacacaactgtgttcactagcaacctcaaacagacaccatggcccctaagaaaaagcggaaggtggacagaaagacaagactgtctgagcctccaaccctggccctgagactgaagccctacaagaccgccatccagcagctgagaagcgtcatcagagccctgaaggaaaataccaccgttacattcctgcctacacccagcctgatcctgcagacagtgcgcagccactgcgtgtctaagatcacatttaattctagctgcctgtatatcaccgacaagtctttccagcctaagaccatcaacaacagcacccctctgctgggcaactttatgtacctgacctccagcaaggacctgactaaattctacgtgcaagacatctccgatctgagcgccaagatctctatgtgcgcccctgatttcaacatggaattcagcagcgcctgtgtgcatggccaggacatcgtcagagagagcgagaacagcgctgtgcacgtggacctggacttcggcgtggtggctgatctgctcaaatggatcggcccccacaccagagtgaagcggaacgtgaagaaagccccttgtcctacaggcacagtgcagatcctggtgcacgccggaccacctgctatcaagttcatccttacaaacggcagcgagctggaattcaccgccaacaaccgggtgtccttccacggcgtgaaaaacatgcggattaacgtgcaactgaaaaatttttaccagaccctgctgaactgcgccgtgaccaagctgccctgcaccctcaggattgtgaccgagcacgacaccctgctgtacgtcgccagcagaaacggcctgttcgccgtggagaacttcctgaccgaggaaccctttcagcggggtgatcctttcgacaagaactacgtgggaaatagcggcaagagcagatccggctccgagactcctggaacaagcgagagcgctacacctgagggcagcaatatcagcggctctagctgcggcagccccaacagcgccgacaccagcagcgacttcaaggacctgtggaccaagctgaaggaatgccacgaccgggaagtgcagggactccaggtgaaggtcaccaaactcaagcaagaaagaatcctggacgcccagagactggaagaattcttcaccaagaaccagcagctgagagagcagcagaaagtgctgcacgagacaatcaaggttctggaagatagactgcgggccggcctgtgcgacagatgcgccgtgaccgaggaacacatgcgcaaaaagcagcaggagttcgagaacattagacagcaaaatctgaaattgatcacagagctgatgaacgagagaaacacactgcaggaggagaacaagaagctgagcgagcagctgcaacagaagatcgagaatgatcagcaacaccaggccgctgagctggaatgtgaagaggacgtgatccccgacagcccaatcacagctttcagcttttctggcgtgaacagactgaggcggaaggaaaacccccacgtgcggtacatcgagcagacccataccaagctggaacacagcgtgtgtgccaacgagatgagaaaggtgtccaagtcctccacccatccccagcacaaccctaacgaaaatgagatcctggtggctgatacctacgaccagtctcagagccctatggccaaggcccacggcaccagctcttatacccctgataagagctccttcaacctggccaccgtggtggccgagacactgggcctgggcgtgcaggaggaaagcgagacacagggcccaatgagccctctgggagatgagctgtaccactgcctggaaggcaaccacaagaaacagccttttgagtccggctccgagactcctggaacaagcgagagcgctacacctgagggcagccctaagagaaaggtgtccagcgccgagggcgctgccaaggaagagcctaaacggagaagcgccagactgagcgccaagccccccgccaaggtggaagccaagcctaagaaggccgccgctaaggacaagagcagcgataagaaagtccagaccaagggcaagcggggcgccaaaggcaaacaggccgaggtggccaaccaggagacaaaggaagatctgcctgctgagaacggcgaaaccaagaccgaggaatctccagcttctgacgaggccggagagaaggaggccaaaagcgacagcggctctgagacacctggaacaagcgagagcgccaccccggaatcctatgaacaacttgcaccacaaccgtgtgtgggagaaactttacattctagcctcccacgagacagtgaactgtttgtgcctgaagaggggagcagcgagaaggagagcgaggacgcgccaaaaacatctcctccgacgcctgggaaacatggtttggaacagactggggaggaaaaagtgatggtgactgttcctgacaaaaatccaccttgtccttgctgtggtacccgggtaaactctgtgttgaatctgattgaacatctgaaagtgtcacacgggaaaaggggggtttgttttcggtgtgcaaaatgtggaaaggaaaatagtaactatcacagtgttgtttgtcattttaagaaatgcaggggtccagagacggagaaagccccagctggggagtggatttgtgaggtatgcaacagagattttacaaccaaaattggcctgggacaacacaagagattggcacacccagcagtgagaaatcaggaaaggatcgttgcttcccaaccgaaagaaacatcaaatagaggtgctcacaaaaggtgctggacaaaggaggaggaagaattactaataagactggaggctcagttcgagggaaacaaaaatattaataagcttattgcagaacacataaccaccaaaacagctaagcagatcagtgacaaaaggcgattgctgtccagaaagccagcagaggagccacgtgaggagcctggaacgtgtcatcacaccaggagagcagctgcgagcctgagaacggagcctgagatgagtcatcacgcccaggcagaggacagagataatggacctgggagacgccctctgccaggcagggcagctgccggagggagaacaatggacgagataagacgccaccctgataagggcaacggacagcagagacccaccaagcaaaaatcagaagaacagctgcaggcttactataaaaagacactagaggaacgactttcagctggggcacttaacaccttcccccgagcattcaagcaggtaatggaaggccgggatataaagctagtaatcaatcagacagcgcaggactgcttcggatgcctggaatccataagccaaataagaacggcaacccgagataaaaaggacacggtgacccgggagaaacacccaaagaaaccttttcagaagtggatgaagaagagagcaatcaaaaaaggtaattatcttcggttccagcgtttattttatcttgatagagggaaactggctaaaatcattttagatgatattgaatgcttgtcttgtgacataccactcagtgaaatttattcggtttttaaaacaagatgggaaacaactggtagctttaaaagccttggggactttaaaacttacgggaaggctgacaacactgccttcagagaattaattacggctaaagaaattgagaaaaatgtgcaggaaatgagcaaaggctcggctcccggtccagacgggattactcttggggacgtcgtaaagatggatcccgagttttcccggaccatggagattttcaatttatggttaacaactggtaaaatcccggacatggtgagggggtgcagaaccgttttgattccaaaatcatcaaagccggatcgtttgaaagacattaataactggagacctatcacgatcggttccatcttgctgagactgttctccaggattgtaacagctaggctgagcaaagcgtgccccctgaacccaaggcaaagaggctttatcagagcggcgggatgctctgaaaacttaaaactcctgcaaactataatttggtcggccaaaagagaacacagaccactgggtgttgtattcgtggacatcgccaaggcttttgacaccgtaagccaccagcacatcattcatgctttgcagcaaagagaggtggatccccacatcgtcggtctggtgagcaatatgtacgagaacatcagtacgtatatcaccacaaagaggaacacacacacagacaaaatccagatccgggttggagtaaagcagggtgacccgatgtcgccccttttatttaacctggcaatggaccctctattatgcaagctggaagagagtggcaaaggataccaccgaggacagagcagcatcacagcgatggcatttgcagacgatctggttttgctgagcgactcctgggaaaatatgaatacaaatattagcatactggagaccttctgcaatctgaccggactcaaaacacaggggcaaaagtgccacggcttttacatcaagccgacaaaggactcttacaccatcaatgactgcgctgcctggactatcaacggcacacccctgaacatgatcgaccccggcgaatctgagaaatacctcggcctgcagtttgacccgtggattggaatagcaaggtccggtctctccacaaaactagatttttggcttcagcggatcgatcaagcaccacttaaacctctgcagaaaactgatattctcaaaacatacaccatccctcggctgatctacatagctgaccactcagaagtgaaaagcgcactactcgaaacccttgaccagaagatccggacagcggtcaaggaatggcttcacctacctccgtgcacctgcgatgccatcctgtactcgagcacgagagacggcggtttgggcatcaccaaattggcaggactgatccccagcgtgcaggcccgtagactgcatcggatcgcacagtcatctgacgatacgatgaaatgcttcatggaaaaagagaaaatggaacagctgcataagaaattgtggattcaagctggaggggacagagagaacataccctcgatttgggaagcaccaccgtcgagtgaaccaccaaacaacgtgagcacaaattcggaatgggaagcaccgacccagaaagataaatttccaaagccttgcaattggaggaaaaacgaattcaaaaaatggaccaaattggcatcccaaggccgcggaattgtaaattttgaaagagacaaaattagtaaccattggatccaatactacagacgcatacctcacaggaaactcctcactgcactacaactcagggccaacgtttaccccacgagagaatttctagccaggggtagacaagaccaatacatcaaggcgtgtaggcactgcgatgcggacaacgaatcctgcgcccacatcatcggcaactgcccagtgacacaggacgcccgaatcaagaggcacaattacatctgcgaactgcttctcgaggaggcgaagaagaaggactgggtagtgttcaaggaaccgcacataagggattccaacaaggaactgtacaaacctgacctgatatttgtgaaggatgggcgtgcacttgtcgtggatgtgacagtacggtatgaagcagccaaatcatcgctggaggaagccgctgcagagaaagtgagaaagtacaaacacctggaaacggaagtaagacatctcacgaatgcaaaggacgttacttttgtgggctttcccctaggagcgcgggggaaatggcaccaagataactttaaacttttgactgagcttggcctctccaaatcgaggcaagtgaaaatggcagagactttttccacagtagcgctcttttcatctgtggacattgtacatatgtttgccagtagggccagaaaatctatggttatgtgataataggctgccttctgcggggcttgccttctggccatgcccttcttctctcccttgcacctgtacctcttggtctttgaataaagcctgagtaggaaggaccggtaaaaaaaaaaaaaaaaaaaaaaaaaaaaaaacgttgactaaaaaaaaaaaaaaaaaaaaaaaaaaaaaaaaaaaaaaaaaaaaaaaaaaaaaaaaaaaaaaaaaaaaaa

SEQ ID NO: 11265 - DNA, 6182 bp, synthetic construct
  source 1..6182: mol_type = other DNA
gaaataagagagaaaagaagagtaagaagaaatataagagaattcgccaccatggcccctaagaaaaagcggaaggtggacagaaagacaagactgtctgagcctccaaccctggccctgagactgaagccctacaagaccgccatccagcagctgagaagcgtcatcagagccctgaaggaaaataccaccgttacattcctgcctacacccagcctgatcctgcagacagtgcgcagccactgcgtgtctaagatcacatttaattctagctgcctgtatatcaccgacaagtctttccagcctaagaccatcaacaacagcacccctctgctgggcaactttatgtacctgacctccagcaaggacctgactaaattctacgtgcaagacatctccgatctgagcgccaagatctctatgtgcgcccctgatttcaacatggaattcagcagcgcctgtgtgcatggccaggacatcgtcagagagagcgagaacagcgctgtgcacgtggacctggacttcggcgtggtggctgatctgctcaaatggatcggcccccacaccagagtgaagcggaacgtgaagaaagccccttgtcctacaggcacagtgcagatcctggtgcacgccggaccacctgctatcaagttcatccttacaaacggcagcgagctggaattcaccgccaacaaccgggtgtccttccacggcgtgaaaaacatgcggattaacgtgcaactgaaaaatttttaccagaccctgctgaactgcgccgtgaccaagctgccctgcaccctcaggattgtgaccgagcacgacaccctgctgtacgtcgccagcagaaacggcctgttcgccgtggagaacttcctgaccgaggaaccctttcagcggggtgatcctttcgacaagaactacgtgggaaatagcggcaagagcagatccggctccgagactcctggaacaagcgagagcgctacacctgagggcagcaatatcagcggctctagctgcggcagccccaacagcgccgacaccagcagcgacttcaaggacctgtggaccaagctgaaggaatgccacgaccgggaagtgcagggactccaggtgaaggtcaccaaactcaagcaagaaagaatcctggacgcccagagactggaagaattcttcaccaagaaccagcagctgagagagcagcagaaagtgctgcacgagacaatcaaggttctggaagatagactgcgggccggcctgtgcgacagatgcgccgtgaccgaggaacacatgcgcaaaaagcagcaggagttcgagaacattagacagcaaaatctgaaattgatcacagagctgatgaacgagagaaacacactgcaggaggagaacaagaagctgagcgagcagctgcaacagaagatcgagaatgatcagcaacaccaggccgctgagctggaatgtgaagaggacgtgatccccgacagcccaatcacagctttcagcttttctggcgtgaacagactgaggcggaaggaaaacccccacgtgcggtacatcgagcagacccataccaagctggaacacagcgtgtgtgccaacgagatgagaaaggtgtccaagtcctccacccatccccagcacaaccctaacgaaaatgagatcctggtggctgatacctacgaccagtctcagagccctatggccaaggcccacggcaccagctcttatacccctgataagagctccttcaacctggccaccgtggtggccgagacactgggcctgggcgtgcaggaggaaagcgagacacagggcccaatgagccctctgggagatgagctgtaccactgcctggaaggcaaccacaagaaacagccttttgagtccggctccgagactcctggaacaagcgagagcgctacacctgagggcagccctaagagaaaggtgtccagcgccgagggcgctgccaaggaagagcctaaacggagaagcgccagactgagcgccaagccccccgccaaggtggaagccaagcctaagaaggccgccgctaaggacaagagcagcgataagaaagtccagaccaagggcaagcggggcgccaaaggcaaacaggccgaggtggccaaccaggagacaaaggaagatctgcctgctgagaacggcgaaaccaagaccgaggaatctccagcttctgacgaggccggagagaaggaggccaaaagcgacagcggctctgagacacctggaacaagcgagagcgccaccccggaatcctatgaacaacttgcaccacaaccgtgtgtgggagaaactttacattctagcctcccacgagacagtgaactgtttgtgcctgaagaggggagcagcgagaaggagagcgaggacgcgccaaaaacatctcctccgacgcctgggaaacatggtttggaacagactggggaggaaaaagtgatggtgactgttcctgacaaaaatccaccttgtccttgctgtggtacccgggtaaactctgtgttgaatctgattgaacatctgaaagtgtcacacgggaaaaggggggtttgttttcggtgtgcaaaatgtggaaaggaaaatagtaactatcacagtgttgtttgtcattttaagaaatgcaggggtccagagacggagaaagccccagctggggagtggatttgtgaggtatgcaacagagattttacaaccaaaattggcctgggacaacacaagagattggcacacccagcagtgagaaatcaggaaaggatcgttgcttcccaaccgaaagaaacatcaaatagaggtgctcacaaaaggtgctggacaaaggaggaggaagaattactaataagactggaggctcagttcgagggaaacaaaaatattaataagcttattgcagaacacataaccaccaaaacagctaagcagatcagtgacaaaaggcgattgctgtccagaaagccagcagaggagccacgtgaggagcctggaacgtgtcatcacaccaggagagcagctgcgagcctgagaacggagcctgagatgagtcatcacgcccaggcagaggacagagataatggacctgggagacgccctctgccaggcagggcagctgccggagggagaacaatggacgagataagacgccaccctgataagggcaacggacagcagagacccaccaagcaaaaatcagaagaacagctgcaggcttactataaaaagacactagaggaacgactttcagctggggcacttaacaccttcccccgagcattcaagcaggtaatggaaggccgggatataaagctagtaatcaatcagacagcgcaggactgcttcggatgcctggaatccataagccaaataagaacggcaacccgagataaaaaggacacggtgacccgggagaaacacccaaagaaaccttttcagaagtggatgaagaagagagcaatcaaaaaaggtaattatcttcggttccagcgtttatttcaccttgatagagggaaactggctaaaatcattttagatgatattgaatgcttgtcttgtgacataccactcagtgaaatttattcggtttttaaaacaagatgggaaacaactggtagctttaaaagccttggggactttaaaacttacgggaaggctgacaacactgccttcagagaattaattacggctaaagaaattgagaaaaatgtgcaggaaatgagcaaaggctcggctcccggtccagacgggattactcttggggacgtcgtaaagatggatcccgagttttcccggaccatggagattttcaatttatggttaacaactggtaaaatcccggacatggtgagggggtgcagaaccgttttgattccaaaatcatcaaagccggatcgtttgaaagacattaataactggagacctatcacgatcggttccatcttgctgagactgttctccaggattgtaacagctaggctgagcaaagcgtgccccctgaacccaaggcaaagaggctttatcagagcggcgggatgctctgaaaacttaaaactcctgcaaactataatttggtcggccaaaagagaacacagaccactgggtgttgtattcgtggacatcgccaaggcttttgacaccgtaagccaccagcacatcattcatgctttgcagcaaagagaggtggatccccacatcgtcggtctggtgagcaatatgtacgagaacatcagtacgtatatcaccacaaagaggaacacacacacagacaaaatccagatccgggttggagtaaagcagggtgacccgatgtcgccccttttatttaacctggcaatggaccctctattatgcaagctggaagagagtggcaaaggataccaccgaggacagagcagcatcacagcgatggcatttgcagacgatctggttttgctgagcgactcctgggaaaatatgaatacaaatattagcatactggagaccttctgcaatctgaccggactcaaaacacaggggcaaaagtgccacggcttttacatcaagccgacaaaggactcttacaccatcaatgactgcgctgcctggactatcaacggcacacccctgaacatgatcgaccccggcgaatctgagaaatacctcggcctgcagtttgacccgtggattggaatagcaaggtccggtctctccacaaaactagatttttggcttcagcggatcgatcaagcaccacttaaacctctgcagaaaactgatattctcaaaacatacaccatccctcggctgatctacatagctgaccactcagaagtgaaaagcgcactactcgaaacccttgaccagaagatccggacagcggtcaaggaatggcttcacctacctccgtgcacctgcgatgccatcctgtactcgagcacgagagacggcggtttgggcatcaccaaattggcaggactgatccccagcgtgcaggcccgtagactgcatcggatcgcacagtcatctgacgatacgatgaaatgcttcatggaaaaagagaaaatggaacagctgcataagaaattgtggattcaagctggaggggacagagagaacataccctcgatttgggaagcaccaccgtcgagtgaaccaccaaacaacgtgagcacaaattcggaatgggaagcaccgacccagaaagataaatttccaaagccttgcaattggaggaaaaacgaattcaaaaaatggaccaaattggcatcccaaggccgcggaattgtaaattttgaaagagacaaaattagtaaccattggatccaatactacagacgcatacctcacaggaaactcctcactgcactacaactcagggccaacgtttaccccacgagagaatttctagccaggggtagacaagaccaatacatcaaggcgtgtaggcactgcgatgcggacaacgaatcctgcgcccacatcatcggcaactgcccagtgacacaggacgcccgaatcaagaggcacaattacatctgcgaactgcttctcgaggaggcgaagaagaaggactgggtagtgttcaaggaaccgcacataagggattccaacaaggaactgtacaaacctgacctgatatttgtgaaggatgggcgtgcacttgtcgtggatgtgacagtacggtatgaagcagccaaatcatcgctggaggaagccgctgcagagaaagtgagaaagtacaaacacctggaaacggaagtaagacatctcacgaatgcaaaggacgttacttttgtgggctttcccctaggagcgcgggggaaatggcaccaagataactttaaacttttgactgagcttggcctctccaaatcgaggcaagtgaaaatggcagagactttttccacagtagcgctcttttcatctgtggacattgtacatatgtttgccagtagggccagaaaatctatggttatgtgataataggctgccttctgcggggcttgccttctggccatgcccttcttctctcccttgcacctgtacctcttggtctttgaataaagcctgagtaggaaggaccggtaaaaaaaaaaaaaaaaaaaaaaaaaaaaaaacgttgactaaaaaaaaaaaaaaaaaaaaaaaaaaaaaaaaaaaaaaaaaaaaaaaaaaaaaaaaaaaaaaaaaaaaaa

SEQ ID NO: 11266 - DNA, 6530 bp, synthetic construct
  source 1..6530: mol_type = other DNA
gaaataagagagaaaagaagagtaagaagaaatataagagaattcgccaccatggcccctaagaaaaagcggaaggtgagcgccagccaggacagcagaagccgggacaacggccctgacggaatggagcctgagggagtgatcgaatccaactggaacgagatcgtggacagcttcgacgacatgaacctgagcgagagcctgctgagaggcatctacgcttacggcttcgagaagcctagcgccatccagcaaagagcaatcctgccatgcatcaagggctacgacgtcatcgcccaggcccagagcggcaccggcaaaaccgccaccttcgccatctctatcctgcagcagatcgagctggatctgaaagccacacaagcgttggtgctggcccccacaagagagctggcccagcagatccagaaggtggtgatggctctgggcgactacatgggcgcctcttgtcatgcctgcatcggcggcaccaatgtgcgggctgaagtgcagaagctccagatggaagctccccacatcattgtgggaacaccaggcagggtgttcgatatgctgaatcgccggtacctgtctcctaagtatatcaagatgttcgtgctggacgaggccgacgaaatgctgtctagaggtttcaaggaccagatctacgacatttttcagaaactgaacagcaacacccaggttgtgctgctgtcagccaccatgcctagcgatgtgctcgaggtgaccaagaagttcatgcgggaccctatcagaatcctggtgaagaaagaggagctgactctggagggcatcagacagttctacatcaacgtggaaagagaggaatggaagctggacaccctgtgcgacctgtatgagacactgaccatcacccaggccgtgatctttatcaataccagaagaaaggtcgactggctgacagagaagatgcacgcccgggacttcaccgtgtccgccatgcacggcgatatggaccaaaaggaacgggatgtgattatgagagagttccggtccggcagcagccgggtgctgatcacaacagatctgctggctagaggaatcgatgtgcagcaggtgagcctggtcatcaactacgatctgcctaccaacagagaaaattacatccacagaatcggcagaggcggaagattcggcagaaagggcgtggccataaacatggtgacagaggaagataagcggacccttagagacatcgaaaccttttacaacaccagcatcgaggaaatgcccctgaacgtggccgacctgatctccggctccgagactcctggaacaagcgagagcgctacacctgagggcagcaatatcagcggctctagctgcggcagccccaacagcgccgacaccagcagcgacttcaaggacctgtggaccaagctgaaggaatgccacgaccgggaagtgcagggactccaggtgaaggtcaccaaactcaagcaagaaagaatcctggacgcccagagactggaagaattcttcaccaagaaccagcagctgagagagcagcagaaagtgctgcacgagacaatcaaggttctggaagatagactgcgggccggcctgtgcgacagatgcgccgtgaccgaggaacacatgcgcaaaaagcagcaggagttcgagaacattagacagcaaaatctgaaattgatcacagagctgatgaacgagagaaacacactgcaggaggagaacaagaagctgagcgagcagctgcaacagaagatcgagaatgatcagcaacaccaggccgctgagctggaatgtgaagaggacgtgatccccgacagcccaatcacagctttcagcttttctggcgtgaacagactgaggcggaaggaaaacccccacgtgcggtacatcgagcagacccataccaagctggaacacagcgtgtgtgccaacgagatgagaaaggtgtccaagtcctccacccatccccagcacaaccctaacgaaaatgagatcctggtggctgatacctacgaccagtctcagagccctatggccaaggcccacggcaccagctcttatacccctgataagagctccttcaacctggccaccgtggtggccgagacactgggcctgggcgtgcaggaggaaagcgagacacagggcccaatgagccctctgggagatgagctgtaccactgcctggaaggcaaccacaagaaacagccttttgagtccggctccgagactcctggaacaagcgagagcgctacacctgagggcagccctaagagaaaggtgtccagcgccgagggcgctgccaaggaagagcctaaacggagaagcgccagactgagcgccaagccccccgccaaggtggaagccaagcctaagaaggccgccgctaaggacaagagcagcgataagaaagtccagaccaagggcaagcggggcgccaaaggcaaacaggccgaggtggccaaccaggagacaaaggaagatctgcctgctgagaacggcgaaaccaagaccgaggaatctccagcttctgacgaggccggagagaaggaggccaaaagcgacagcggctctgagacacctggaacaagcgagagcgccaccccggaatcctatgaacaacttgcaccacaaccgtgtgtgggagaaactttacattctagcctcccacgagacagtgaactgtttgtgcctgaagaggggagcagcgagaaggagagcgaggacgcgccaaaaacatctcctccgacgcctgggaaacatggtttggaacagactggggaggaaaaagtgatggtgactgttcctgacaaaaatccaccttgtccttgctgtggtacccgggtaaactctgtgttgaatctgattgaacatctgaaagtgtcacacgggaaaaggagggtttgttttcggtgtgcaaaatgtggaaaggaaaatagtaactatcacagtgttgtttgtcattttccaaaatgcaggggtccagagacggagaaagccccagctggggagtggatttgtgaggtatgcaacagagattttacaaccaaaattggcctgggacaacacaagagattggcacacccagcagtgagaaatcaggaaaggatcgttgcttcccaaccgaaagaaacatcaaatagaggtgctcacaaaaggtgctggacaaaggaggaggaagaattactaataagactggaggctcagttcgagggacacaaaaatattaataagcttattgcagaacacataaccaccaaaacagctaagcagatcagtgacaaaaggcgattgctgtccagaaagccagcagaggagccacgtatggagcctggaacgtgtcatcacaccaggagagcagctgcgagcctgagaacggagcctgagatgagtcatcaggcccaggcagaggacagagataatggacctgggagacgccctctgccaggcaggcccgctgccggagggagaacaatggacgagataagacgccaccctgataagggcaacggacagcagagacccaccaagcaaaaatcagaagaacagctgcaggcttactataaaaagacactagaggaacgactttcagctggggcacttaacaccttcccccgagcattcaagcaggtaatggaaggccgggatataaagctagtaatcaatcagacagcgcaggactgcttcggatgcctggaatccataagccaaataagaacggcaacccgagataaaaagtacacgggcacccgggagaaacacccaaagaggccttttcagaagtggatgaagaagagagcaatcaaaaaaggtaattatcttcggttccagcgtttattttatcttgatagagggaaactggctaaaatcattttagatgatattgaatgcttgtcttgtgacataccactcagtgaaatttattcggtttttaaaacaagatgggaaacaactggtagctttaaaagccttggggactttaaaacttacgggaaggctgacaacactgccttcagagaattaattacggctaaagaaattgagaaaaatgtgcaggaaatgagcaaaggctcggctcccggtccagacgggattactcttggggacgtcgtaaagatggatcccgagttttccctgaccatggagattttcaatttatggttaacaactggtaaaatcccggacatggtgagggggtgcagaaccgttttgattccaaaatcatcaaagccggatcgtttgaaagacattaataactggagacctatcacgatcggttccatcttgctgagactgttctccaggattgtaacagctaggctgagcaaagcgtgccccctgaacccaaggcaaagaggctttatcagagcggcgggatgctctgaaaacttaaaactcctgcaaactataatttggtcggccaaaagagaacacagaccactgggtgttgtattcgtggacatcgccaaggcttttgacaccgtaagccaccagcacatcattcatgctttgcagcaaagagaggtggatccccacatcgtcggtctggtgagcaatatgtacgagaacatcagtacgtatatcaccacaaagaggaacacacacacagacaaaatccagatccgggttggagtaaagcagggtgacccgatgtcgccccttttatttaacctggcaatggaccctctattatgcaagctggaagagagtggcaaaggataccaccgaggacagagcagcatcacagcgatggcatttgcagacgatctggttttgctgagcgactcctgggaaggcatgaatacaaatattagcatactggagaccttctgcaatctgaccggactcaaaacacaggggcaaaagtgccacggcttttacatcaagccgacaaaggactcttacaccatcaatgactgcgctgcctggactatcaacggcacacccctgaacatgatcgaccccggcgaatctgagaaatacctcggcctgcagtttgacccgtggattggaatagcaaggtccggtctctccacaaaactagatgagtggcttcagcggatcgatcaagcaccacttaaacctctgcagaaaactgatattctcaaaacatacaccatccctcggctgatctacatagctgaccactcagaagtgaaagccgcactactcgaaacccttgacaggaagatccggacagcggtcaaggaatggcttcacctacctccgtgcacctgcgatgccatcctgtactcgagcacgagagacggcggtttgggcatcaccaaattggcaggactgatccccagcgtgcaggcccgtagactgcatcggatcgcacagtcatctgacgatacgatgaaatgcttcatggaaaaagagaggatggaacagctgcataagaaattgtggattcaagctggaggggacagagagaacataccctcgatttgggaagcaccaccgtcgagtgaaccaccaaacaacgtgagcacaaattcggaatgggaagcaccgacccagaaacccaaatttccaaagccttgcaattggaggaaaaacgaattcaaaaaatggaccaaattggcatcccaaggccgcggaattgtaaattttgaaagagacaaaattagtaaccattggatccaatactacagaggcatacctcacaggaaactcctcactgcactacaactcagggccaacgtttaccccacgagagaatttctagccaggggtagacaagaccaatacatcaaggcgtgtaggcactgcgatgcggacattgaatcctgcgcccacatcatcggcaactgcccagtgacacaggacgcccgaatcaagaggcacaataagatctgcgaactgcttctcgaggaggcgaagaagaaggactgggtagtgttcaaggaaccgcacataagggattccaacaaggaactgtacaaacctgacctgatatttgtgaaggatggccgtgcacttgtcgtggatgtgacagtacggtatgaagcagccaaatcatcgctggaggaagccgctgcagagaaagtgagaaagtacaaacacctggaaacggaagtaagacatctcacgaatgcaaaggacgttacttttgtgggctttcccctaggagcgcgggggaaatggcaccaagataactttaaacttttgactgagcttggcctctccaaatcgaggcaagtgaaaatggcagagactttttccacagtagcgctcttttcatctgtggacattgtacatatgtttgccagtagggccagaaaatctatggttatgtgataataggctgccttctgcggggcttgccttctggccatgcccttcttctctcccttgcacctgtacctcttggtctttgaataaagcctgagtaggaaggaccggtaaaaaaaaaaaaaaaaaaaaaaaaaaaaaaacgttgactaaaaaaaaaaaaaaaaaaaaaaaaaaaaaaaaaaaaaaaaaaaaaaaaaaaaaaaaaaaaaaaaaaaaaa

SEQ ID NO: 11267 - DNA, 6182 bp, synthetic construct
  source 1..6182: mol_type = other DNA
gaaataagagagaaaagaagagtaagaagaaatataagagaattcgccaccatggctcctaagaagaagcgtaaggtggaccgtaagactcgtctttctgagcctcctactcttgctcttcgtcttaagccttacaagactgctattcagcagcttcgttctgtgattcgtgctcttaaggagaacactactgtgactttccttcctactccttctcttattcttcagactgtgcgttctcactgcgtgtctaagattactttcaactcttcttgcctttacattactgacaagtctttccagcctaagactattaacaactctactcctcttcttggcaacttcatgtaccttacttcttctaaggaccttactaagttctacgtgcaggacatttctgacctttctgctaagatttctatgtgcgctcctgacttcaacatggagttctcttctgcttgcgtgcacggccaggacattgtgcgtgagtctgagaactctgctgtgcacgtggaccttgacttcggcgtggtggctgaccttcttaagtggattggccctcacactcgtgtgaagcgtaacgtgaagaaggctccttgccctactggcactgtgcagattcttgtgcacgctggccctcctgctattaagttcattcttactaacggctctgagcttgagttcactgctaacaaccgtgtgtctttccacggcgtgaagaacatgcgtattaacgtgcagcttaagaacttctaccagactcttcttaactgcgctgtgactaagcttccttgcactcttcgtattgtgactgagcacgacactcttctttacgtggcttctcgtaacggccttttcgctgtggagaacttccttactgaggagcctttccagcgtggcgaccctttcgacaagaactacgtgggcaactctggcaagtctcgttctggctctgagactcctggcacttctgagtctgctactcctgagggctctaacatttctggcagctcttgcggctctcctaactctgccgacacttcttctgactttaaggacctgtggactaagctgaaggagtgccacgaccgtgaggtgcagggccttcaggttaaggtgactaagttgaagcaggagcgtattcttgacgctcagcgtcttgaggagttcttcactaagaaccagcagctgcgtgagcagcagaaggtgcttcacgagactatcaaggtgcttgaggaccgtctgcgtgctggcctttgtgaccgttgcgctgttacggaggagcacatgcgtaagaagcagcaggagttcgagaacattcgtcagcagaaccttaagcttattactgagcttatgaacgagcgtaacactcttcaggaggagaacaagaagctctccgagcagcttcagcagaagattgagaacgaccagcagcaccaggctgctgagctggagtgtgaggaagatgtgattcctgactctcctattactgctttctctttctctggcgtgaaccgtcttaggcgtaaggagaatcctcacgtgcgttacattgagcagactcacactaagcttgagcactctgtgtgcgctaacgagatgcgtaaggtttctaagtctagcactcaccctcagcacaaccctaacgagaacgagatcttggtggccgacacgtacgaccagtctcagtctcctatggctaaggctcacggcacttctagctacactcctgacaagagctctttcaaccttgctactgtggttgctgagactcttggccttggcgtgcaggaggagtccgagactcaaggacctatgtctcctcttggcgacgagctttaccactgccttgagggcaaccacaagaagcaacctttcgagtctggcagcgagactcccggcactagcgagtctgcaactcctgaaggctctcccaagcgtaaagtgtctagcgctgagggcgctgctaaggaggagcctaagcgtcgttctgctcgtcttagcgctaagcctcctgccaaggtggaggctaagcctaagaaggctgctgccaaggacaagtctagcgacaagaaggtgcagactaagggcaagcgtggcgctaaggggaagcaggctgaggtggctaaccaggagactaaagaggaccttcctgctgagaacggcgagactaagactgaggagtctcctgcttctgacgaggctggcgagaaggaggctaaatctgactcaggctctgaaactcctgggacttctgagagcgctactcccgagtcttacgagcagctggctcctcagccttgcgttggcgagactcttcactcttctcttcctcgtgactctgagctgttcgtgcctgaggagggctcttctgagaaggagtctgaggacgccccaaaaacttctcctcctacgcctggcaagcacggccttgagcaaactggcgaggagaaggtgatggtgactgtgcctgataagaacccgccttgtccttgctgcggcactcgtgttaactctgtgcttaaccttattgagcaccttaaggtgtctcacgggaagcggggcgtgtgcttccgttgcgccaaatgtggcaaggaaaactctaactaccactctgtggtgtgccacttcaagaagtgccgtggccctgagactgagaaggcccctgctggcgaatggatttgcgaggtgtgcaaccgtgacttcactactaagatcggcttgggccagcacaagcgtcttgctcaccctgctgtgcgtaatcaggagaggattgtggcctctcagcctaaggagacttctaaccgtggcgctcacaagcgttgctggactaaggaagaggaggagcttcttattcgtctggaggctcagttcgagggcaacaagaacattaacaagcttattgctgagcacattactactaaaactgctaagcagatttctgacaagcgtcgtcttttgtctcgtaagcctgctgaggaacctcgtgaggagcccggcacttgtcaccacactcgtcgtgctgctgcttctcttcgtactgagcctgagatgtctcaccacgctcaagccgaggaccgtgacaatggccctggacgtagacctcttcctggccgtgctgccgctggaggacgtactatggatgagattcgtcgtcaccctgacaagggcaacggccagcagcgtcctactaagcagaagagcgaggagcagctgcaggcttactacaagaaaactctggaggagcgcttgtctgctggcgctcttaacactttccctcgtgctttcaagcaggtgatggagggccgtgacattaagcttgtgattaaccagactgctcaggactgcttcggctgcctggagtctatttctcagattcgtactgctactcgtgacaagaaagacactgtgactcgtgagaagcaccctaagaagcccttccagaagtggatgaagaagagggctattaagaagggcaactaccttcgtttccagaggcttttctaccttgaccgtggcaagcttgccaagattattctggacgacattgagtgcctttcttgcgacattcctctttctgaaatttactctgtgttcaagactcgttgggagactactggctcttttaagtctctgggcgacttcaagacttacggcaaggctgacaacactgctttccgtgagcttatcactgcgaaggagattgaaaagaacgttcaggagatgtctaagggctctgctcctggccctgacggcattacactgggggacgttgtgaagatggaccctgagttcagccgtacaatggagattttcaacctgtggttgacgactggcaagattcccgacatggtgcgtggctgccgtactgtgcttattcctaagagctctaagcctgaccgtcttaaggacatcaacaactggcgtcctattacgattggctctattcttcttcgtctgttctctaggattgtgacggctcgtctgtctaaggcttgccctcttaaccctcgtcagcgtggcttcattagggctgctggctgctctgaaaaccttaagttgcttcagactattatttggtctgctaagcgtgagcaccgtcctctgggcgtggtgttcgtggacattgctaaggctttcgacactgtttctcatcagcacattattcacgctcttcagcagcgtgaggtggaccctcacattgtgggccttgtgtctaacatgtacgagaacatctctacttacattacgactaagcgcaatactcacactgacaagattcagattagggtgggcgtgaagcagggcgaccctatgagccctcttcttttcaacttggctatggaccctcttctgtgcaagcttgaggagagcggcaagggctaccaccgtggccaatcttctattacggctatggctttcgctgacgaccttgtgcttctttctgactcttgggagaacatgaacactaacattagcattcttgagactttctgcaaccttactggccttaagactcagggccagaagtgccacggcttctacattaagcctactaaggactcttacactattaacgactgcgctgcttggactatcaacggcactcctcttaacatgattgaccctggcgagagcgaaaagtaccttggccttcagttcgacccttggattggcattgctcgtagcggcctttctactaagctggacttctggcttcagcgtattgaccaggctcctctgaagcctctgcaaaagactgacattcttaagacttacacgattcctcgtcttatttacattgctgaccactctgaggtgaagtctgctctgttggagactctggaccagaagattaggactgctgtcaaagagtggcttcaccttcctccttgcacgtgcgacgctattctttactctagcacgagggacggcggccttggcattaccaagctcgctggacttattccttctgttcaggctaggcgtctccaccgtattgctcagtctagtgacgacactatgaagtgcttcatggagaaggagaagatggagcagttgcacaagaagttgtggattcaggctggcggcgacagggagaatattcctagcatttgggaggctcctccctcctctgagccccctaacaacgtgtctactaactctgagtgggaggcccctactcagaaggataagttccctaagccttgcaactggaggaagaacgagttcaagaaatggactaaacttgcttctcagggccgtggcattgtgaacttcgagcgtgacaaaatttctaaccactggattcagtactaccgtcgtattcctcaccgtaagcttcttactgctctgcagcttagggctaacgtgtaccctactagggagttccttgctcgtggccgtcaggaccagtacattaaggcctgccgtcactgcgacgctgacaacgagtcttgcgctcacattattggcaactgccctgtgactcaggacgctcgtattaagcgtcacaactacatttgcgagcttcttcttgaggaagctaagaaaaaggactgggtggtgttcaaggagcctcacattcgtgacagcaacaaggagctttacaagcccgaccttattttcgtgaaggacggccgtgctcttgtggtggacgtgactgtgaggtacgaggctgctaagagcagccttgaggaggctgcagctgagaaggtgcgtaagtacaagcaccttgagacggaggtgcgtcaccttacgaacgctaaggacgtgacgttcgtgggcttccctcttggggctcgtggcaaatggcatcaggacaacttcaagctgctaactgagcttggactcagtaagtctcgtcaggtaaagatggctgagacgttctctactgtggctctgttcagctctgtggacatcgtgcacatgttcgcttctcgtgctcgtaagtctatggtgatgtgataataggctgccttctgcggggcttgccttctggccatgcccttcttctctcccttgcacctgtacctcttggtctttgaataaagcctgagtaggaaggaccggtaaaaaaaaaaaaaaaaaaaaaaaaaaaaaaacgttgactaaaaaaaaaaaaaaaaaaaaaaaaaaaaaaaaaaaaaaaaaaaaaaaaaaaaaaaaaaaaaaaaaaaaaa

SEQ ID NO: 11268 - DNA, 6179 bp, synthetic construct
  source 1..6179: mol_type = other DNA
gaaataagagagaaaagaagagtaagaagaaatataagagaattcgccaccatggcccctaagaaaaagcggaaggtggacagaaagacaagactgtctgagcctccaaccctggccctgagactgaagccctacaagaccgccatccagcagctgagaagcgtcatcagagccctgaaggaaaataccaccgttacattcctgcctacacccagcctgatcctgcagacagtgcgcagccactgcgtgtctaagatcacatttaattctagctgcctgtatatcaccgacaagtctttccagcctaagaccatcaacaacagcacccctctgctgggcaactttatgtacctgacctccagcaaggacctgactaaattctacgtgcaagacatctccgatctgagcgccaagatctctatgtgcgcccctgatttcaacatggaattcagcagcgcctgtgtgcatggccaggacatcgtcagagagagcgagaacagcgctgtgcacgtggacctggacttcggcgtggtggctgatctgctcaaatggatcggcccccacaccagagtgaagcggaacgtgaagaaagccccttgtcctacaggcacagtgcagatcctggtgcacgccggaccacctgctatcaagttcatccttacaaacggcagcgagctggaattcaccgccaacaaccgggtgtccttccacggcgtgaaaaacatgcggattaacgtgcaactgaaaaatttttaccagaccctgctgaactgcgccgtgaccaagctgccctgcaccctcaggattgtgaccgagcacgacaccctgctgtacgtcgccagcagaaacggcctgttcgccgtggagaacttcctgaccgaggaaccctttcagcggggtgatcctttcgacaagaactacgtgggaaatagcggcaagagcagatccggctccgagactcctggaacaagcgagagcgctacacctgagggcagcaatatcagcggctctagctgcggcagccccaacagcgccgacaccagcagcgacttcaaggacctgtggaccaagctgaaggaatgccacgaccgggaagtgcagggactccaggtgaaggtcaccaaactcaagcaagaaagaatcctggacgcccagagactggaagaattcttcaccaagaaccagcagctgagagagcagcagaaagtgctgcacgagacaatcaaggttctggaagatagactgcgggccggcctgtgcgacagatgcgccgtgaccgaggaacacatgcgcaaaaagcagcaggagttcgagaacattagacagcaaaatctgaaattgatcacagagctgatgaacgagagaaacacactgcaggaggagaacaagaagctgagcgagcagctgcaacagaagatcgagaatgatcagcaacaccaggccgctgagctggaatgtgaagaggacgtgatccccgacagcccaatcacagctttcagcttttctggcgtgaacagactgaggcggaaggaaaacccccacgtgcggtacatcgagcagacccataccaagctggaacacagcgtgtgtgccaacgagatgagaaaggtgtccaagtcctccacccatccccagcacaaccctaacgaaaatgagatcctggtggctgatacctacgaccagtctcagagccctatggccaaggcccacggcaccagctcttatacccctgataagagctccttcaacctggccaccgtggtggccgagacactgggcctgggcgtgcaggaggaaagcgagacacagggcccaatgagccctctgggagatgagctgtaccactgcctggaaggcaaccacaagaaacagccttttgagtccggctccgagactcctggaacaagcgagagcgctacacctgagggcagccctaagagaaaggtgtccagcgccgagggcgctgccaaggaagagcctaaacggagaagcgccagactgagcgccaagccccccgccaaggtggaagccaagcctaagaaggccgccgctaaggacaagagcagcgataagaaagtccagaccaagggcaagcggggcgccaaaggcaaacaggccgaggtggccaaccaggagacaaaggaagatctgcctgctgagaacggcgaaaccaagaccgaggaatctccagcttctgacgaggccggagagaaggaggccaaaagcgacagcggctctgagacacctggaacaagcgagagcgccaccccggaatcctatgaacaacttgcaccacaaccgtgtgtgggagaaactttacattctagcctcccacgagacagtgaactgtttgtgcctgaagaggggagcagcgagaaggagagcgaggacgcgccaaaaacatctcctccgacgcctgggaaacatggtttggaacagactggggaggaaaaagtgatggtgactgttcctgacaaaaatccaccttgtccttgctgtggtacccgggtaaactctgtgttgaatctgattgaacatctgaaagtgtcacacgggaaaaggggggtttgttttcggtgtgcaaaatgtggaaaggaaaatagtaactatcacagtgttgtttgtcattttaagaaatgcaggggtccagagacggagaaagccccagctggggagtggatttgtgaggtatgcaacagagattttacaaccaaaattggcctgggacaacacaagagattggcacacccagcagtgagaaatcaggaaaggatcgttgcttcccaaccgaaagaaacatcaaatagaggtgctcacaaaaggtgctggacaaaggaggaggaagaattactaataagactggaggctcagttcgagggaaacaaaaatattaataagcttattgcagaacacataaccaccaaaacagctaagcagatcagtgacaaaaggcgattgctgtccagaaagccagcagaggagccacgtgaggagcctggaacgtgtcatcacaccaggagagcagctgcgagcctgagaacggagcctgagatgagtcatcacgcccaggcagaggacagagataatggacctgggagacgccctctgccaggcagggcagctgccggagggagaacaatggacgagataagacgccaccctgataagggcaacggacagcagagacccaccaagcaaaaatcagaagaacagctgcaggcttactataaaaagacactagaggaacgactttcagctggggcacttaacaccttcccccgagcattcaagcaggtaatggaaggccgggatataaagctagtaatcaatcagacagcgcaggactgcttcggatgcctggaatccataagccaaataagaacggcaacccgagataaaaaggacacggtgacccgggagaaacacccaaagaaaccttttcagaagtggatgaagaagagagcaatcaaaaaaggtaattatcttcggttccagcgtttattttatcttgatagagggaaactggctaaaatcattttagatgatattgaatgcttgtcttgtgacattcctccttctgagatttactctgtgttcaaggctcgttgggagactgctggcaagttcacttctcttggcgacttcaagttcacggaaaaagtcgacaactctgcattccgagatcttattactgctaaggaggttgagaagaacatgcaggagatgtctaagggctctgccccaggcccagacggcattactcttcgtgatattcagaagatggaccctaagctttctcgtactactgagattttcaacctgtggcttgctgctgggaagattcccgacggcgttcgtgagtgccgtactgtgcttattcctaagtctactaagcctgagcgtcttaaagatataaacaactggcgtcctattactattggctctactcttcttcgtcttttctctcgtattcttactgctcgtcttagcaaggcttgtccactgaaccctcgtcagaagggcttcattcaggctgctggctgctctgagaaccttcagcttcttcagagcatcatttggtctgctaagagggagcaccgtcctttaggtgtcgtgttcgtggacattgctaaggctttcgacactgtgtctcacaagcacattcttcacgtgcttcagcgtcgtggcgtcgaccctcacattatcggtcttgtgagcgacatgtacgagaacattcacacttctattactacgaagaaggctcgtacggaccgtattcagattcgtgtgggcgttaagcagggcgaccctatgtctcctcttcttttcaacttggctatggaccctcttctgtgcgagcttgagacgaacggcaggggccatcatcgtggaacgaactgcatcactgctatggctttcgccgacgaccttgtgcttcttagcgactcttgggaggacatgaagagcaacattaagattcttgaggccttctgcgaccttacgggccttaagactcagggggagaagtgccacggcttctacattaagcctactaaggactcttacactgtgaacgactgcgctgcttggactatcaacggcactcctctcaacatgattcttcctggcgagtctgagaagtaccttggccttcagatcgacccttggactggccttgctaagtccgacctttctactaagttggactcttggcttgaacaaatagaccgtgtgcctcttaagcctcttcagaaaattgagctcttaaaaacttacactattcctcgtcttacttacgttgccgaccacagcgaccttaaggtgtctttccttgaaacgttagaccagaagattcgtactattgtgaaggactggcttcacctacctccgtgcacctgcgatgccatcctgtactcgagcacgagagacggcggtttgggcatcaccaaattggcaggactgatccccagcgtgcaggcccgtagactgcatcggatcgcacagtcatctgacgatacgatgaaatgcttcatggaaaaagagaaaatggaacagctgcataagaaattgtggattcaagctggaggggacagagagaacataccctcgatttgggaagcaccaccgtcgagtgaaccaccaaacaacgtgagcacaaattcggaatgggaagcaccgacccagaaagataaatttccaaagccttgcaattggaggaaaaacgaattcaaaaaatggaccaaattggcatcccaaggccgcggaattgtaaattttgaaagagacaaaattagtaaccattggatccaatactacagacgcatacctcacaggaaactcctcactgcactacaactcagggccaacgtttaccccacgagagaatttctagccaggggtagacaagaccaatacatcaaggcgtgtaggcactgcgatgcggacaacgaatcctgcgcccacatcatcggcaactgcccagtgacacaggacgcccgaatcaagaggcacaattacatctgcgaactgcttctcgaggaggcgaagaagaaggactgggtagtgttcaaggaaccgcacataagggattccaacaaggaactgtacaaacctgacctgatatttgtgaaggatgggcgtgcacttgtcgtggatgtgacagtacggtatgaagcagccaaatcatcgctggaggaagccgctgcagagaaagtgagaaagtacaaacacctggaaacggaagtaagacatctcacgaatgcaaaggacgttacttttgtgggctttcccctaggagcgcgggggaaatggcaccaagataactttaaacttttgactgagcttggcctctccaaatcgaggcaagtgaaaatggcagagactttttccacagtagcgctcttttcatctgtggacattgtacatatgtttgccagtagggccagaaaatctatggttatgtgataataggctgccttctgcggggcttgccttctggccatgcccttcttctctcccttgcacctgtacctcttggtctttgaataaagcctgagtaggaaggaccggtaaaaaaaaaaaaaaaaaaaaaaaaaaaaaaacgttgactaaaaaaaaaaaaaaaaaaaaaaaaaaaaaaaaaaaaaaaaaaaaaaaaaaaaaaaaaaaaaaaaaaaaaa

SEQ ID NO: 11269 - DNA, 5834 bp, synthetic construct
  source 1..5834: mol_type = other DNA
gaaataagagagaaaagaagagtaagaagaaatataagagaattcgccaccatggcccctaagaaaaagcggaaggtggacagaaagacaagactgtctgagcctccaaccctggccctgagactgaagccctacaagaccgccatccagcagctgagaagcgtcatcagagccctgaaggaaaataccaccgttacattcctgcctacacccagcctgatcctgcagacagtgcgcagccactgcgtgtctaagatcacatttaattctagctgcctgtatatcaccgacaagtctttccagcctaagaccatcaacaacagcacccctctgctgggcaactttatgtacctgacctccagcaaggacctgactaaattctacgtgcaagacatctccgatctgagcgccaagatctctatgtgcgcccctgatttcaacatggaattcagcagcgcctgtgtgcatggccaggacatcgtcagagagagcgagaacagcgctgtgcacgtggacctggacttcggcgtggtggctgatctgctcaaatggatcggcccccacaccagagtgaagcggaacgtgaagaaagccccttgtcctacaggcacagtgcagatcctggtgcacgccggaccacctgctatcaagttcatccttacaaacggcagcgagctggaattcaccgccaacaaccgggtgtccttccacggcgtgaaaaacatgcggattaacgtgcaactgaaaaatttttaccagaccctgctgaactgcgccgtgaccaagctgccctgcaccctcaggattgtgaccgagcacgacaccctgctgtacgtcgccagcagaaacggcctgttcgccgtggagaacttcctgaccgaggaaccctttcagcggggtgatcctttcgacaagaactacgtgggaaatagcggcaagagcagatccggctccgagactcctggaacaagcgagagcgctacacctgagggcagcaatatcagcggctctagctgcggcagccccaacagcgccgacaccagcagcgacttcaaggacctgtggaccaagctgaaggaatgccacgaccgggaagtgcagggactccaggtgaaggtcaccaaactcaagcaagaaagaatcctggacgcccagagactggaagaattcttcaccaagaaccagcagctgagagagcagcagaaagtgctgcacgagacaatcaaggttctggaagatagactgcgggccggcctgtgcgacagatgcgccgtgaccgaggaacacatgcgcaaaaagcagcaggagttcgagaacattagacagcaaaatctgaaattgatcacagagctgatgaacgagagaaacacactgcaggaggagaacaagaagctgagcgagcagctgcaacagaagatcgagaatgatcagcaacaccaggccgctgagctggaatgtgaagaggacgtgatccccgacagcccaatcacagctttcagcttttctggcgtgaacagactgaggcggaaggaaaacccccacgtgcggtacatcgagcagacccataccaagctggaacacagcgtgtgtgccaacgagatgagaaaggtgtccaagtcctccacccatccccagcacaaccctaacgaaaatgagatcctggtggctgatacctacgaccagtctcagagccctatggccaaggcccacggcaccagctcttatacccctgataagagctccttcaacctggccaccgtggtggccgagacactgggcctgggcgtgcaggaggaaagcgagacacagggcccaatgagccctctgggagatgagctgtaccactgcctggaaggcaaccacaagaaacagccttttgagagcggctctgagacacctggaacaagcgagagcgccaccccggaatcctatgaacaacttgcaccacaaccgtgtgtgggagaaactttacattctagcctcccacgagacagtgaactgtttgtgcctgaagaggggagcagcgagaaggagagcgaggacgcgccaaaaacatctcctccgacgcctgggaaacatggtttggaacagactggggaggaaaaagtgatggtgactgttcctgacaaaaatccaccttgtccttgctgtggtacccgggtaaactctgtgttgaatctgattgaacatctgaaagtgtcacacgggaaaaggggggtttgttttcggtgtgcaaaatgtggaaaggaaaatagtaactatcacagtgttgtttgtcattttaagaaatgcaggggtccagagacggagaaagccccagctggggagtggatttgtgaggtatgcaacagagattttacaaccaaaattggcctgggacaacacaagagattggcacacccagcagtgagaaatcaggaaaggatcgttgcttcccaaccgaaagaaacatcaaatagaggtgctcacaaaaggtgctggacaaaggaggaggaagaattactaataagactggaggctcagttcgagggaaacaaaaatattaataagcttattgcagaacacataaccaccaaaacagctaagcagatcagtgacaaaaggcgattgctgtccagaaagccagcagaggagccacgtgaggagcctggaacgtgtcatcacaccaggagagcagctgcgagcctgagaacggagcctgagatgagtcatcacgcccaggcagaggacagagataatggacctgggagacgccctctgccaggcagggcagctgccggagggagaacaatggacgagataagacgccaccctgataagggcaacggacagcagagacccaccaagcaaaaatcagaagaacagctgcaggcttactataaaaagacactagaggaacgactttcagctggggcacttaacaccttcccccgagcattcaagcaggtaatggaaggccgggatataaagctagtaatcaatcagacagcgcaggactgcttcggatgcctggaatccataagccaaataagaacggcaacccgagataaaaaggacacggtgacccgggagaaacacccaaagaaaccttttcagaagtggatgaagaagagagcaatcaaaaaaggtaattatcttcggttccagcgtttattttatcttgatagagggaaactggctaaaatcattttagatgatattgaatgcttgtcttgtgacataccactcagtgaaatttattcggtttttaaaacaagatgggaaacaactggtagctttaaaagccttggggactttaaaacttacgggaaggctgacaacactgccttcagagaattaattacggctaaagaaattgagaaaaatgtgcaggaaatgagcaaaggctcggctcccggtccagacgggattactcttggggacgtcgtaaagatggatcccgagttttcccggaccatggagattttcaatttatggttaacaactggtaaaatcccggacatggtgagggggtgcagaaccgttttgattccaaaatcatcaaagccggatcgtttgaaagacattaataactggagacctatcacgatcggttccatcttgctgagactgttctccaggattgtaacagctaggctgagcaaagcgtgccccctgaacccaaggcaaagaggctttatcagagcggcgggatgctctgaaaacttaaaactcctgcaaactataatttggtcggccaaaagagaacacagaccactgggtgttgtattcgtggacatcgccaaggcttttgacaccgtaagccaccagcacatcattcatgctttgcagcaaagagaggtggatccccacatcgtcggtctggtgagcaatatgtacgagaacatcagtacgtatatcaccacaaagaggaacacacacacagacaaaatccagatccgggttggagtaaagcagggtgacccgatgtcgccccttttatttaacctggcaatggaccctctattatgcaagctggaagagagtggcaaaggataccaccgaggacagagcagcatcacagcgatggcatttgcagacgatctggttttgctgagcgactcctgggaaaatatgaatacaaatattagcatactggagaccttctgcaatctgaccggactcaaaacacaggggcaaaagtgccacggcttttacatcaagccgacaaaggactcttacaccatcaatgactgcgctgcctggactatcaacggcacacccctgaacatgatcgaccccggcgaatctgagaaatacctcggcctgcagtttgacccgtggattggaatagcaaggtccggtctctccacaaaactagatttttggcttcagcggatcgatcaagcaccacttaaacctctgcagaaaactgatattctcaaaacatacaccatccctcggctgatctacatagctgaccactcagaagtgaaaagcgcactactcgaaacccttgaccagaagatccggacagcggtcaaggaatggcttcacctacctccgtgcacctgcgatgccatcctgtactcgagcacgagagacggcggtttgggcatcaccaaattggcaggactgatccccagcgtgcaggcccgtagactgcatcggatcgcacagtcatctgacgatacgatgaaatgcttcatggaaaaagagaaaatggaacagctgcataagaaattgtggattcaagctggaggggacagagagaacataccctcgatttgggaagcaccaccgtcgagtgaaccaccaaacaacgtgagcacaaattcggaatgggaagcaccgacccagaaagataaatttccaaagccttgcaattggaggaaaaacgaattcaaaaaatggaccaaattggcatcccaaggccgcggaattgtaaattttgaaagagacaaaattagtaaccattggatccaatactacagacgcatacctcacaggaaactcctcactgcactacaactcagggccaacgtttaccccacgagagaatttctagccaggggtagacaagaccaatacatcaaggcgtgtaggcactgcgatgcggacaacgaatcctgcgcccacatcatcggcaactgcccagtgacacaggacgcccgaatcaagaggcacaattacatctgcgaactgcttctcgaggaggcgaagaagaaggactgggtagtgttcaaggaaccgcacataagggattccaacaaggaactgtacaaacctgacctgatatttgtgaaggatgggcgtgcacttgtcgtggatgtgacagtacggtatgaagcagccaaatcatcgctggaggaagccgctgcagagaaagtgagaaagtacaaacacctggaaacggaagtaagacatctcacgaatgcaaaggacgttacttttgtgggctttcccctaggagcgcgggggaaatggcaccaagataactttaaacttttgactgagcttggcctctccaaatcgaggcaagtgaaaatggcagagactttttccacagtagcgctcttttcatctgtggacattgtacatatgtttgccagtagggccagaaaatctatggttatgtgataataggctgccttctgcggggcttgccttctggccatgcccttcttctctcccttgcacctgtacctcttggtctttgaataaagcctgagtaggaaggaccggtaaaaaaaaaaaaaaaaaaaaaaaaaaaaaaacgttgactaaaaaaaaaaaaaaaaaaaaaaaaaaaaaaaaaaaaaaaaaaaaaaaaaaaaaaaaaaaaaaaaaaaaaa

SEQ ID NO: 11270 - DNA, 6182 bp, synthetic construct
  source 1..6182: mol_type = other DNA
gaaataagagagaaaagaagagtaagaagaaatataagagaattcgccaccatggcccctaagaaaaagcggaaggtgagcgccagccaggacagcagaagccgggacaacggccctgacggaatggagcctgagggagtgatcgaatccaactggaacgagatcgtggacagcttcgacgacatgaacctgagcgagagcctgctgagaggcatctacgcttacggcttcgagaagcctagcgccatccagcaaagagcaatcctgccatgcatcaagggctacgacgtcatcgcccaggcccagagcggcaccggcaaaaccgccaccttcgccatctctatcctgcagcagatcgagctggatctgaaagccacacaagcgttggtgctggcccccacaagagagctggcccagcagatccagaaggtggtgatggctctgggcgactacatgggcgcctcttgtcatgcctgcatcggcggcaccaatgtgcgggctgaagtgcagaagctccagatggaagctccccacatcattgtgggaacaccaggcagggtgttcgatatgctgaatcgccggtacctgtctcctaagtatatcaagatgttcgtgctggacgaggccgacgaaatgctgtctagaggtttcaaggaccagatctacgacatttttcagaaactgaacagcaacacccaggttgtgctgctgtcagccaccatgcctagcgatgtgctcgaggtgaccaagaagttcatgcgggaccctatcagaatcctggtgaagaaagaggagctgactctggagggcatcagacagttctacatcaacgtggaaagagaggaatggaagctggacaccctgtgcgacctgtatgagacactgaccatcacccaggccgtgatctttatcaataccagaagaaaggtcgactggctgacagagaagatgcacgcccgggacttcaccgtgtccgccatgcacggcgatatggaccaaaaggaacgggatgtgattatgagagagttccggtccggcagcagccgggtgctgatcacaacagatctgctggctagaggaatcgatgtgcagcaggtgagcctggtcatcaactacgatctgcctaccaacagagaaaattacatccacagaatcggcagaggcggaagattcggcagaaagggcgtggccataaacatggtgacagaggaagataagcggacccttagagacatcgaaaccttttacaacaccagcatcgaggaaatgcccctgaacgtggccgacctgatctccggctccgagactcctggaacaagcgagagcgctacacctgagggcagcaatatcagcggctctagctgcggcagccccaacagcgccgacaccagcagcgacttcaaggacctgtggaccaagctgaaggaatgccacgaccgggaagtgcagggactccaggtgaaggtcaccaaactcaagcaagaaagaatcctggacgcccagagactggaagaattcttcaccaagaaccagcagctgagagagcagcagaaagtgctgcacgagacaatcaaggttctggaagatagactgcgggccggcctgtgcgacagatgcgccgtgaccgaggaacacatgcgcaaaaagcagcaggagttcgagaacattagacagcaaaatctgaaattgatcacagagctgatgaacgagagaaacacactgcaggaggagaacaagaagctgagcgagcagctgcaacagaagatcgagaatgatcagcaacaccaggccgctgagctggaatgtgaagaggacgtgatccccgacagcccaatcacagctttcagcttttctggcgtgaacagactgaggcggaaggaaaacccccacgtgcggtacatcgagcagacccataccaagctggaacacagcgtgtgtgccaacgagatgagaaaggtgtccaagtcctccacccatccccagcacaaccctaacgaaaatgagatcctggtggctgatacctacgaccagtctcagagccctatggccaaggcccacggcaccagctcttatacccctgataagagctccttcaacctggccaccgtggtggccgagacactgggcctgggcgtgcaggaggaaagcgagacacagggcccaatgagccctctgggagatgagctgtaccactgcctggaaggcaaccacaagaaacagccttttgagagcggctctgagacacctggaacaagcgagagcgccaccccggaatcctatgaacaacttgcaccacaaccgtgtgtgggagaaactttacattctagcctcccacgagacagtgaactgtttgtgcctgaagaggggagcagcgagaaggagagcgaggacgcgccaaaaacatctcctccgacgcctgggaaacatggtttggaacagactggggaggaaaaagtgatggtgactgttcctgacaaaaatccaccttgtccttgctgtggtacccgggtaaactctgtgttgaatctgattgaacatctgaaagtgtcacacgggaaaaggggggtttgttttcggtgtgcaaaatgtggaaaggaaaatagtaactatcacagtgttgtttgtcattttaagaaatgcaggggtccagagacggagaaagccccagctggggagtggatttgtgaggtatgcaacagagattttacaaccaaaattggcctgggacaacacaagagattggcacacccagcagtgagaaatcaggaaaggatcgttgcttcccaaccgaaagaaacatcaaatagaggtgctcacaaaaggtgctggacaaaggaggaggaagaattactaataagactggaggctcagttcgagggaaacaaaaatattaataagcttattgcagaacacataaccaccaaaacagctaagcagatcagtgacaaaaggcgattgctgtccagaaagccagcagaggagccacgtgaggagcctggaacgtgtcatcacaccaggagagcagctgcgagcctgagaacggagcctgagatgagtcatcacgcccaggcagaggacagagataatggacctgggagacgccctctgccaggcagggcagctgccggagggagaacaatggacgagataagacgccaccctgataagggcaacggacagcagagacccaccaagcaaaaatcagaagaacagctgcaggcttactataaaaagacactagaggaacgactttcagctggggcacttaacaccttcccccgagcattcaagcaggtaatggaaggccgggatataaagctagtaatcaatcagacagcgcaggactgcttcggatgcctggaatccataagccaaataagaacggcaacccgagataaaaaggacacggtgacccgggagaaacacccaaagaaaccttttcagaagtggatgaagaagagagcaatcaaaaaaggtaattatcttcggttccagcgtttattttatcttgatagagggaaactggctaaaatcattttagatgatattgaatgcttgtcttgtgacataccactcagtgaaatttattcggtttttaaaacaagatgggaaacaactggtagctttaaaagccttggggactttaaaacttacgggaaggctgacaacactgccttcagagaattaattacggctaaagaaattgagaaaaatgtgcaggaaatgagcaaaggctcggctcccggtccagacgggattactcttggggacgtcgtaaagatggatcccgagttttcccggaccatggagattttcaatttatggttaacaactggtaaaatcccggacatggtgagggggtgcagaaccgttttgattccaaaatcatcaaagccggatcgtttgaaagacattaataactggagacctatcacgatcggttccatcttgctgagactgttctccaggattgtaacagctaggctgagcaaagcgtgccccctgaacccaaggcaaagaggctttatcagagcggcgggatgctctgaaaacttaaaactcctgcaaactataatttggtcggccaaaagagaacacagaccactgggtgttgtattcgtggacatcgccaaggcttttgacaccgtaagccaccagcacatcattcatgctttgcagcaaagagaggtggatccccacatcgtcggtctggtgagcaatatgtacgagaacatcagtacgtatatcaccacaaagaggaacacacacacagacaaaatccagatccgggttggagtaaagcagggtgacccgatgtcgccccttttatttaacctggcaatggaccctctattatgcaagctggaagagagtggcaaaggataccaccgaggacagagcagcatcacagcgatggcatttgcagacgatctggttttgctgagcgactcctgggaaaatatgaatacaaatattagcatactggagaccttctgcaatctgaccggactcaaaacacaggggcaaaagtgccacggcttttacatcaagccgacaaaggactcttacaccatcaatgactgcgctgcctggactatcaacggcacacccctgaacatgatcgaccccggcgaatctgagaaatacctcggcctgcagtttgacccgtggattggaatagcaaggtccggtctctccacaaaactagatttttggcttcagcggatcgatcaagcaccacttaaacctctgcagaaaactgatattctcaaaacatacaccatccctcggctgatctacatagctgaccactcagaagtgaaaagcgcactactcgaaacccttgaccagaagatccggacagcggtcaaggaatggcttcacctacctccgtgcacctgcgatgccatcctgtactcgagcacgagagacggcggtttgggcatcaccaaattggcaggactgatccccagcgtgcaggcccgtagactgcatcggatcgcacagtcatctgacgatacgatgaaatgcttcatggaaaaagagaaaatggaacagctgcataagaaattgtggattcaagctggaggggacagagagaacataccctcgatttgggaagcaccaccgtcgagtgaaccaccaaacaacgtgagcacaaattcggaatgggaagcaccgacccagaaagataaatttccaaagccttgcaattggaggaaaaacgaattcaaaaaatggaccaaattggcatcccaaggccgcggaattgtaaattttgaaagagacaaaattagtaaccattggatccaatactacagacgcatacctcacaggaaactcctcactgcactacaactcagggccaacgtttaccccacgagagaatttctagccaggggtagacaagaccaatacatcaaggcgtgtaggcactgcgatgcggacaacgaatcctgcgcccacatcatcggcaactgcccagtgacacaggacgcccgaatcaagaggcacaattacatctgcgaactgcttctcgaggaggcgaagaagaaggactgggtagtgttcaaggaaccgcacataagggattccaacaaggaactgtacaaacctgacctgatatttgtgaaggatgggcgtgcacttgtcgtggatgtgacagtacggtatgaagcagccaaatcatcgctggaggaagccgctgcagagaaagtgagaaagtacaaacacctggaaacggaagtaagacatctcacgaatgcaaaggacgttacttttgtgggctttcccctaggagcgcgggggaaatggcaccaagataactttaaacttttgactgagcttggcctctccaaatcgaggcaagtgaaaatggcagagactttttccacagtagcgctcttttcatctgtggacattgtacatatgtttgccagtagggccagaaaatctatggttatgtgataataggctgccttctgcggggcttgccttctggccatgcccttcttctctcccttgcacctgtacctcttggtctttgaataaagcctgagtaggaaggaccggtaaaaaaaaaaaaaaaaaaaaaaaaaaaaaaacgttgactaaaaaaaaaaaaaaaaaaaaaaaaaaaaaaaaaaaaaaaaaaaaaaaaaaaaaaaaaaaaaaaaaaaaaa

SEQ ID NO: 11271 - DNA, 6527 bp, synthetic construct
  source 1..6527: mol_type = other DNA
gaaataagagagaaaagaagagtaagaagaaatataagagaattcgccaccatggcccctaagaaaaagcggaaggtgagcgccagccaggacagcagaagccgggacaacggccctgacggaatggagcctgagggagtgatcgaatccaactggaacgagatcgtggacagcttcgacgacatgaacctgagcgagagcctgctgagaggcatctacgcttacggcttcgagaagcctagcgccatccagcaaagagcaatcctgccatgcatcaagggctacgacgtcatcgcccaggcccagagcggcaccggcaaaaccgccaccttcgccatctctatcctgcagcagatcgagctggatctgaaagccacacaagcgttggtgctggcccccacaagagagctggcccagcagatccagaaggtggtgatggctctgggcgactacatgggcgcctcttgtcatgcctgcatcggcggcaccaatgtgcgggctgaagtgcagaagctccagatggaagctccccacatcattgtgggaacaccaggcagggtgttcgatatgctgaatcgccggtacctgtctcctaagtatatcaagatgttcgtgctggacgaggccgacgaaatgctgtctagaggtttcaaggaccagatctacgacatttttcagaaactgaacagcaacacccaggttgtgctgctgtcagccaccatgcctagcgatgtgctcgaggtgaccaagaagttcatgcgggaccctatcagaatcctggtgaagaaagaggagctgactctggagggcatcagacagttctacatcaacgtggaaagagaggaatggaagctggacaccctgtgcgacctgtatgagacactgaccatcacccaggccgtgatctttatcaataccagaagaaaggtcgactggctgacagagaagatgcacgcccgggacttcaccgtgtccgccatgcacggcgatatggaccaaaaggaacgggatgtgattatgagagagttccggtccggcagcagccgggtgctgatcacaacagatctgctggctagaggaatcgatgtgcagcaggtgagcctggtcatcaactacgatctgcctaccaacagagaaaattacatccacagaatcggcagaggcggaagattcggcagaaagggcgtggccataaacatggtgacagaggaagataagcggacccttagagacatcgaaaccttttacaacaccagcatcgaggaaatgcccctgaacgtggccgacctgatctccggctccgagactcctggaacaagcgagagcgctacacctgagggcagcaatatcagcggctctagctgcggcagccccaacagcgccgacaccagcagcgacttcaaggacctgtggaccaagctgaaggaatgccacgaccgggaagtgcagggactccaggtgaaggtcaccaaactcaagcaagaaagaatcctggacgcccagagactggaagaattcttcaccaagaaccagcagctgagagagcagcagaaagtgctgcacgagacaatcaaggttctggaagatagactgcgggccggcctgtgcgacagatgcgccgtgaccgaggaacacatgcgcaaaaagcagcaggagttcgagaacattagacagcaaaatctgaaattgatcacagagctgatgaacgagagaaacacactgcaggaggagaacaagaagctgagcgagcagctgcaacagaagatcgagaatgatcagcaacaccaggccgctgagctggaatgtgaagaggacgtgatccccgacagcccaatcacagctttcagcttttctggcgtgaacagactgaggcggaaggaaaacccccacgtgcggtacatcgagcagacccataccaagctggaacacagcgtgtgtgccaacgagatgagaaaggtgtccaagtcctccacccatccccagcacaaccctaacgaaaatgagatcctggtggctgatacctacgaccagtctcagagccctatggccaaggcccacggcaccagctcttatacccctgataagagctccttcaacctggccaccgtggtggccgagacactgggcctgggcgtgcaggaggaaagcgagacacagggcccaatgagccctctgggagatgagctgtaccactgcctggaaggcaaccacaagaaacagccttttgagtccggctccgagactcctggaacaagcgagagcgctacacctgagggcagccctaagagaaaggtgtccagcgccgagggcgctgccaaggaagagcctaaacggagaagcgccagactgagcgccaagccccccgccaaggtggaagccaagcctaagaaggccgccgctaaggacaagagcagcgataagaaagtccagaccaagggcaagcggggcgccaaaggcaaacaggccgaggtggccaaccaggagacaaaggaagatctgcctgctgagaacggcgaaaccaagaccgaggaatctccagcttctgacgaggccggagagaaggaggccaaaagcgacagcggctctgagacacctggaacaagcgagagcgccaccccggaatcctatgaacaacttgcaccacaaccgtgtgtgggagaaactttacattctagcctcccacgagacagtgaactgtttgtgcctgaagaggggagcagcgagaaggagagcgaggacgcgccaaaaacatctcctccgacgcctgggaaacatggtttggaacagactggggaggaaaaagtgatggtgactgttcctgacaaaaatccaccttgtccttgctgtggtacccgggtaaactctgtgttgaatctgattgaacatctgaaagtgtcacacgggaaaaggggggtttgttttcggtgtgcaaaatgtggaaaggaaaatagtaactatcacagtgttgtttgtcattttaagaaatgcaggggtccagagacggagaaagccccagctggggagtggatttgtgaggtatgcaacagagattttacaaccaaaattggcctgggacaacacaagagattggcacacccagcagtgagaaatcaggaaaggatcgttgcttcccaaccgaaagaaacatcaaatagaggtgctcacaaaaggtgctggacaaaggaggaggaagaattactaataagactggaggctcagttcgagggaaacaaaaatattaataagcttattgcagaacacataaccaccaaaacagctaagcagatcagtgacaaaaggcgattgctgtccagaaagccagcagaggagccacgtgaggagcctggaacgtgtcatcacaccaggagagcagctgcgagcctgagaacggagcctgagatgagtcatcacgcccaggcagaggacagagataatggacctgggagacgccctctgccaggcagggcagctgccggagggagaacaatggacgagataagacgccaccctgataagggcaacggacagcagagacccaccaagcaaaaatcagaagaacagctgcaggcttactataaaaagacactagaggaacgactttcagctggggcacttaacaccttcccccgagcattcaagcaggtaatggaaggccgggatataaagctagtaatcaatcagacagcgcaggactgcttcggatgcctggaatccataagccaaataagaacggcaacccgagataaaaaggacacggtgacccgggagaaacacccaaagaaaccttttcagaagtggatgaagaagagagcaatcaaaaaaggtaattatcttcggttccagcgtttattttatcttgatagagggaaactggctaaaatcattttagatgatattgaatgcttgtcttgtgacattcctccttctgagatttactctgtgttcaaggctcgttgggagactgctggcaagttcacttctcttggcgacttcaagttcacggaaaaagtcgacaactctgcattccgagatcttattactgctaaggaggttgagaagaacatgcaggagatgtctaagggctctgccccaggcccagacggcattactcttcgtgatattcagaagatggaccctaagctttctcgtactactgagattttcaacctgtggcttgctgctgggaagattcccgacggcgttcgtgagtgccgtactgtgcttattcctaagtctactaagcctgagcgtcttaaagatataaacaactggcgtcctattactattggctctactcttcttcgtcttttctctcgtattcttactgctcgtcttagcaaggcttgtccactgaaccctcgtcagaagggcttcattcaggctgctggctgctctgagaaccttcagcttcttcagagcatcatttggtctgctaagagggagcaccgtcctttaggtgtcgtgttcgtggacattgctaaggctttcgacactgtgtctcacaagcacattcttcacgtgcttcagcgtcgtggcgtcgaccctcacattatcggtcttgtgagcgacatgtacgagaacattcacacttctattactacgaagaaggctcgtacggaccgtattcagattcgtgtgggcgttaagcagggcgaccctatgtctcctcttcttttcaacttggctatggaccctcttctgtgcgagcttgagacgaacggcaggggccatcatcgtggaacgaactgcatcactgctatggctttcgccgacgaccttgtgcttcttagcgactcttgggaggacatgaagagcaacattaagattcttgaggccttctgcgaccttacgggccttaagactcagggggagaagtgccacggcttctacattaagcctactaaggactcttacactgtgaacgactgcgctgcttggactatcaacggcactcctctcaacatgattcttcctggcgagtctgagaagtaccttggccttcagatcgacccttggactggccttgctaagtccgacctttctactaagttggactcttggcttgaacaaatagaccgtgtgcctcttaagcctcttcagaaaattgagctcttaaaaacttacactattcctcgtcttacttacgttgccgaccacagcgaccttaaggtgtctttccttgaaacgttagaccagaagattcgtactattgtgaaggactggcttcacctacctccgtgcacctgcgatgccatcctgtactcgagcacgagagacggcggtttgggcatcaccaaattggcaggactgatccccagcgtgcaggcccgtagactgcatcggatcgcacagtcatctgacgatacgatgaaatgcttcatggaaaaagagaaaatggaacagctgcataagaaattgtggattcaagctggaggggacagagagaacataccctcgatttgggaagcaccaccgtcgagtgaaccaccaaacaacgtgagcacaaattcggaatgggaagcaccgacccagaaagataaatttccaaagccttgcaattggaggaaaaacgaattcaaaaaatggaccaaattggcatcccaaggccgcggaattgtaaattttgaaagagacaaaattagtaaccattggatccaatactacagacgcatacctcacaggaaactcctcactgcactacaactcagggccaacgtttaccccacgagagaatttctagccaggggtagacaagaccaatacatcaaggcgtgtaggcactgcgatgcggacaacgaatcctgcgcccacatcatcggcaactgcccagtgacacaggacgcccgaatcaagaggcacaattacatctgcgaactgcttctcgaggaggcgaagaagaaggactgggtagtgttcaaggaaccgcacataagggattccaacaaggaactgtacaaacctgacctgatatttgtgaaggatgggcgtgcacttgtcgtggatgtgacagtacggtatgaagcagccaaatcatcgctggaggaagccgctgcagagaaagtgagaaagtacaaacacctggaaacggaagtaagacatctcacgaatgcaaaggacgttacttttgtgggctttcccctaggagcgcgggggaaatggcaccaagataactttaaacttttgactgagcttggcctctccaaatcgaggcaagtgaaaatggcagagactttttccacagtagcgctcttttcatctgtggacattgtacatatgtttgccagtagggccagaaaatctatggttatgtgataataggctgccttctgcggggcttgccttctggccatgcccttcttctctcccttgcacctgtacctcttggtctttgaataaagcctgagtaggaaggaccggtaaaaaaaaaaaaaaaaaaaaaaaaaaaaaaacgttgactaaaaaaaaaaaaaaaaaaaaaaaaaaaaaaaaaaaaaaaaaaaaaaaaaaaaaaaaaaaaaaaaaaaaaa

SEQ ID NO: 11272-11291 - skipped (20 entries)

SEQ ID NO: 11292 - DNA, 4442 bp, synthetic construct
  source 1..4442: mol_type = other DNA
gaaataagagagaaaagaagagtaagaagaaatataagagaattcgccaccatggcttcttgcccgaaacctggccccccggtttcagcaggggcaatgagtttggaaagtggactgaccacccactccgttctcgccatcgaacgtggtcccaattcgttggcaaattccggatcagactttgggggggggggtctggggctaccgttacgcctattgagggtatcggtcggcactcagacctcccgctccgactgggtagacctggtgtcctggagccacccaggacccacgtctaagtcccagcaggttgacctggtgtctttatttcctaaacaccgggttgacctgttatccaaaaacgaccaggtagacctggtggctcaatttttaccatctaaatttccccccaatttggcagaaaatgatttggctttgctggtgaacttagagttctacagatcggatttgcatgtgtatgagtgtgttcataaggctgcacattgggagggattaagtggtttgcctgaggtgtatgaacaacttgcaccacaaccgtgtgtgggagaaactttacattctagcctcccacgagacagtgaactgtttgtgcctgaagaggggagcagcgagaaggagagcgaggacgcgccaaaaacatctcctccgacgcctgggaaacatggtttggaacagactggggaggaaaaagtgatggtgactgttcctgacaaaaatccaccttgtccttgctgtggtacccgggtaaactctgtgttgaatctgattgaacatctgaaagtgtcacacgggaaaaggggggtttgttttcggtgtgcaaaatgtggaaaggaaaatagtaactatcacagtgttgtttgtcattttaagaaatgcaggggtccagagacggagaaagccccagctggggagtggatttgtgaggtatgcaacagagattttacaaccaaaattggcctgggacaacacaagagattggcacacccagcagtgagaaatcaggaaaggatcgttgcttcccaaccgaaagaaacatcaaatagaggtgctcacaaaaggtgctggacaaaggaggaggaagaattactaataagactggaggctcagttcgagggaaacaaaaatattaataagcttattgcagaacacataaccaccaaaacagctaagcagatcagtgacaaaaggcgattgctgtccagaaagccagcagaggagccacgtatggagcctggaacgtgtcatcacaccaggagagcagctgcgagcctgagaacggagcctgagatgagtcatcacgcccaggcagaggacagagataatggacctgggagacgccctctgccaggcagggcagctgccggagggagaacaatggacgagataagacgccaccctgataagggcaacggacagcagagacccaccaagcaaaaatcagaagaacagctgcggtcccactaccgtaagtcgattgcagaatggataagatctcagaaaataacgtcactcaggaaaatctttgagagagtgattgaagggaaagaagatctcccatccatagtcgatgaagctgcccaggattgctatgcatgcctgaaaagagatctcactgaaggggaaggtcgacaaattcaaaagatccgagagatccgcaggacccacccacaaaaaccatcaaaacaatggacaaaaaaaagggccagaaaacgagggcagttcctacggttccagcggctgttctacttggatagagggaaattggccggtataatcctggacgacgtggaatccctcaaatgtggtattccacttgacgtggtgcatgaagtattcaagtcaagatgggaatcacccggaacattcaagggcctgggtacttttaagaccattggtcaggcagacaattctgctttccaagctatgattaccatgaaggagattaagaaaaacatccgagaaatgaataaaaatgcggctccagggccggatgggatttccttgcgggacctcatgaagattgatccccagtgtgcgaaattaatggaattatttaatttgtggttgttaaccgggtatataccggatggggttaaaaattgtagaacaatattgataccaaaatcaactgtaccagaaaagttaaatgatgtgaataattggagacctataacgattggctcgattatattgagactattttcaaaaatattaacggcacgattaactaaggcatgccctattaacatacgacagaggggttttataaagtcatctggttgttctgaaaatctgaaattattacaactgataattagatatgcaaaaagagaacacaggccccttggggtggtctttgtcgacctggctaaagcatttgatacggtgagccactctcacatactgtcggtattaaaacaaaagggtgtggatgaacatataataaaactaattgaaaactcgtattataacatcaaaacctatattgatttgaaaaatgaaaaatctgactctattggaattcgaattggcgtaaaacaaggcgatccaatgtctccaattttgtttaacttatctgtcgatcctctattatgtaaacttgaagaaatgggtaatggatttcaatgtcatagccaaaatgtaacagcactggccttcgccgacgatttagtattactaagtgggtcctgggagggcatgcaaaataatataacaattgtagagaccttttgtgagctcactggtctcaagatgcagggggaaaagtgccacggcttttatatcaagccaacaaaagattcctatacgatcaatgactgtcccgtgtggactatcaatggcaccccccttaatatgattgaaccaggtagttctgagaaatacttgggtctttatgtcgacccgtggataggaatatctaaaccagaactactggagaaagttgacagatggcttgtgaaagtgggcaaggcaccattaaaaccttttcagaaagtcgacatcttgaaaggatacctgatcccgagagtaatatacctcgcggatcaagcaaatttaaaaccaacatatttagaatccattgacttggctatacgaactggagtcaaggaatggttgcacctaccagcgtgcacgtgtgacgccatcctttattcgaatactcaggatggagggttaggaatcagcagattggcagcactgattccgagtgtgcaggttcggagactgcacagaattgcccaaacctctgacgaagttttaaaaactatcgtcaaaagagaaggaatagaaagagaatttgagaaattatggttgatggccggtggtgataaggaaaggataccatctatatgggacccaaaaactgttatgataatatcggaaacgggcggtgaccaaatattgtcggaatgggagattcccaatccaaaactaatttatccaaaaccctgtaactggagaaaaagggaatttaataattggactaaattactgagccaaggccgaggtattgtaaattttgaaaaagataaaataagtaataattggttaatacactataggggcattcctcaaaggaaattaattacagcattacaattacgggcgaatatatacccgacgagggaatttttagctagaggacggtcggaaacttatattaaatcctgccgtcactgtcaggccgataatgagacttgcgcacatataattggctactgtccatctgtacaagatgcgagaattaaaagacataatcaaatctgtcatatattggcagaagaagctaagagaaaagattggttggtatatcaagaaccattattaagagatcaacaaaatgaattatataaaccggatttaatttttgttaaagggaatcaagcaatagtaacggatataacaataagatatgaaacaactattacaacgttggaagaggctgccttagaaaaagcaaagaaatatgtacatctagaatcgcaagtccaggatctgacaaatacatctgttataaattttacaggctttcctttgggatctcgtggcaaatggtaccaaggtaactacaaaatactaaatgaactgggtctctccaactcccgacaggagaaggtcgccagacgattatcaaactatgctttattcagctcggtggatatcattcacatgtttgcgagtaaagcgagaacggaggtaagatgataataggctgccttctgcggggcttgccttctggccatgcccttcttctctcccttgcacctgtacctcttggtctttgaataaagcctgagtaggaaggaccggtaaaaaaaaaaaaaaaaaaaaaaaaaaaaaaacgttgactaaaaaaaaaaaaaaaaaaaaaaaaaaaaaaaaaaaaaaaaaaaaaaaaaaaaaaaaaaaaaaaaaaaaaa

SEQ ID NO: 11293 - DNA, 4439 bp, synthetic construct
  source 1..4439: mol_type = other DNA
gaaataagagagaaaagaagagtaagaagaaatataagagaattcgccaccatggcttcttgcccgaaacctggccccccggtttcagcaggggcaatgagtttggaaagtggactgaccacccactccgttctcgccatcgaacgtggtcccaattcgttggcaaattccggatcagactttgggggggggggtctggggctaccgttacgcctattgagggtatcggtcggcactcagacctcccgctccgactgggtagacctggtgtcctggagccacccaggacccacgtctaagtcccagcaggttgacctggtgtctttatttcctaaacaccgggttgacctgttatccaaaaacgaccaggtagacctggtggctcaatttttaccatctaaatttccccccaatttggcagaaaatgatttggctttgctggtgaacttagagttctacagatcggatttgcatgtgtatgagtgtgttcataaggctgcacattgggagggattaagtggtttgcctgaggtgtatgaacaacttgcaccacaaccgtgtgtgggagaaactttacattctagcctcccacgagacagtgaactgtttgtgcctgaagaggggagcagcgagaaggagagcgaggacgcgccaaaaacatctcctccgacgcctgggaaacatggtttggaacagactggggaggaaaaagtgatggtgactgttcctgacaaaaatccaccttgtccttgctgtggtacccgggtaaactctgtgttgaatctgattgaacatctgaaagtgtcacacgggaaaaggggggtttgttttcggtgtgcaaaatgtggaaaggaaaatagtaactatcacagtgttgtttgtcattttaagaaatgcaggggtccagagacggagaaagccccagctggggagtggatttgtgaggtatgcaacagagattttacaaccaaaattggcctgggacaacacaagagattggcacacccagcagtgagaaatcaggaaaggatcgttgcttcccaaccgaaagaaacatcaaatagaggtgctcacaaaaggtgctggacaaaggaggaggaagaattactaataagactggaggctcagttcgagggaaacaaaaatattaataagcttattgcagaacacataaccaccaaaacagctaagcagatcagtgacaaaaggcgattgctgtccagaaagccagcagaggagccacgtatggagcctggaacgtgtcatcacaccaggagagcagctgcgagcctgagaacggagcctgagatgagtcatcacgcccaggcagaggacagagataatggacctgggagacgccctctgccaggcagggcagctgccggagggagaacaatggacgagataagacgccaccctgataagggcaacggacagcagagacccaccaagcaaaaatcagaagaacagctgcaggcttactataaaaagacactagaggaacgactttcagctggggcacttaacaccttcccccgagcattcaagcaggtaatggaaggccgggatataaagctagtaatcaatcagacagcgcaggactgcttcggatgcctggaatccataagccaaataagaacggcaacccgagataaaaaggacacggtgacccgggagaaacacccaaagaaaccttttcagaagtggatgaagaagagagcaatcaaaaaaggtaattatcttcggttccagcgtttattttatcttgatagagggaaactggctaaaatcattttagatgatattgaatgcttgtcttgtgacataccactcagtgaaatttattcggtttttaaaacaagatgggaaacaactggtagctttaaaagccttggggactttaaaacttacgggaaggctgacaacactgccttcagagaattaattacggctaaagaaattgagaaaaatgtgcaggaaatgagcaaaggctcggctcccggtccagacgggattactcttggggacgtcgtaaagatggatcccgagttttcccggaccatggagattttcaatttatggttaacaactggtaaaatcccggacatggtgagggggtgcagaaccgttttgattccaaaatcatcagacccggatcgtttgaaagacattaataactggagacctatcacgatcggttccatcttgctgagactgttctccaggattgtaacagctaggctgagcaaagcgtgccccctgaacccaaggcaaagaggctttatcagagcggcgggatgctctgaaaacttaaaactcctgcaaactataatttggtcggccaaaagagaacacagaccactgggtgttgtattcgtggacatcgccaaggcttttgacaccgtaagccaccagcacatcattcatgctttgcagcaaagagaggtggatccccacatcgtcggtctggtgagcaatatgtacgagaacatcagtacgtatatcaccacaaagaggaacacacacacagacaaaatccagatccgggttggagtaaagcagggtgacccgatgtcgccccttttatttaacctggcaatggaccctctattatgcaagctggaagagagtggcaaaggataccaccgaggacagagcagcatcacagcgatggcatttgcagacgatctggttttgctgagcgactcctgggaaaatatgaatacaaatattagcatactggagaccttctgcaatctgaccggactcaaaacacaggggcaaaagtgccacggcttttacatcaagccgacaaagaagtcttacaccatcaatgactgcgctgcctggactatcaacggcacacccctgaacatgatcgaccccggcgaatctgagaaatacctcggcctgcagtttgacccgtggattggaatagcaaggtccggtctctccacaaaactagatttttggcttcagcggatcgatcaagcaccacttaaacctctgcagaaactggatattctcaaaacatacaccatccctcggctgatctacatagctgaccactcagaagtgaaaagcgcactactcgaaacccttgaccagaagatccggacagcggtcaaggaatggcttcacctacctccgtgcacctgcgatgccatcctgtactcgagcacgagagacggcggtttgggcatcaccaaattggcaggactgatccccagcgtgcaggcccgtagactgcatcggatcgcacagtcatctgacgatacgatgaaatgcttcatggaaaaagagaaaatggaacagctgcataagaaattgtggattcaagctggaggggacagagagaacataccctcgatttgggaagcaccaccgtcgagtgaaccaccaaacaacgtgagcacaaattcggaatgggaagcaccgacccagaaagataaatttccaaagccttgcaattggaggaaaaacgaattcaaaaaatggaccaaattggcatcccaaggccgcggaattgtaaattttgaaagagacaaaattagtaaccattggatccaatactacagacgcatacctcacaggaaactcctcactgcactacaactcagggccaacgtttaccccacgagagaatttctagccaggggtagacaagaccaatacatcaaggcgtgtaggcactgcgatgcggacaacgaatcctgcgcccacatcatcggcaactgcccagtgacacaggacgcccgaatcaagaggcacaattacatctgcgaactgcttctcgaggaggcgaagaagaaggactgggtagtgttcaaggaaccgcacataagggattccaacaaggaactgtacaaacctgacctgatatttgtgaaggatgggcgtgcacttgtcgtggatgtgacagtacggtatgaagcagccaaatcatcgctggaggaagccgctgcagagaaagtgagaaagtacaaacacctggaaacggaagtaagacatctcacgaatgcaaaggacgttacttttgtgggctttcccctaggagcgcgggggaaatggcaccaagataactttaaacttttgactgagcttggcctctccaaatcgaggcaagtgaaaatggcagagactttttccacagtagcgctcttttcatctgtggacattgtacatatgtttgccagtagggccagaaaatctatggttatgtgataataggctgccttctgcggggcttgccttctggccatgcccttcttctctcccttgcacctgtacctcttggtctttgaataaagcctgagtaggaaggaccggtaaaaaaaaaaaaaaaaaaaaaaaaaaaaaaacgttgactaaaaaaaaaaaaaaaaaaaaaaaaaaaaaaaaaaaaaaaaaaaaaaaaaaaaaaaaaaaaaaaaaaaaaa

SEQ ID NO: 11294 - DNA, 3983 bp, synthetic construct
  source 1..3983: mol_type = other DNA
gaaataagagagaaaagaagagtaagaagaaatataagagaattcgccaccatgggttggtctgggcggatttggttcgtcacagttgccacccagacaaaatactcggattgggcatttacggttcattccatcacgaaccctgagctggcaggggacgggattgcagatttgagaggactggaatttgtgaatagcgagaagggatattatgtggggcattccccttcccgatccagccttctggctactttaccggaggtatatgaaactccgagggtgatgggcaaagtcaccagcccgagttctgtgctgaccgaacatgagggagatagaacatcttctcccccaagaacaccacctcctattcttgagaccggggcagaccttccacaggagggcacacctgtggtaaaggtcccggatgataatccagcgtgtccatgctgcggtaatcgaataggaaggatttcggggcttatcgatcacttaaagagaacccatggaaagaaaaagatcctctttcaatgtgccaaatgtgggagaacaaatctgaaacatcacagtatcgcttgtcacgttccaaagtgcaaaggcgccaaggggaccagcccattaaggggctgggcctgcgaggaatgcaatagaacatttgggactaaaattggcttaagtcagcataagcggcttgctcacccagttactaggaatatagagcgaataacagcttcccgcccgaaagaggaaagtgcacgaggtgcacaccgtcggtgttggtctgaagaggaagtggagttgctcaagaagttggaaaaacagtatgaagggaataagaatataaacaaactaattgcagaacaccttccatcaaaaacagcaaagcagataagtgacaaaagaaggggactgataaaaagtccatcaaagaaaaatgggaaagatctgacgttgcgggaacaactcacggaggaaggagaacatctaattgagagtggctcccaagaaggtgggggactacaggcttactataaaaagacactagaggaacgactttcagctggggcacttaacaccttcccccgagcattcaagcaggtaatggaaggccgggatataaagctagtaatcaatcagacagcgcaggactgcttcggatgcctggaatccataagccaaataagaacggcaacccgagataaaaaggacacggtgacccgggagaaacacccaaagaaaccttttcagaagtggatgaagaagagagcaatcaaaaaaggtaattatcttcggttccagcgtttattttatcttgatagagggaaactggctaaaatcattttagatgatattgaatgcttgtcttgtgacataccactcagtgaaatttattcggtttttaaaacaagatgggaaacaactggtagctttaaaagccttggggactttaaaacttacgggaaggctgacaacactgccttcagagaattaattacggctaaagaaattgagaaaaatgtgcaggaaatgagcaaaggctcggctcccggtccagacgggattactcttggggacgtcgtaaagatggatcccgagttttcccggaccatggagattttcaatttatggttaacaactggtaaaatcccggacatggtgagggggtgcagaaccgttttgattccaaaatcatcagacccggatcgtttgaaagacattaataactggagacctatcacgatcggttccatcttgctgagactgttctccaggattgtaacagctaggctgagcaaagcgtgccccctgaacccaaggcaaagaggctttatcagagcggcgggatgctctgaaaacttaaaactcctgcaaactataatttggtcggccaaaagagaacacagaccactgggtgttgtattcgtggacatcgccaaggcttttgacaccgtaagccaccagcacatcattcatgctttgcagcaaagagaggtggatccccacatcgtcggtctggtgagcaatatgtacgagaacatcagtacgtatatcaccacaaagaggaacacacacacagacaaaatccagatccgggttggagtaaagcagggtgacccgatgtcgccccttttatttaacctggcaatggaccctctattatgcaagctggaagagagtggcaaaggataccaccgaggacagagcagcatcacagcgatggcatttgcagacgatctggttttgctgagcgactcctgggaaaatatgaatacaaatattagcatactggagaccttctgcaatctgaccggactcaaaacacaggggcaaaagtgccacggcttttacatcaagccgacaaagaagtcttacaccatcaatgactgcgctgcctggactatcaacggcacacccctgaacatgatcgaccccggcgaatctgagaaatacctcggcctgcagtttgacccgtggattggaatagcaaggtccggtctctccacaaaactagatttttggcttcagcggatcgatcaagcaccacttaaacctctgcagaaactggatattctcaaaacatacaccatccctcggctgatctacatagctgaccactcagaagtgaaaagcgcactactcgaaacccttgaccagaagatccggacagcggtcaaggaatggcttcacctacctccgtgcacctgcgatgccatcctgtactcgagcacgagagacggcggtttgggcatcaccaaattggcaggactgatccccagcgtgcaggcccgtagactgcatcggatcgcacagtcatctgacgatacgatgaaatgcttcatggaaaaagagaaaatggaacagctgcataagaaattgtggattcaagctggaggggacagagagaacataccctcgatttgggaagcaccaccgtcgagtgaaccaccaaacaacgtgagcacaaattcggaatgggaagcaccgacccagaaagataaatttccaaagccttgcaattggaggaaaaacgaattcaaaaaatggaccaaattggcatcccaaggccgcggaattgtaaattttgaaagagacaaaattagtaaccattggatccaatactacagacgcatacctcacaggaaactcctcactgcactacaactcagggccaacgtttaccccacgagagaatttctagccaggggtagacaagaccaatacatcaaggcgtgtaggcactgcgatgcggacaacgaatcctgcgcccacatcatcggcaactgcccagtgacacaggacgcccgaatcaagaggcacaattacatctgcgaactgcttctcgaggaggcgaagaagaaggactgggtagtgttcaaggaaccgcacataagggattccaacaaggaactgtacaaacctgacctgatatttgtgaaggatgggcgtgcacttgtcgtggatgtgacagtacggtatgaagcagccaaatcatcgctggaggaagccgctgcagagaaagtgagaaagtacaaacacctggaaacggaagtaagacatctcacgaatgcaaaggacgttacttttgtgggctttcccctaggagcgcgggggaaatggcaccaagataactttaaacttttgactgagcttggcctctccaaatcgaggcaagtgaaaatggcagagactttttccacagtagcgctcttttcatctgtggacattgtacatatgtttgccagtagggccagaaaatctatggttatgtgataataggctgccttctgcggggcttgccttctggccatgcccttcttctctcccttgcacctgtacctcttggtctttgaataaagcctgagtaggaaggaccggtaaaaaaaaaaaaaaaaaaaaaaaaaaaaaaacgttgactaaaaaaaaaaaaaaaaaaaaaaaaaaaaaaaaaaaaaaaaaaaaaaaaaaaaaaaaaaaaaaaaaaaaaa

SEQ ID NO: 11295 - DNA, 3998 bp, synthetic construct
  source 1..3998: mol_type = other DNA
gaaataagagagaaaagaagagtaagaagaaatataagagaattcgccaccatgggttggtctgggcggatttggttcgtcacagttgccacccagacaaaatactcggattgggcatttacggttcattccatcacgaaccctgagctggcaggggacgggattgcagatttgagaggactggaatttgtgaatagcgagaagggatattatgtggggcattccccttcccgatccagccttctggctactttaccggaggtatatgaaactccgagggtgatgggcaaagtcaccagcccgagagactgtgaagcagttttggtcggggaaggggaggggagcagtgaggaggtcacaccagaaccatcgccccctgaaccagagacaacctccgtggcagcatctccaactctgcctgtaaccaacgtggaacagtcgtcggagagccccatcacagtaattgtgccggataaaaatccttcatgtccctgctgtggtattcgagcgagcggggtatcgggtttgattgagcatttgcgggaggttcacaggaggagggaggtttgctttcggtgttctaaatgtgagaaagaaaatactaattaccatagcattatttgtcattttcctaaatgcaagggtaaagaggaaacatctgcgccagccggggaatggtcctgtgaggtatgtggacgagattttaatactaaaattggcttgagtcagcataagcggcttgctcacccagttactaggaatatagagcgaataacagcttcccgcccgaaagaggaaagtgcacgaggtgcacaccgtcggtgttggtctgaagaggaagtggagttgctcaagaagttggaaaaacagtatgaagggaataagaatataaacaaactaattgcagaacaccttccatcaaaaacagcaaagcagataagtgacaaaagaaggggactgataaaaagtccatcaaagggcaacggacagcagagacccaccaagcaaaaatcagaagaacagctgcaggcttactataaaaagacactagaggaacgactttcagctggggcacttaacaccttcccccgagcattcaagcaggtaatggaaggccgggatataaagctagtaatcaatcagacagcgcaggactgcttcggatgcctggaatccataagccaaataagaacggcaacccgagataaaaaggacacggtgacccgggagaaacacccaaagaaaccttttcagaagtggatgaagaagagagcaatcaaaaaaggtaattatcttcggttccagcgtttattttatcttgatagagggaaactggctaaaatcattttagatgatattgaatgcttgtcttgtgacataccactcagtgaaatttattcggtttttaaaacaagatgggaaacaactggtagctttaaaagccttggggactttaaaacttacgggaaggctgacaacactgccttcagagaattaattacggctaaagaaattgagaaaaatgtgcaggaaatgagcaaaggctcggctcccggtccagacgggattactcttggggacgtcgtaaagatggatcccgagttttcccggaccatggagattttcaatttatggttaacaactggtaaaatcccggacatggtgagggggtgcagaaccgttttgattccaaaatcatcagacccggatcgtttgaaagacattaataactggagacctatcacgatcggttccatcttgctgagactgttctccaggattgtaacagctaggctgagcaaagcgtgccccctgaacccaaggcaaagaggctttatcagagcggcgggatgctctgaaaacttaaaactcctgcaaactataatttggtcggccaaaagagaacacagaccactgggtgttgtattcgtggacatcgccaaggcttttgacaccgtaagccaccagcacatcattcatgctttgcagcaaagagaggtggatccccacatcgtcggtctggtgagcaatatgtacgagaacatcagtacgtatatcaccacaaagaggaacacacacacagacaaaatccagatccgggttggagtaaagcagggtgacccgatgtcgccccttttatttaacctggcaatggaccctctattatgcaagctggaagagagtggcaaaggataccaccgaggacagagcagcatcacagcgatggcatttgcagacgatctggttttgctgagcgactcctgggaaaatatgaatacaaatattagcatactggagaccttctgcaatctgaccggactcaaaacacaggggcaaaagtgccacggcttttacatcaagccgacaaagaagtcttacaccatcaatgactgcgctgcctggactatcaacggcacacccctgaacatgatcgaccccggcgaatctgagaaatacctcggcctgcagtttgacccgtggattggaatagcaaggtccggtctctccacaaaactagatttttggcttcagcggatcgatcaagcaccacttaaacctctgcagaaactggatattctcaaaacatacaccatccctcggctgatctacatagctgaccactcagaagtgaaaagcgcactactcgaaacccttgaccagaagatccggacagcggtcaaggaatggcttcacctacctccgtgcacctgcgatgccatcctgtactcgagcacgagagacggcggtttgggcatcaccaaattggcaggactgatccccagcgtgcaggcccgtagactgcatcggatcgcacagtcatctgacgatacgatgaaatgcttcatggaaaaagagaaaatggaacagctgcataagaaattgtgggttcaagcgggaggagatagggagaaagttcctgcaatctgggaagctagacctacgatcgagtcacctaatttacaagaggtaggggtttcttctgagtgggaagcaccgactctgaaaaacaaatttcccaagccgtgcaattggagaaagatagaatttgaaaaatggaccaatttgatatctcagggacggggaatagggaatttcaagggggaccaaataagtaacaattggctgcaacactataggaacatacctcacaggaaactccttactgctgtacagctgagggccaatgtatatccaactagggaatttttagccaggggtaggcaggataaatacatcagaacgtgcagacattgcgacgcggccaacgaaacgtgcgcacatattattggcaattgccccataactcaggacgcgagaatcaagaggcacaactatatttgtcaagtgttgtcggagaaagcaatagggaaggactggatagtatataaagaaccgcacatcagggactccaacaaagaactttataaaccggacctgatatttgtgaaagacaaccgagcgtacgtcgtggatgtgaccgtgcgatacgaatcggacgagacctctttggagatggcggccacggagaaagtggacaagtacaaacacctgaccaaagagatacgaacgatcaccaacgcgaaagacattgtttttatgggctttcccctcggagctcgggggaaatggtaccaagggaactttgaacttttgaaagcccttggactctccaaatcggatcgagaaaagactgcccggtccttgtcatccatagcactcatgtcatctgtggacatcgtccacatatttgccagcaaatccaggacttgcactacactgtgataataggctgccttctgcggggcttgccttctggccatgcccttcttctctcccttgcacctgtacctcttggtctttgaataaagcctgagtaggaaggaccggtaaaaaaaaaaaaaaaaaaaaaaaaaaaaaaacgttgactaaaaaaaaaaaaaaaaaaaaaaaaaaaaaaaaaaaaaaaaaaaaaaaaaaaaaaaaaaaaaaaaaaaaaa

SEQ ID NO: 11296 - DNA, 4175 bp, synthetic construct
  source 1..4175: mol_type = other DNA
gaaataagagagaaaagaagagtaagaagaaatataagagaattcgccaccatgggtcggccgatgcgaatttccttcgtgtcggtggccacacaaacaagtcctttggacttgcgtgacaatgtggtctcctgttccatccaagaccacaaaactgggggattgctggaagggagatttgaaataaggggattggagtttgtgaactctgatctggagggtctaaaatgccagcaatctcccaccctgactgacctcctggctgtgcttcctgaggtgtatgaggtacctaactcttttagtctcggggacaagaacacctgtccgactccggtggaggacgagaacgaagaggaggagccctcgcctctcggggccgtggctgggacttctccattgccatcgactccggtctcacgatcccgtgacgatctcccaacagagggcactcctgtggtgaagatcccggacaagaatacatcatgtccgtgttgtggtaataggatgggtaaactgtcgggtttaattgaacatctgaaaagagcacatgggaagaaaaagatcttattccaatgtgctcggtgtgggagaactgatgtcaaacaccatagtattgcttgtcattttcctaagtgtaaggggcctgtggaagcctctcccgagaggagttggaagtgtgaggtatgcaacagagattttacaaccaaaattggcctgggacaacacaagagattggcacacccagcagtgagaaatcaggaaaggatcgttgcttcccaaccgaaagaaacatcaaatagaggtgctcacaaaaggtgctggacaaaggaggaggaagaattactaataagactggaggctcagttcgagggaaacaaaaatattaataagcttattgcagaacacataaccaccaaaacagctaagcagatcagtgacaaaaggcgattgctgtccagaaagccagcagaggagccacgtatggagcctggaacgtgtcatcacaccaggagagcagctgcgagcctgagaacggagcctgagatgagtcatcacgcccaggcagaggacagagataatggacctgggagacgccctctgccaggcagggcagctgccggagggagaacaatggacgagataagacgccaccctgataagggcaacggacagcagagacccaccaagcaaaaatcagaagaacagctgcaggcttactataaaaagacactagaggaacgactttcagctggggcacttaacaccttcccccgagcattcaagcaggtaatggaaggccgggatataaagctagtaatcaatcagacagcgcaggactgcttcggatgcctggaatccataagccaaataagaacggcaacccgagataaaaaggacacggtgacccgggagaaacacccaaagaaaccttttcagaagtggatgaagaagagagcaatcaaaaaaggtaattatcttcggttccagcgtttattttatcttgatagagggaaactggctaaaatcattttagatgatattgaatgcttgtcttgtgacataccactcagtgaaatttattcggtttttaaaacaagatgggaaacaactggtagctttaaaagccttggggactttaaaacttacgggaaggctgacaacactgccttcagagaattaattacggctaaagaaattgagaaaaatgtgcaggaaatgagcaaaggctcggctcccggtccagacgggattactcttggggacgtcgtaaagatggatcccgagttttcccggaccatggagattttcaatttatggttaacaactggtaaaatcccggacatggtgagggggtgcagaaccgttttgattccaaaatcatcagacccggatcgtttgaaagacattaataactggagacctatcacgatcggttccatcttgctgagactgttctccaggattgtaacagctaggctgagcaaagcgtgccccctgaacccaaggcaaagaggctttatcagagcggcgggatgctctgaaaacttaaaactcctgcaaactataatttggtcggccaaaagagaacacagaccactgggtgttgtattcgtggacatcgccaaggcttttgacaccgtaagccaccagcacatcattcatgctttgcagcaaagagaggtggatccccacatcgtcggtctggtgagcaatatgtacgagaacatcagtacgtatatcaccacaaagaggaacacacacacagacaaaatccagatccgggttggagtaaagcagggtgacccgatgtcgccccttttatttaacctggcaatggaccctctattatgcaagctggaagagagtggcaaaggataccaccgaggacagagcagcatcacagcgatggcatttgcagacgatctggttttgctgagcgactcctgggaaaatatgaatacaaatattagcatactggagaccttctgcaatctgaccggactcaaaacacaggggcaaaagtgccacggcttttacatcaagccgacaaagaagtcttacaccatcaatgactgcgctgcctggactatcaacggcacacccctgaacatgatcgaccccggcgaatctgagaaatacctcggcctgcagtttgacccgtggattggaatagcaaggtccggtctctccacaaaactagatttttggcttcagcggatcgatcaagcaccacttaaacctctgcagaaactggatattctcaaaacatacaccatccctcggctgatctacatagctgaccactcagaagtgaaaagcgcactactcgaaacccttgaccagaagatccggacagcggtcaaggaatggcttcacctacctccgtgcacctgcgatgccatcctgtactcgagcacgagagacggcggtttgggcatcaccaaattggcaggactgatccccagcgtgcaggcccgtagactgcatcggatcgcacagtcatctgacgatacgatgaaatgcttcatggaaaaagagaaaatggaacagctgcataagaaattgtggattcaagctggaggggacagagagaacataccctcgatttgggaagcaccaccgtcgagtgaaccaccaaacaacgtgagcacaaattcggaatgggaagcaccgacccagaaagataaatttccaaagccttgcaattggaggaaaaacgaattcaaaaaatggaccaaattggcatcccaaggccgcggaattgtaaattttgaaagagacaaaattagtaaccattggatccaatactacagacgcatacctcacaggaaactcctcactgcactacaactcagggccaacgtttaccccacgagagaatttctagccaggggtagacaagaccaatacatcaaggcgtgtaggcactgcgatgcggacaacgaatcctgcgcccacatcatcggcaactgcccagtgacacaggacgcccgaatcaagaggcacaattacatctgcgaactgcttctcgaggaggcgaagaagaaggactgggtagtgttcaaggaaccgcacataagggattccaacaaggaactgtacaaacctgacctgatatttgtgaaggatgggcgtgcacttgtcgtggatgtgacaattcgatacgagagtaaactgtcatcactggcggacgcggcggcagaaaaagtaaagaaatattgccatcttaaaaatcaaattcaagaattgacgaatgccaaaaatatcaaatttaagggattccctgtgggcgcacgaggtaaatggtattctggcaattacgaagtgttgaaagcattaggaatctcaaactcccgacaagataaaattgcgcgatgtatgtcaaggaaagctttatttacttctgtcgatatcgtacatatgtttgtgagtcattctagatctattgtaagaacttgataataggctgccttctgcggggcttgccttctggccatgcccttcttctctcccttgcacctgtacctcttggtctttgaataaagcctgagtaggaaggaccggtaaaaaaaaaaaaaaaaaaaaaaaaaaaaaaacgttgactaaaaaaaaaaaaaaaaaaaaaaaaaaaaaaaaaaaaaaaaaaaaaaaaaaaaaaaaaaaaaaaaaaaaaa

SEQ ID NO: 11297 - DNA, 4373 bp, synthetic construct
  source 1..4373: mol_type = other DNA
gaaataagagagaaaagaagagtaagaagaaatataagagaattcgccaccatgggtcggccgatgcgaatttccttcgtgtcggtggccacacaaacaagtcctttggacttgcgtgacaatgtggtctcctgttccatccaagaccacaaaactgggggattgctggaagggagatttgaaataaggggattggagtttgtgaactctgatctggagggtctaaaatgccagcaatctcccaccctgactgacctcctggctgtgcttcctgaggtgtatgaggtacctaactcttttagtctcggggacaagaacacctgtccgactccggtggaggacgagaacgaagaggaggagccctcgcctctcggggccgtggctgggacttctccattgccatcgactccggtctcacgatcccgtgacgatctcccaacagagggcactcctgtggtgaagatcccggacaagaatacatcatgtccgtgttgtggtaataggatgggtaaactgtcgggtttaattgaacatctgaaaagagcacatgggaagaaaaagatcttattccaatgtgctcggtgtgggagaactgatgtcaaacaccatagtattgcttgtcattttcctaagtgtaaggggcctgtggaagcctctcccgagaggagttggaagtgtgaggtatgtggacgagattttaatactaaaattggcttgggacaacataaaagattggcacacccagctgttagaaatcaggaaagggtcgctgcttcccacccaaaagaaaattctaaacgaggagctcataaaaaatgttggactgaagaagaggaaaaattattaatagaattaatagctcagttcgaggggcatgcaaatattaataaattaattgcggaacatattacaaccaaaacagctaaacaaattagtgaaaaaaggagactgctctccaaaaaactaatggtagtggaggcagaatgtgaacctgggccaagtcatcggaccaggagagcagctgcagagataaggaagggagctgagatgaatcaccataatgaggatgctgctgaggacaatggagctgggaggggtcccctgaccaggagagcagctgcccggggggaaacaaaagaagagataagccagtttcctgataaggccaacgatcagcaggaggccagtagcagtgggaggggcccagtgaccaggagagcagctgcaggaaagaaaacaaaaaagagtattgatcaccctactgataaggccaacggccagcaggtagccatcagcactagaaggggttgtttgaatagaggagtgactgccggggtagaaacaatagagggctcgagtcacctccctgataaggacagtgacggacagggcacccccagccgggagaaggagggacaattacaagatcactatcaagaagtcatcggagcctggttatcagatgggaggatcaatacctttccagaggcattcaaagggttgttagggaaacgagagatacaggcaacgatcaatcagtcaatactggattgttttgggggcattgattcaaaaagccaggtgaacaaaatgactcgagataagaaagataaaaagccagggagacctccccagaagtggatgaaaaagagagccatcaaaagaggtagctatcttcgcttccaacgtcttttccatcttgataggggaaaattagccaagattgttttggacaatatcgaatgtttgacgtgcgatatcccacccagtgaaatttattccgtttttaaggccaggtgggaaacagcaggcaaatttaccagtcttggggactttaaatttactgaaaaggtggacaatagtgcattcagggatttaattacagctaaggaagtagaaaagaacatgcaagaaatgagcaaaggctcggctcctggtccagatggaattactctgagagacattcaaaaaatggatcctaagctctccaggaccacagagattttcaacctttggttggctgcaggcaaaattccggatggggtgagggaatgcaggactgtcttaattccaaaatcaacaaaaccagaacgcttaaaggacattaacaattggagaccaattacaatcggatccaccttgcttagattattttccaggattttaacagccagactaagcaaggcatgccccctcaacccaagacagaagggcttcattcaagcagccggatgctcagaaaacctgcaactcctgcaatccataatttggtcagcaaaacgggaacacaggcccctgggtgtcgtatttgtggacatcgcaaaggcttttgacacagtaagccacaagcacattctacacgttctgcagcggaggggagtggatcctcacatcatcggcctggtgagtgatatgtatgaaaacattcatacttctatcaccacgaagaaagcacgtacggatcgcatccagatccgagttggagttaaacagggcgacccgatgtctccccttctattcaatctggcaatggaccccctgctgtgcgaactggaaacgaacggcaggggacaccaccgcggcacaaattgcatcacagccatggcgtttgctgacgacctggtcctactgagtgactcctgggaggacatgaagagcaacatcaagatattggaggccttctgcgatctcaccggcctcaaaacgcagggagagaagtgccacggcttttacatcaagccgacgaaggactcgtacacggtcaacgactgtgctgcttggactataaacggcactcccctgaacatgattcttcccggtgagtccgagaaatacctgggcctgcagatagacccatggactggattggcaaaatcggacctctctacaaaactcgactcatggctcgagcaaatcgatagagttccactcaaaccgctgcagaaaattgaactcctgaaaacatacaccatccctcggttgacatacgtggctgaccattcggacttgaaagttagtttcctggagacattggatcagaagattcggacaatagttaaagattggctacacctgcctgcatgtacctgcgatgccatcctatactctagcacgaaggatggcggcctgggcatcactaaattagcaaagctgattcctagcgtacaggctaggagactacacagaatagcccaatcatcggacgaaaccatgaagcaatttctccacagggacaagatggaagcaatgtaccagaaactgtgggttcaagcgggaggagatagggagaaagttcctgcaatctgggaagctagacctacgatcgagtcacctaatttacaagaggtaggggtttcttctgagtgggaagcaccgactctgaaaaacaaatttcccaagccgtgcaattggagaaagatagaatttgaaaaatggaccaatttgatatctcagggacggggaatagggaatttcaagggggaccaaataagtaacaattggctgcaacactataggaacatacctcacaggaaactccttactgctgtacagctgagggccaatgtatatccaactagggaatttttagccaggggtaggcaggataaatacatcagaacgtgcagacattgcgacgcggccaacgaaacgtgcgcacatattattggcaattgccccataactcaggacgcgagaatcaagaggcacaactatatttgtcaagtgttgtcggagaaagcaatagggaaggactggatagtatataaagaaccgcacatcagggactccaacaaagaactttataaaccggacctgatatttgtgaaagacaaccgagcgtacgtcgtggatgtgaccataagatatgaaacaactattacaacgttggaagaggctgccttagaaaaagcaaagaaatatgtacatctagaatcgcaagtccaggatctgacaaatacatctgttataaattttacaggctttcctttgggatctcgtggcaaatggtaccaaggtaactacaaaatactaaatgaactgggtctctccaactcccgacaggagaaggtcgccagacgattatcaaactatgctttattcagctcggtggatatcattcacatgtttgcgagtaaagcgagaacggaggtaagatgataataggctgccttctgcggggcttgccttctggccatgcccttcttctctcccttgcacctgtacctcttggtctttgaataaagcctgagtaggaaggaccggtaaaaaaaaaaaaaaaaaaaaaaaaaaaaaaacgttgactaaaaaaaaaaaaaaaaaaaaaaaaaaaaaaaaaaaaaaaaaaaaaaaaaaaaaaaaaaaaaaaaaaaaaa

SEQ ID NO: 11298 - DNA, 4178 bp, synthetic construct
  source 1..4178: mol_type = other DNA
gaaataagagagaaaagaagagtaagaagaaatataagagaattcgccaccatgggttggtctgggcggatttggttcgtcacagttgccacccagacaaaatactcggattgggcatttacggttcattccatcacgaaccctgagctggcaggggacgggattgcagatttgagaggactggaatttgtgaatagcgagaagggatattatgtggggcattccccttcccgatccagccttctggctactttaccggaggtatatgaaactccgagggtgatgggcaaagtcaccagcccgagttctgtgctgaccgaacatgagggaagcagtgaggaggtcacaccagaaccatcgccccctgaaccagagacaacctccgtggcagcatctccaactctgcctgtaaccaacgtggaacagtcgtcggagagccccatcacagtaattgtgccggataaaaatccttcatgtccctgctgtggtattcgagcgagcggggtatcgggtttgattgagcatttgcgggaggttcacaggaggagggaggtttgctttcggtgttctaaatgtgagaaagaaaatactaattaccatagcattatttgtcattttcctaaatgcaagggtaaagaggaaacatctgcgccagccggggaatggtcctgtgaggtatgtggacgagattttaatactaaaattggcttgggacaacataaaagattggcacacccagctgttagaaatcaggaaagggtcgctgcttcccacccaaaagaaaattctaaacgaggagctcataaaaaatgttggactgaagaagaggaaaaattattaatagaattaatagctcagttcgaggggcatgcaaatattaataaattaattgcggaacatattacaaccaaaacagctaaacaaattagtgaaaaaaggagactgctctccaaaaaactaatggtagtggaggcagaatgtgaacctgggccaagtcatcggaccaggagagcagctgcagagataaggaagggagctgagatgaatcaccataatgaggatgctgctgaggacaatggagctgggaggggtcccctgaccaggagagcagctgcccggggggaaacaaaagaagagataagccagtttcctgataagggcaacggacagcagagacccaccaagcaaaaatcagaagaacagctgcaggcttactataaaaagacactagaggaacgactttcagctggggcacttaacaccttcccccgagcattcaagcaggtaatggaaggccgggatataaagctagtaatcaatcagacagcgcaggactgcttcggatgcctggaatccataagccaaataagaacggcaacccgagataaaaaggacacggtgacccgggagaaacacccaaagaaaccttttcagaagtggatgaagaagagagcaatcaaaaaaggtaattatcttcggttccagcgtttattttatcttgatagagggaaactggctaaaatcattttagatgatattgaatgcttgtcttgtgacataccactcagtgaaatttattcggtttttaaaacaagatgggaaacaactggtagctttaaaagccttggggactttaaaacttacgggaaggctgacaacactgccttcagagaattaattacggctaaagaaattgagaaaaatgtgcaggaaatgagcaaaggctcggctcccggtccagacgggattactcttggggacgtcgtaaagatggatcccgagttttcccggaccatggagattttcaatttatggttaacaactggtaaaatcccggacatggtgagggggtgcagaaccgttttgattccaaaatcatcagacccggatcgtttgaaagacattaataactggagacctatcacgatcggttccatcttgctgagactgttctccaggattgtaacagctaggctgagcaaagcgtgccccctgaacccaaggcaaagaggctttatcagagcggcgggatgctctgaaaacttaaaactcctgcaaactataatttggtcggccaaaagagaacacagaccactgggtgttgtattcgtggacatcgccaaggcttttgacaccgtaagccaccagcacatcattcatgctttgcagcaaagagaggtggatccccacatcgtcggtctggtgagcaatatgtacgagaacatcagtacgtatatcaccacaaagaggaacacacacacagacaaaatccagatccgggttggagtaaagcagggtgacccgatgtcgccccttttatttaacctggcaatggaccctctattatgcaagctggaagagagtggcaaaggataccaccgaggacagagcagcatcacagcgatggcatttgcagacgatctggttttgctgagcgactcctgggaaaatatgaatacaaatattagcatactggagaccttctgcaatctgaccggactcaaaacacaggggcaaaagtgccacggcttttacatcaagccgacaaagaagtcttacaccatcaatgactgcgctgcctggactatcaacggcacacccctgaacatgatcgaccccggcgaatctgagaaatacctcggcctgcagtttgacccgtggattggaatagcaaggtccggtctctccacaaaactagatttttggcttcagcggatcgatcaagcaccacttaaacctctgcagaaactggatattctcaaaacatacaccatccctcggctgatctacatagctgaccactcagaagtgaaaagcgcactactcgaaacccttgaccagaagatccggacagcggtcaaggaatggcttcacctacctccgtgcacctgcgatgccatcctgtactcgagcacgagagacggcggtttgggcatcaccaaattggcaggactgatccccagcgtgcaggcccgtagactgcatcggatcgcacagtcatctgacgatacgatgaaatgcttcatggaaaaagagaaaatggaacagctgcataagaaattgtgggttcaagcgggaggagatagggagaaagttcctgcaatctgggaagctagacctacgatcgagtcacctaatttacaagaggtaggggtttcttctgagtgggaagcaccgactctgaaaaacaaatttcccaagccgtgcaattggagaaagatagaatttgaaaaatggaccaatttgatatctcagggacggggaatagggaatttcaagggggaccaaataagtaacaattggctgcaacactataggaacatacctcacaggaaactccttactgctgtacagctgagggccaatgtatatccaactagggaatttttagccaggggtaggcaggataaatacatcagaacgtgcagacattgcgacgcggccaacgaaacgtgcgcacatattattggcaattgccccataactcaggacgcgagaatcaagaggcacaactatatttgtcaagtgttgtcggagaaagcaatagggaaggactggatagtatataaagaaccgcacatcagggactccaacaaagaactttataaaccggacctgatatttgtgaaagacaaccgagcgtacgtcgtggatgtgaccgtgcgatacgaatcggacgagacctctttggagatggcggccacggagaaagtggacaagtacaaacacctgaccaaagagatacgaacgatcaccaacgcgaaagacattgtttttatgggctttcccctcggagctcgggggaaatggtaccaagggaactttgaacttttgaaagcccttggactctccaaatcggatcgagaaaagactgcccggtccttgtcatccatagcactcatgtcatctgtggacatcgtccacatatttgccagcaaatccaggacttgcactacactgtgataataggctgccttctgcggggcttgccttctggccatgcccttcttctctcccttgcacctgtacctcttggtctttgaataaagcctgagtaggaaggaccggtaaaaaaaaaaaaaaaaaaaaaaaaaaaaaaacgttgactaaaaaaaaaaaaaaaaaaaaaaaaaaaaaaaaaaaaaaaaaaaaaaaaaaaaaaaaaaaaaaaaaaaaaa

SEQ ID NO: 11299 - DNA, 4187 bp, synthetic construct
  source 1..4187: mol_type = other DNA
gaaataagagagaaaagaagagtaagaagaaatataagagaattcgccaccatgtcaaaacctgaccctttaaacgtaaatatgtccactccattcttggggacacaaatgcgcctgctcagggtttcaactggaactcaaacatctatgtcagactgggcagactgggcacagaggctctgtggtacagctaccaggtctgcactgtgtaaggtggtcccggtgtccttactatccagacatcagacagaattactagctatgggccatgggagtcagatgcctctaaatgcaccccttaacaccccggacttaacagaaagtgaattggcttgtttggttttggactgggagttttacagaacagatttgtccgctagtagttttaaccttgttcaattttctgctaaccgagagagtttgagtgggctgcctgaggtgtatgaacagccgactccgtttcaacctgaaggggagaaaatctgccccccaagagactgtgaagcagttttggtcggggaaggggaggggagcagtgaggaggtcacaccagaaccatcgccccctgaaccagagacaacctccgtggcagcatctccaactctgcctgtaaccaacgtggaacagtcgtcggagagccccatcacagtaattgtgccggataaaaatccttcatgtccctgctgtggtattcgagcgagcggggtatcgggtttgattgagcatttgcgggaggttcacaggaggagggaggtttgctttcggtgttctaaatgtgagaaagaaaatactaattaccatagcattatttgtcattttcctaaatgcaagggtaaagaggaaacatctgcgccagccggggaatggtcctgtgaggtatgtggacgagattttaatactaaaattggcttgagtcagcataagcggcttgctcacccagttactaggaatatagagcgaataacagcttcccgcccgaaagaggaaagtgcacgaggtgcacaccgtcggtgttggtctgaagaggaagtggagttgctcaagaagttggaaaaacagtatgaagggaataagaatataaacaaactaattgcagaacaccttccatcaaaaacagcaaagcagataagtgacaaaagaaggggactgataaaaagtccatcaaagggcaacggacagcagagacccaccaagcaaaaatcagaagaacagctgcaggcttactataaaaagacactagaggaacgactttcagctggggcacttaacaccttcccccgagcattcaagcaggtaatggaaggccgggatataaagctagtaatcaatcagacagcgcaggactgcttcggatgcctggaatccataagccaaataagaacggcaacccgagataaaaaggacacggtgacccgggagaaacacccaaagaaaccttttcagaagtggatgaagaagagagcaatcaaaaaaggtaattatcttcggttccagcgtttattttatcttgatagagggaaactggctaaaatcattttagatgatattgaatgcttgtcttgtgacataccactcagtgaaatttattcggtttttaaaacaagatgggaaacaactggtagctttaaaagccttggggactttaaaacttacgggaaggctgacaacactgccttcagagaattaattacggctaaagaaattgagaaaaatgtgcaggaaatgagcaaaggctcggctcccggtccagacgggattactcttggggacgtcgtaaagatggatcccgagttttcccggaccatggagattttcaatttatggttaacaactggtaaaatcccggacatggtgagggggtgcagaaccgttttgattccaaaatcatcagacccggatcgtttgaaagacattaataactggagacctatcacgatcggttccatcttgctgagactgttctccaggattgtaacagctaggctgagcaaagcgtgccccctgaacccaaggcaaagaggctttatcagagcggcgggatgctctgaaaacttaaaactcctgcaaactataatttggtcggccaaaagagaacacagaccactgggtgttgtattcgtggacatcgccaaggcttttgacaccgtaagccaccagcacatcattcatgctttgcagcaaagagaggtggatccccacatcgtcggtctggtgagcaatatgtacgagaacatcagtacgtatatcaccacaaagaggaacacacacacagacaaaatccagatccgggttggagtaaagcagggtgacccgatgtcgccccttttatttaacctggcaatggaccctctattatgcaagctggaagagagtggcaaaggataccaccgaggacagagcagcatcacagcgatggcatttgcagacgatctggttttgctgagcgactcctgggaaaatatgaatacaaatattagcatactggagaccttctgcaatctgaccggactcaaaacacaggggcaaaagtgccacggcttttacatcaagccgacaaagaagtcttacaccatcaatgactgcgctgcctggactatcaacggcacacccctgaacatgatcgaccccggcgaatctgagaaatacctcggcctgcagtttgacccgtggattggaatagcaaggtccggtctctccacaaaactagatttttggcttcagcggatcgatcaagcaccacttaaacctctgcagaaactggatattctcaaaacatacaccatccctcggctgatctacatagctgaccactcagaagtgaaaagcgcactactcgaaacccttgaccagaagatccggacagcggtcaaggaatggcttcacctacctccgtgcacctgcgatgccatcctgtactcgagcacgagagacggcggtttgggcatcaccaaattggcaggactgatccccagcgtgcaggcccgtagactgcatcggatcgcacagtcatctgacgatacgatgaaatgcttcatggaaaaagagaaaatggaacagctgcataagaaattgtgggttcaagcgggaggagatagggagaaagttcctgcaatctgggaagctagacctacgatcgagtcacctaatttacaagaggtaggggtttcttctgagtgggaagcaccgactctgaaaaacaaatttcccaagccgtgcaattggagaaagatagaatttgaaaaatggaccaatttgatatctcagggacggggaatagggaatttcaagggggaccaaataagtaacaattggctgcaacactataggaacatacctcacaggaaactccttactgctgtacagctgagggccaatgtatatccaactagggaatttttagccaggggtaggcaggataaatacatcagaacgtgcagacattgcgacgcggccaacgaaacgtgcgcacatattattggcaattgccccataactcaggacgcgagaatcaagaggcacaactatatttgtcaagtgttgtcggagaaagcaatagggaaggactggatagtatataaagaaccgcacatcagggactccaacaaagaactttataaaccggacctgatatttgtgaaagacaaccgagcgtacgtcgtggatgtgaccgtgcgatacgaatcggacgagacctctttggagatggcggccacggagaaagtggacaagtacaaacacctgaccaaagagatacgaacgatcaccaacgcgaaagacattgtttttatgggctttcccctcggagctcgggggaaatggtaccaagggaactttgaacttttgaaagcccttggactctccaaatcggatcgagaaaagactgcccggtccttgtcatccatagcactcatgtcatctgtggacatcgtccacatatttgccagcaaatccaggacttgcactacactgtgataataggctgccttctgcggggcttgccttctggccatgcccttcttctctcccttgcacctgtacctcttggtctttgaataaagcctgagtaggaaggaccggtaaaaaaaaaaaaaaaaaaaaaaaaaaaaaaacgttgactaaaaaaaaaaaaaaaaaaaaaaaaaaaaaaaaaaaaaaaaaaaaaaaaaaaaaaaaaaaaaaaaaaaaaa

SEQ ID NO: 11300 - DNA, 4286 bp, synthetic construct
  source 1..4286: mol_type = other DNA
gaaataagagagaaaagaagagtaagaagaaatataagagaattcgccaccatggcttcttgcccgaaacctggccccccggtttcagcaggggcaatgagtttggaaagtggactgaccacccactccgttctcgccatcgaacgtggtcccaattcgttggcaaattccggatcagactttgggggggggggtctggggctaccgttacgcctattgagggtatcggtcggcactcagacctcccgctccgactgggtagacctggtgtcctggagccacccaggacccacgtctaagtcccagcaggttgacctggtgtctttatttcctaaacaccgggttgacctgttatccaaaaacgaccaggtagacctggtggctcaatttttaccatctaaatttccccccaatttggcagaaaatgatttggctttgctggtgaacttagagttctacagatcggatttgcatgtgtatgagtgtgttcataaggctgcacattgggagggattaagtggtttgcctgaggtgtatgaacaacttgcaccacaaccgtgtgtgggagaaactttacattctagcctcccaagagactgtgaagcagttttggtcggggaaggggaggggagcagtgaggaggtcacaccagaaccatcgccccctgaaccagagacaacctccgtggcagcatctccaactctgcctgtaaccaacgtggaacagtcgtcggagagccccatcacagtaattgtgccggataaaaatccttcatgtccctgctgtggtattcgagcgagcggggtatcgggtttgattgagcatttgcgggaggttcacaggaggagggaggtttgctttcggtgttctaaatgtgagaaagaaaatactaattaccatagcattatttgtcattttcctaaatgcaagggtaaagaggaaacatctgcgccagccggggaatggtcctgtgaggtatgtggacgagattttaatactaaaattggcttgagtcagcataagcggcttgctcacccagttactaggaatatagagcgaataacagcttcccgcccgaaagaggaaagtgcacgaggtgcacaccgtcggtgttggtctgaagaggaagtggagttgctcaagaagttggaaaaacagtatgaagggaataagaatataaacaaactaattgcagaacaccttccatcaaaaacagcaaagcagataagtgacaaaagaaggggactgataaaaagtccatcaaagggcaacggacagcagagacccaccaagcaaaaatcagaagaacagctgcaggcttactataaaaagacactagaggaacgactttcagctggggcacttaacaccttcccccgagcattcaagcaggtaatggaaggccgggatataaagctagtaatcaatcagacagcgcaggactgcttcggatgcctggaatccataagccaaataagaacggcaacccgagataaaaaggacacggtgacccgggagaaacacccaaagaaaccttttcagaagtggatgaagaagagagcaatcaaaaaaggtaattatcttcggttccagcgtttattttatcttgatagagggaaactggctaaaatcattttagatgatattgaatgcttgtcttgtgacataccactcagtgaaatttattcggtttttaaaacaagatgggaaacaactggtagctttaaaagccttggggactttaaaacttacgggaaggctgacaacactgccttcagagaattaattacggctaaagaaattgagaaaaatgtgcaggaaatgagcaaaggctcggctcccggtccagacgggattactcttggggacgtcgtaaagatggatcccgagttttcccggaccatggagattttcaatttatggttaacaactggtaaaatcccggacatggtgagggggtgcagaaccgttttgattccaaaatcatcagacccggatcgtttgaaagacattaataactggagacctatcacgatcggttccatcttgctgagactgttctccaggattgtaacagctaggctgagcaaagcgtgccccctgaacccaaggcaaagaggctttatcagagcggcgggatgctctgaaaacttaaaactcctgcaaactataatttggtcggccaaaagagaacacagaccactgggtgttgtattcgtggacatcgccaaggcttttgacaccgtaagccaccagcacatcattcatgctttgcagcaaagagaggtggatccccacatcgtcggtctggtgagcaatatgtacgagaacatcagtacgtatatcaccacaaagaggaacacacacacagacaaaatccagatccgggttggagtaaagcagggtgacccgatgtcgccccttttatttaacctggcaatggaccctctattatgcaagctggaagagagtggcaaaggataccaccgaggacagagcagcatcacagcgatggcatttgcagacgatctggttttgctgagcgactcctgggaaaatatgaatacaaatattagcatactggagaccttctgcaatctgaccggactcaaaacacaggggcaaaagtgccacggcttttacatcaagccgacaaagaagtcttacaccatcaatgactgcgctgcctggactatcaacggcacacccctgaacatgatcgaccccggcgaatctgagaaatacctcggcctgcagtttgacccgtggattggaatagcaaggtccggtctctccacaaaactagatttttggcttcagcggatcgatcaagcaccacttaaacctctgcagaaactggatattctcaaaacatacaccatccctcggctgatctacatagctgaccactcagaagtgaaaagcgcactactcgaaacccttgaccagaagatccggacagcggtcaaggaatggcttcacctacctccgtgcacctgcgatgccatcctgtactcgagcacgagagacggcggtttgggcatcaccaaattggcaggactgatccccagcgtgcaggcccgtagactgcatcggatcgcacagtcatctgacgatacgatgaaatgcttcatggaaaaagagaaaatggaacagctgcataagaaattgtgggttcaagcgggaggagatagggagaaagttcctgcaatctgggaagctagacctacgatcgagtcacctaatttacaagaggtaggggtttcttctgagtgggaagcaccgactctgaaaaacaaatttcccaagccgtgcaattggagaaagatagaatttgaaaaatggaccaatttgatatctcagggacggggaatagggaatttcaagggggaccaaataagtaacaattggctgcaacactataggaacatacctcacaggaaactccttactgctgtacagctgagggccaatgtatatccaactagggaatttttagccaggggtaggcaggataaatacatcagaacgtgcagacattgcgacgcggccaacgaaacgtgcgcacatattattggcaattgccccataactcaggacgcgagaatcaagaggcacaactatatttgtcaagtgttgtcggagaaagcaatagggaaggactggatagtatataaagaaccgcacatcagggactccaacaaagaactttataaaccggacctgatatttgtgaaagacaaccgagcgtacgtcgtggatgtgaccgtgcgatacgaatcggacgagacctctttggagatggcggccacggagaaagtggacaagtacaaacacctgaccaaagagatacgaacgatcaccaacgcgaaagacattgtttttatgggctttcccctcggagctcgggggaaatggtaccaagggaactttgaacttttgaaagcccttggactctccaaatcggatcgagaaaagactgcccggtccttgtcatccatagcactcatgtcatctgtggacatcgtccacatatttgccagcaaatccaggacttgcactacactgtgataataggctgccttctgcggggcttgccttctggccatgcccttcttctctcccttgcacctgtacctcttggtctttgaataaagcctgagtaggaaggaccggtaaaaaaaaaaaaaaaaaaaaaaaaaaaaaaacgttgactaaaaaaaaaaaaaaaaaaaaaaaaaaaaaaaaaaaaaaaaaaaaaaaaaaaaaaaaaaaaaaaaaaaaaa

SEQ ID NO: 11301 - DNA, 4190 bp, synthetic construct
  source 1..4190: mol_type = other DNA
gaaataagagagaaaagaagagtaagaagaaatataagagaattcgccaccatgggttggtctgggcggatttggttcgtcacagttgccacccagacaaaatactcggattgggcatttacggttcattccatcacgaaccctgagctggcaggggacgggattgcagatttgagaggactggaatttgtgaatagcgagaagggatattatgtggggcattccccttcccgatccagccttctggctactttaccggaggtatatgaaactccgagggtgatgggcaaagtcaccagcccgagagactgtgaagcagttttggtcggggaaggggaggggagcagtgaggaggtcacaccagaaccatcgccccctgaaccagagacaacctccgtggcagcatctccaactctgcctgtaaccaacgtggaacagtcgtcggagagccccatcacagtaattgtgccggataaaaatccttcatgtccctgctgtggtattcgagcgagcggggtatcgggtttgattgagcatttgcgggaggttcacaggaggagggaggtttgctttcggtgttctaaatgtgagaaagaaaatactaattaccatagcattatttgtcattttcctaaatgcaagggtaaagaggaaacatctgcgccagccggggaatggtcctgtgaggtatgtggacgagattttaatactaaaattggcttgggacaacataaaagattggcacacccagctgttagaaatcaggaaagggtcgctgcttcccacccaaaagaaaattctaaacgaggagctcataaaaaatgttggactgaagaagaggaaaaattattaatagaattaatagctcagttcgaggggcatgcaaatattaataaattaattgcggaacatattacaaccaaaacagctaaacaaattagtgaaaaaaggagactgctctccaaaaaactaatggtagtggaggcagaatgtgaacctgggccaagtcatcggaccaggagagcagctgcagagataaggaagggagctgagatgaatcaccataatgaggatgctgctgaggacaatggagctgggaggggtcccctgaccaggagagcagctgcccggggggaaacaaaagaagagataagccagtttcctgataagggcaacggacagcagagacccaccaagcaaaaatcagaagaacagctgcaggcttactataaaaagacactagaggaacgactttcagctggggcacttaacaccttcccccgagcattcaagcaggtaatggaaggccgggatataaagctagtaatcaatcagacagcgcaggactgcttcggatgcctggaatccataagccaaataagaacggcaacccgagataaaaaggacacggtgacccgggagaaacacccaaagaaaccttttcagaagtggatgaagaagagagcaatcaaaaaaggtaattatcttcggttccagcgtttattttatcttgatagagggaaactggctaaaatcattttagatgatattgaatgcttgtcttgtgacataccactcagtgaaatttattcggtttttaaaacaagatgggaaacaactggtagctttaaaagccttggggactttaaaacttacgggaaggctgacaacactgccttcagagaattaattacggctaaagaaattgagaaaaatgtgcaggaaatgagcaaaggctcggctcccggtccagacgggattactcttggggacgtcgtaaagatggatcccgagttttcccggaccatggagattttcaatttatggttaacaactggtaaaatcccggacatggtgagggggtgcagaaccgttttgattccaaaatcatcagacccggatcgtttgaaagacattaataactggagacctatcacgatcggttccatcttgctgagactgttctccaggattgtaacagctaggctgagcaaagcgtgccccctgaacccaaggcaaagaggctttatcagagcggcgggatgctctgaaaacttaaaactcctgcaaactataatttggtcggccaaaagagaacacagaccactgggtgttgtattcgtggacatcgccaaggcttttgacaccgtaagccaccagcacatcattcatgctttgcagcaaagagaggtggatccccacatcgtcggtctggtgagcaatatgtacgagaacatcagtacgtatatcaccacaaagaggaacacacacacagacaaaatccagatccgggttggagtaaagcagggtgacccgatgtcgccccttttatttaacctggcaatggaccctctattatgcaagctggaagagagtggcaaaggataccaccgaggacagagcagcatcacagcgatggcatttgcagacgatctggttttgctgagcgactcctgggaaaatatgaatacaaatattagcatactggagaccttctgcaatctgaccggactcaaaacacaggggcaaaagtgccacggcttttacatcaagccgacaaagaagtcttacaccatcaatgactgcgctgcctggactatcaacggcacacccctgaacatgatcgaccccggcgaatctgagaaatacctcggcctgcagtttgacccgtggattggaatagcaaggtccggtctctccacaaaactagatttttggcttcagcggatcgatcaagcaccacttaaacctctgcagaaactggatattctcaaaacatacaccatccctcggctgatctacatagctgaccactcagaagtgaaaagcgcactactcgaaacccttgaccagaagatccggacagcggtcaaggaatggcttcacctacctccgtgcacctgcgatgccatcctgtactcgagcacgagagacggcggtttgggcatcaccaaattggcaggactgatccccagcgtgcaggcccgtagactgcatcggatcgcacagtcatctgacgatacgatgaaatgcttcatggaaaaagagaaaatggaacagctgcataagaaattgtgggttcaagcgggaggagatagggagaaagttcctgcaatctgggaagctagacctacgatcgagtcacctaatttacaagaggtaggggtttcttctgagtgggaagcaccgactctgaaaaacaaatttcccaagccgtgcaattggagaaagatagaatttgaaaaatggaccaatttgatatctcagggacggggaatagggaatttcaagggggaccaaataagtaacaattggctgcaacactataggaacatacctcacaggaaactccttactgctgtacagctgagggccaatgtatatccaactagggaatttttagccaggggtaggcaggataaatacatcagaacgtgcagacattgcgacgcggccaacgaaacgtgcgcacatattattggcaattgccccataactcaggacgcgagaatcaagaggcacaactatatttgtcaagtgttgtcggagaaagcaatagggaaggactggatagtatataaagaaccgcacatcagggactccaacaaagaactttataaaccggacctgatatttgtgaaagacaaccgagcgtacgtcgtggatgtgaccgtgcgatacgaatcggacgagacctctttggagatggcggccacggagaaagtggacaagtacaaacacctgaccaaagagatacgaacgatcaccaacgcgaaagacattgtttttatgggctttcccctcggagctcgggggaaatggtaccaagggaactttgaacttttgaaagcccttggactctccaaatcggatcgagaaaagactgcccggtccttgtcatccatagcactcatgtcatctgtggacatcgtccacatatttgccagcaaatccaggacttgcactacactgtgataataggctgccttctgcggggcttgccttctggccatgcccttcttctctcccttgcacctgtacctcttggtctttgaataaagcctgagtaggaaggaccggtaaaaaaaaaaaaaaaaaaaaaaaaaaaaaaacgttgactaaaaaaaaaaaaaaaaaaaaaaaaaaaaaaaaaaaaaaaaaaaaaaaaaaaaaaaaaaaaaaaaaaaaaa

SEQ ID NO: 11302 - DNA, 4478 bp, synthetic construct
  source 1..4478: mol_type = other DNA
gaaataagagagaaaagaagagtaagaagaaatataagagaattcgccaccatggcttcttgcccgaaacctggccccccggtttcagcaggggcaatgagtttggaaagtggactgaccacccactccgttctcgccatcgaacgtggtcccaattcgttggcaaattccggatcagactttgggggggggggtctggggctaccgttacgcctattgagggtatcggtcggcactcagacctcccgctccgactgggtagacctggtgtcctggagccacccaggacccacgtctaagtcccagcaggttgacctggtgtctttatttcctaaacaccgggttgacctgttatccaaaaacgaccaggtagacctggtggctcaatttttaccatctaaatttccccccaatttggcagaaaatgatttggctttgctggtgaacttagagttctacagatcggatttgcatgtgtatgagtgtgttcataaggctgcacattgggagggattaagtggtttgcctgaggtgtatgaacaacttgcaccacaaccgtgtgtgggagaaactttacattctagcctcccaagagactgtgaagcagttttggtcggggaaggggaggggagcagtgaggaggtcacaccagaaccatcgccccctgaaccagagacaacctccgtggcagcatctccaactctgcctgtaaccaacgtggaacagtcgtcggagagccccatcacagtaattgtgccggataaaaatccttcatgtccctgctgtggtattcgagcgagcggggtatcgggtttgattgagcatttgcgggaggttcacaggaggagggaggtttgctttcggtgttctaaatgtgagaaagaaaatactaattaccatagcattatttgtcattttcctaaatgcaagggtaaagaggaaacatctgcgccagccggggaatggtcctgtgaggtatgtggacgagattttaatactaaaattggcttgggacaacataaaagattggcacacccagctgttagaaatcaggaaagggtcgctgcttcccacccaaaagaaaattctaaacgaggagctcataaaaaatgttggactgaagaagaggaaaaattattaatagaattaatagctcagttcgaggggcatgcaaatattaataaattaattgcggaacatattacaaccaaaacagctaaacaaattagtgaaaaaaggagactgctctccaaaaaactaatggtagtggaggcagaatgtgaacctgggccaagtcatcggaccaggagagcagctgcagagataaggaagggagctgagatgaatcaccataatgaggatgctgctgaggacaatggagctgggaggggtcccctgaccaggagagcagctgcccggggggaaacaaaagaagagataagccagtttcctgataagggcaacggacagcagagacccaccaagcaaaaatcagaagaacagctgcaggcttactataaaaagacactagaggaacgactttcagctggggcacttaacaccttcccccgagcattcaagcaggtaatggaaggccgggatataaagctagtaatcaatcagacagcgcaggactgcttcggatgcctggaatccataagccaaataagaacggcaacccgagataaaaaggacacggtgacccgggagaaacacccaaagaaaccttttcagaagtggatgaagaagagagcaatcaaaaaaggtaattatcttcggttccagcgtttattttatcttgatagagggaaactggctaaaatcattttagatgatattgaatgcttgtcttgtgacataccactcagtgaaatttattcggtttttaaaacaagatgggaaacaactggtagctttaaaagccttggggactttaaaacttacgggaaggctgacaacactgccttcagagaattaattacggctaaagaaattgagaaaaatgtgcaggaaatgagcaaaggctcggctcccggtccagacgggattactcttggggacgtcgtaaagatggatcccgagttttcccggaccatggagattttcaatttatggttaacaactggtaaaatcccggacatggtgagggggtgcagaaccgttttgattccaaaatcatcagacccggatcgtttgaaagacattaataactggagacctatcacgatcggttccatcttgctgagactgttctccaggattgtaacagctaggctgagcaaagcgtgccccctgaacccaaggcaaagaggctttatcagagcggcgggatgctctgaaaacttaaaactcctgcaaactataatttggtcggccaaaagagaacacagaccactgggtgttgtattcgtggacatcgccaaggcttttgacaccgtaagccaccagcacatcattcatgctttgcagcaaagagaggtggatccccacatcgtcggtctggtgagcaatatgtacgagaacatcagtacgtatatcaccacaaagaggaacacacacacagacaaaatccagatccgggttggagtaaagcagggtgacccgatgtcgccccttttatttaacctggcaatggaccctctattatgcaagctggaagagagtggcaaaggataccaccgaggacagagcagcatcacagcgatggcatttgcagacgatctggttttgctgagcgactcctgggaaaatatgaatacaaatattagcatactggagaccttctgcaatctgaccggactcaaaacacaggggcaaaagtgccacggcttttacatcaagccgacaaagaagtcttacaccatcaatgactgcgctgcctggactatcaacggcacacccctgaacatgatcgaccccggcgaatctgagaaatacctcggcctgcagtttgacccgtggattggaatagcaaggtccggtctctccacaaaactagatttttggcttcagcggatcgatcaagcaccacttaaacctctgcagaaactggatattctcaaaacatacaccatccctcggctgatctacatagctgaccactcagaagtgaaaagcgcactactcgaaacccttgaccagaagatccggacagcggtcaaggaatggcttcacctacctccgtgcacctgcgatgccatcctgtactcgagcacgagagacggcggtttgggcatcaccaaattggcaggactgatccccagcgtgcaggcccgtagactgcatcggatcgcacagtcatctgacgatacgatgaaatgcttcatggaaaaagagaaaatggaacagctgcataagaaattgtgggttcaagcgggaggagatagggagaaagttcctgcaatctgggaagctagacctacgatcgagtcacctaatttacaagaggtaggggtttcttctgagtgggaagcaccgactctgaaaaacaaatttcccaagccgtgcaattggagaaagatagaatttgaaaaatggaccaatttgatatctcagggacggggaatagggaatttcaagggggaccaaataagtaacaattggctgcaacactataggaacatacctcacaggaaactccttactgctgtacagctgagggccaatgtatatccaactagggaatttttagccaggggtaggcaggataaatacatcagaacgtgcagacattgcgacgcggccaacgaaacgtgcgcacatattattggcaattgccccataactcaggacgcgagaatcaagaggcacaactatatttgtcaagtgttgtcggagaaagcaatagggaaggactggatagtatataaagaaccgcacatcagggactccaacaaagaactttataaaccggacctgatatttgtgaaagacaaccgagcgtacgtcgtggatgtgaccgtgcgatacgaatcggacgagacctctttggagatggcggccacggagaaagtggacaagtacaaacacctgaccaaagagatacgaacgatcaccaacgcgaaagacattgtttttatgggctttcccctcggagctcgggggaaatggtaccaagggaactttgaacttttgaaagcccttggactctccaaatcggatcgagaaaagactgcccggtccttgtcatccatagcactcatgtcatctgtggacatcgtccacatatttgccagcaaatccaggacttgcactacactgtgataataggctgccttctgcggggcttgccttctggccatgcccttcttctctcccttgcacctgtacctcttggtctttgaataaagcctgagtaggaaggaccggtaaaaaaaaaaaaaaaaaaaaaaaaaaaaaaacgttgactaaaaaaaaaaaaaaaaaaaaaaaaaaaaaaaaaaaaaaaaaaaaaaaaaaaaaaaaaaaaaaaaaaaaaa

SEQ ID NO: 11303 - DNA, 3992 bp, synthetic construct
  source 1..3992: mol_type = other DNA
gaaataagagagaaaagaagagtaagaagaaatataagagaattcgccaccatgggttggtctgggcggatttggttcgtcacagttgccacccagacaaaatactcggattgggcatttacggttcattccatcacgaaccctgagctggcaggggacgggattgcagatttgagaggactggaatttgtgaatagcgagaagggatattatgtggggcattccccttcccgatccagccttctggctactttaccggaggtatatgaaactccgagggtgatgggcaaagtcaccagcccgagagactgtgaagcagttttggtcggggaaggggaggggagcagtgaggaggtcacaccagaaccatcgccccctgaaccagagacaacctccgtggcagcatctccaactctgcctgtaaccaacgtggaacagtcgtcggagagccccatcacagtaattgtgccggataaaaatccttcatgtccctgctgtggtattcgagcgagcggggtatcgggtttgattgagcatttgcgggaggttcacaggaggagggaggtttgctttcggtgttctaaatgtgagaaagaaaatactaattaccatagcattatttgtcattttcctaaatgcaagggtaaagaggaaacatctgcgccagccggggaatggtcctgtgaggtatgtggacgagattttaatactaaaattggcttgagtcagcataagcggcttgctcacccagttactaggaatatagagcgaataacagcttcccgcccgaaagaggaaagtgcacgaggtgcacaccgtcggtgttggtctgaagaggaagtggagttgctcaagaagttggaaaaacagtatgaagggaataagaatataaacaaactaattgcagaacaccttccatcaaaaacagcaaagcagataagtgacaaaagaaggggactgataaaaagtccatcaaagggcaacggacagcagagacccaccaagcaaaaatcagaagaacagctgcaggcttactataaaaagacactagaggaacgactttcagctggggcacttaacaccttcccccgagcattcaagcaggtaatggaaggccgggatataaagctagtaatcaatcagacagcgcaggactgcttcggatgcctggaatccataagccaaataagaacggcaacccgagataaaaaggacacggtgacccgggagaaacacccaaagaaaccttttcagaagtggatgaagaagagagcaatcaaaaaaggtaattatcttcggttccagcgtttattttatcttgatagagggaaactggctaaaatcattttagatgatattgaatgcttgtcttgtgacataccactcagtgaaatttattcggtttttaaaacaagatgggaaacaactggtagctttaaaagccttggggactttaaaacttacgggaaggctgacaacactgccttcagagaattaattacggctaaagaaattgagaaaaatgtgcaggaaatgagcaaaggctcggctcccggtccagacgggattactcttggggacgtcgtaaagatggatcccgagttttcccggaccatggagattttcaatttatggttaacaactggtaaaatcccggacatggtgagggggtgcagaaccgttttgattccaaaatcatcagacccggatcgtttgaaagacattaataactggagacctatcacgatcggttccatcttgctgagactgttctccaggattgtaacagctaggctgagcaaagcgtgccccctgaacccaaggcaaagaggctttatcagagcggcgggatgctctgaaaacttaaaactcctgcaaactataatttggtcggccaaaagagaacacagaccactgggtgttgtattcgtggacatcgccaaggcttttgacaccgtaagccaccagcacatcattcatgctttgcagcaaagagaggtggatccccacatcgtcggtctggtgagcaatatgtacgagaacatcagtacgtatatcaccacaaagaggaacacacacacagacaaaatccagatccgggttggagtaaagcagggtgacccgatgtcgccccttttatttaacctggcaatggaccctctattatgcaagctggaagagagtggcaaaggataccaccgaggacagagcagcatcacagcgatggcatttgcagacgatctggttttgctgagcgactcctgggaaaatatgaatacaaatattagcatactggagaccttctgcaatctgaccggactcaaaacacaggggcaaaagtgccacggcttttacatcaagccgacaaagaagtcttacaccatcaatgactgcgctgcctggactatcaacggcacacccctgaacatgatcgaccccggcgaatctgagaaatacctcggcctgcagtttgacccgtggattggaatagcaaggtccggtctctccacaaaactagatttttggcttcagcggatcgatcaagcaccacttaaacctctgcagaaactggatattctcaaaacatacaccatccctcggctgatctacatagctgaccactcagaagtgaaaagcgcactactcgaaacccttgaccagaagatccggacagcggtcaaggaatggcttcacctacctccgtgcacctgcgatgccatcctgtactcgagcacgagagacggcggtttgggcatcaccaaattggcaggactgatccccagcgtgcaggcccgtagactgcatcggatcgcacagtcatctgacgatacgatgaaatgcttcatggaaaaagagaaaatggaacagctgcataagaaattgtggattcaagctggaggggacagagagaacataccctcgatttgggaagcaccaccgtcgagtgaaccaccaaacaacgtgagcacaaattcggaatgggaagcaccgacccagaaagataaatttccaaagccttgcaattggaggaaaaacgaattcaaaaaatggaccaaattggcatcccaaggccgcggaattgtaaattttgaaagagacaaaattagtaaccattggatccaatactacagacgcatacctcacaggaaactcctcactgcactacaactcagggccaacgtttaccccacgagagaatttctagccaggggtagacaagaccaatacatcaaggcgtgtaggcactgcgatgcggacaacgaatcctgcgcccacatcatcggcaactgcccagtgacacaggacgcccgaatcaagaggcacaattacatctgcgaactgcttctcgaggaggcgaagaagaaggactgggtagtgttcaaggaaccgcacataagggattccaacaaggaactgtacaaacctgacctgatatttgtgaaggatgggcgtgcacttgtcgtggatgtgacagtacggtatgaagcagccaaatcatcgctggaggaagccgctgcagagaaagtgagaaagtacaaacacctggaaacggaagtaagacatctcacgaatgcaaaggacgttacttttgtgggctttcccctaggagcgcgggggaaatggcaccaagataactttaaacttttgactgagcttggcctctccaaatcgaggcaagtgaaaatggcagagactttttccacagtagcgctcttttcatctgtggacattgtacatatgtttgccagtagggccagaaaatctatggttatgtgataataggctgccttctgcggggcttgccttctggccatgcccttcttctctcccttgcacctgtacctcttggtctttgaataaagcctgagtaggaaggaccggtaaaaaaaaaaaaaaaaaaaaaaaaaaaaaaacgttgactaaaaaaaaaaaaaaaaaaaaaaaaaaaaaaaaaaaaaaaaaaaaaaaaaaaaaaaaaaaaaaaaaaaaaa

SEQ ID NO: 11304 - DNA, 4349 bp, synthetic construct
  source 1..4349: mol_type = other DNA
gaaataagagagaaaagaagagtaagaagaaatataagagaattcgccaccatggcttcttgcccgaaacctggccccccggtttcagcaggggcaatgagtttggaaagtggactgaccacccactccgttctcgccatcgaacgtggtcccaattcgttggcaaattccggatcagactttgggggggggggtctggggctaccgttacgcctattgagggtatcggtcggcactcagacctcccgctccgactgggtagacctggtgtcctggagccacccaggacccacgtctaagtcccagcaggttgacctggtgtctttatttcctaaacaccgggttgacctgttatccaaaaacgaccaggtagacctggtggctcaatttttaccatctaaatttccccccaatttggcagaaaatgatttggctttgctggtgaacttagagttctacagatcggatttgcatgtgtatgagtgtgttcataaggctgcacattgggagggattaagtggtttgcctgaggtgtatgaacaacttgcaccacaaccgtgtgtgggagaaactttacattctagcctcccacgagacagtgaactgtttgtgcctgaagaggggagcagcgagaaggagagcgaggacgcgccaaaaacatctcctccggaaccagagacaacctccgtggcagcatctccaactctgcctgtaaccaacgtggaacagtcgtcggagagccccatcacagtaattgtgccggataaaaatccttcatgtccctgctgtggtattcgagcgagcggggtatcgggtttgattgagcatttgcgggaggttcacaggaggagggaggtttgctttcggtgttctaaatgtgagaaagaaaatactaattaccatagcattatttgtcattttcctaaatgcaagggtaaagaggaaacatctgcgccagccggggaatggtcctgtgaggagtgtgagaaaacatttgatacaaaaatcggcctggggcagcataagcgcttggtccacccagtcacaagaaatctcgagcggattaccgctgctcgccctaagacaggtactatgagaggggcacatcgtcggtgctggaccgaggatgagatggaattattgagaaagttggataaacaatatgaggggcagaaaaacatcaataagttgattgcggagcatattccgaccaagacaacaaaacagataagtgataaaagacgggaccttcgtaagagcccggtaaaaaagggaaaagatcagggtcagacaaaacatctagaactagaaggggaacacctcgtggaaggggaacatctcgtgtgcattggatcggagatggaggggggactgaggtcccgataccgaaagacagtttctgagtgggtaacatccggaaaattgtccattctccatggaatgtttgagcaggtgatcgaaggagaagaagatccagcactagttgctgataaggcaatgaaagactgtttcacgtgccttgcctctaagtccctggagttgaaaaccagccagggtcgaccgcgtcaggtggcccaaactgctcgaccttcggaaccaccaaaggggtggatgaagaagagagctaggaaacgggggcaatttctacgcttccagcggctgttctacctggatagggggaaactggccggtattatcctggatgacgtggaatccctgaagtgtgctatcccacaagacgagatacacaacgtgttcaagtcgagatgggagtcaccgggaacattcaagggcctgggtgcgttcagatccaagggcctggcggacaactcggcattcgaagccatgatcacggcaaaagaaatctctaaaaacatcagagagatgaacaagaacagtgcaccaggaccagacggactaagtctgcgggatatcatgaagatagacccccattgtgtccagctaatggaactattcaatctatggctggtgactggcaccgtaccggacgtggtgaaagaatgtcggactgtattaatatcgaaatcatctctgccggagcgccaaatggacattaataactggcgtccaattaccatcggatcgattatcttgaggctgttctcaaggatcctgacggcaaggctggcaaaggcatgccctattaactcccgacaaaagggctttattagatcagcgggatgtgctgaaaatttgaaactgttacagctcttgattaagagtgcaaaaaaggaacatcgacccttgggcgttgtctttattgacctggctaaagccttcgacacagtgagtcaccaccatcttatggcagtgctgaaacaaaagggtgtggaccatcacattatcaccctgattacgaacatgtatcaaaacattagaactcgcattactgtgaagaatgagcactcggatcccatcgggattcaaattggtgttaaacaaggagatccaatgtcacctttattgtttaacttatctgtggaccccctattgtgtaagttagaggaagaagggagtggataccatcatgactctaagggtgtaacatctatggcttttgcagatgatttggtattgttaagtgggtcgtgggaaggaatgcagagtaatattaaaatcctggaggccttttgtgagctgactggcctcaggacgcagggggagaaatgccatggcttttacatacaacctactaaggactcgtatactatcaatgattgtcctccatggcagattaacggcaccccattaaatatgattgaacctggtagctcggagaagtacttgggactgagaatagacccatggactggaatatcgaaacccgagctactcaggaaaataagagattggttacaacggattggagaagcaccactgaaaccgtttcagaaagttgacatcttgaagggatataccatcccgcgactgatttacttagcagaccaagccgatgtaaaagcaacgtacctagaagaacttgacctgacgattcgaactacggtcaaggagtggctacatctacctcctagtacctgcgatgccatcctgtattccagcacacgtgacggaggattaggcatcactagactctcgggcttgatccctagtatacaagctcgaaggctgcacagaattgcgcaatcttcggacgatgtgataagatcaatagtgaaacaagaggggatcgaaaaagactttgaaaaattgtggttaacagctgggggcgatagagagaaaataccatctatttgggacccgagtgcgattagggtaacatctgaggaattgggcgaggatgaatttgcttccgagtgggaaataccaactcccaaaaccatctttcctaaaccttgtgactggcgtaaacaggaatttattaattggaccaagttacagtcccagggccgtggtattgccaactttgagaaggataaaatcagtaataattggctcgaacgatatagaggcattcctcaccgaaaactcctcacggcattacaattgagagctaacgtgtaccccactagggaattcctggcaagggggagacaggagtcgcatataaaatcttgtcgacactgtcaagcggaaaatgaatcaagcgctcatatcattgggtactgccccgcggtgcaagacgccagaattaaaagacacaaccaattgtgtgatttattgataactgaagtaaaaaagaaggattggatcgtattccaagagcccatactaaaagatgaacaaaatgagatctacaagcctgatctcgtattcgtaaaaggggaccaggcgatggttattgatgtaacagtacggtatgaagcagccaaatcatcgctggaggaagccgctgcagagaaagtgagaaagtacaaacacctggaaacggaagtaagacatctcacgaatgcaaaggacgttacttttgtgggctttcccctaggagcgcgggggaaatggcaccaagataactttaaacttttgactgagcttggcctctccaaatcgaggcaagtgaaaatggcagagactttttccacagtagcgctcttttcatctgtggacattgtacatatgtttgccagtagggccagaaaatctatggttatgtgataataggctgccttctgcggggcttgccttctggccatgcccttcttctctcccttgcacctgtacctcttggtctttgaataaagcctgagtaggaaggaccggtaaaaaaaaaaaaaaaaaaaaaaaaaaaaaaacgttgactaaaaaaaaaaaaaaaaaaaaaaaaaaaaaaaaaaaaaaaaaaaaaaaaaaaaaaaaaaaaaaaaaaaaaa

SEQ ID NO: 11305 - DNA, 4379 bp, synthetic construct
  source 1..4379: mol_type = other DNA
gaaataagagagaaaagaagagtaagaagaaatataagagaattcgccaccatgtcaaaacctgaccctttaaacgtaaatatgtccactccattcttggggacacaaatgcgcctgctcagggtttcaactggaactcaaacatctatgtcagactgggcagactgggcacagaggctctgtggtacagctaccaggtctgcactgtgtaaggtggtcccggtgtccttactatccagacatcagacagaattactagctatgggccatgggagtcagatgcctctaaatgcaccccttaacaccccggacttaacagaaagtgaattggcttgtttggttttggactgggagttttacagaacagatttgtccgctagtagttttaaccttgttcaattttctgctaaccgagagagtttgagtgggctgcctgaggtgtatgaacagccgactccgtttcaacctgaaggggagaaaatctgccccccaagagactgtgaagcagttttggtcggggaaggggaggggagcagtgaggaggtcacaccagaaccatcgccccctgaaccagagacaacctccgtggcagcatctccaactctgcctgtaaccaacgtggaacagtcgtcggagagccccatcacagtaattgtgccggataaaaatccttcatgtccctgctgtggtattcgagcgagcggggtatcgggtttgattgagcatttgcgggaggttcacaggaggagggaggtttgctttcggtgttctaaatgtgagaaagaaaatactaattaccatagcattatttgtcattttcctaaatgcaagggtaaagaggaaacatctgcgccagccggggaatggtcctgtgaggtatgtggacgagattttaatactaaaattggcttgggacaacataaaagattggcacacccagctgttagaaatcaggaaagggtcgctgcttcccacccaaaagaaaattctaaacgaggagctcataaaaaatgttggactgaagaagaggaaaaattattaatagaattaatagctcagttcgaggggcatgcaaatattaataaattaattgcggaacatattacaaccaaaacagctaaacaaattagtgaaaaaaggagactgctctccaaaaaactaatggtagtggaggcagaatgtgaacctgggccaagtcatcggaccaggagagcagctgcagagataaggaagggagctgagatgaatcaccataatgaggatgctgctgaggacaatggagctgggaggggtcccctgaccaggagagcagctgcccggggggaaacaaaagaagagataagccagtttcctgataagggcaacggacagcagagacccaccaagcaaaaatcagaagaacagctgcaggcttactataaaaagacactagaggaacgactttcagctggggcacttaacaccttcccccgagcattcaagcaggtaatggaaggccgggatataaagctagtaatcaatcagacagcgcaggactgcttcggatgcctggaatccataagccaaataagaacggcaacccgagataaaaaggacacggtgacccgggagaaacacccaaagaaaccttttcagaagtggatgaagaagagagcaatcaaaaaaggtaattatcttcggttccagcgtttattttatcttgatagagggaaactggctaaaatcattttagatgatattgaatgcttgtcttgtgacataccactcagtgaaatttattcggtttttaaaacaagatgggaaacaactggtagctttaaaagccttggggactttaaaacttacgggaaggctgacaacactgccttcagagaattaattacggctaaagaaattgagaaaaatgtgcaggaaatgagcaaaggctcggctcccggtccagacgggattactcttggggacgtcgtaaagatggatcccgagttttcccggaccatggagattttcaatttatggttaacaactggtaaaatcccggacatggtgagggggtgcagaaccgttttgattccaaaatcatcagacccggatcgtttgaaagacattaataactggagacctatcacgatcggttccatcttgctgagactgttctccaggattgtaacagctaggctgagcaaagcgtgccccctgaacccaaggcaaagaggctttatcagagcggcgggatgctctgaaaacttaaaactcctgcaaactataatttggtcggccaaaagagaacacagaccactgggtgttgtattcgtggacatcgccaaggcttttgacaccgtaagccaccagcacatcattcatgctttgcagcaaagagaggtggatccccacatcgtcggtctggtgagcaatatgtacgagaacatcagtacgtatatcaccacaaagaggaacacacacacagacaaaatccagatccgggttggagtaaagcagggtgacccgatgtcgccccttttatttaacctggcaatggaccctctattatgcaagctggaagagagtggcaaaggataccaccgaggacagagcagcatcacagcgatggcatttgcagacgatctggttttgctgagcgactcctgggaaaatatgaatacaaatattagcatactggagaccttctgcaatctgaccggactcaaaacacaggggcaaaagtgccacggcttttacatcaagccgacaaagaagtcttacaccatcaatgactgcgctgcctggactatcaacggcacacccctgaacatgatcgaccccggcgaatctgagaaatacctcggcctgcagtttgacccgtggattggaatagcaaggtccggtctctccacaaaactagatttttggcttcagcggatcgatcaagcaccacttaaacctctgcagaaactggatattctcaaaacatacaccatccctcggctgatctacatagctgaccactcagaagtgaaaagcgcactactcgaaacccttgaccagaagatccggacagcggtcaaggaatggcttcacctacctccgtgcacctgcgatgccatcctgtactcgagcacgagagacggcggtttgggcatcaccaaattggcaggactgatccccagcgtgcaggcccgtagactgcatcggatcgcacagtcatctgacgatacgatgaaatgcttcatggaaaaagagaaaatggaacagctgcataagaaattgtgggttcaagcgggaggagatagggagaaagttcctgcaatctgggaagctagacctacgatcgagtcacctaatttacaagaggtaggggtttcttctgagtgggaagcaccgactctgaaaaacaaatttcccaagccgtgcaattggagaaagatagaatttgaaaaatggaccaatttgatatctcagggacggggaatagggaatttcaagggggaccaaataagtaacaattggctgcaacactataggaacatacctcacaggaaactccttactgctgtacagctgagggccaatgtatatccaactagggaatttttagccaggggtaggcaggataaatacatcagaacgtgcagacattgcgacgcggccaacgaaacgtgcgcacatattattggcaattgccccataactcaggacgcgagaatcaagaggcacaactatatttgtcaagtgttgtcggagaaagcaatagggaaggactggatagtatataaagaaccgcacatcagggactccaacaaagaactttataaaccggacctgatatttgtgaaagacaaccgagcgtacgtcgtggatgtgaccgtgcgatacgaatcggacgagacctctttggagatggcggccacggagaaagtggacaagtacaaacacctgaccaaagagatacgaacgatcaccaacgcgaaagacattgtttttatgggctttcccctcggagctcgggggaaatggtaccaagggaactttgaacttttgaaagcccttggactctccaaatcggatcgagaaaagactgcccggtccttgtcatccatagcactcatgtcatctgtggacatcgtccacatatttgccagcaaatccaggacttgcactacactgtgataataggctgccttctgcggggcttgccttctggccatgcccttcttctctcccttgcacctgtacctcttggtctttgaataaagcctgagtaggaaggaccggtaaaaaaaaaaaaaaaaaaaaaaaaaaaaaaacgttgactaaaaaaaaaaaaaaaaaaaaaaaaaaaaaaaaaaaaaaaaaaaaaaaaaaaaaaaaaaaaaaaaaaaaaa

SEQ ID NO: 11306 - DNA, 4181 bp, synthetic construct
  source 1..4181: mol_type = other DNA
gaaataagagagaaaagaagagtaagaagaaatataagagaattcgccaccatgtcaaaacctgaccctttaaacgtaaatatgtccactccattcttggggacacaaatgcgcctgctcagggtttcaactggaactcaaacatctatgtcagactgggcagactgggcacagaggctctgtggtacagctaccaggtctgcactgtgtaaggtggtcccggtgtccttactatccagacatcagacagaattactagctatgggccatgggagtcagatgcctctaaatgcaccccttaacaccccggacttaacagaaagtgaattggcttgtttggttttggactgggagttttacagaacagatttgtccgctagtagttttaaccttgttcaattttctgctaaccgagagagtttgagtgggctgcctgaggtgtatgaacagccgactccgtttcaacctgaaggggagaaaatctgccccccaagagactgtgaagcagttttggtcggggaaggggaggggagcagtgaggaggtcacaccagaaccatcgccccctgaaccagagacaacctccgtggcagcatctccaactctgcctgtaaccaacgtggaacagtcgtcggagagccccatcacagtaattgtgccggataaaaatccttcatgtccctgctgtggtattcgagcgagcggggtatcgggtttgattgagcatttgcgggaggttcacaggaggagggaggtttgctttcggtgttctaaatgtgagaaagaaaatactaattaccatagcattatttgtcattttcctaaatgcaagggtaaagaggaaacatctgcgccagccggggaatggtcctgtgaggtatgtggacgagattttaatactaaaattggcttgagtcagcataagcggcttgctcacccagttactaggaatatagagcgaataacagcttcccgcccgaaagaggaaagtgcacgaggtgcacaccgtcggtgttggtctgaagaggaagtggagttgctcaagaagttggaaaaacagtatgaagggaataagaatataaacaaactaattgcagaacaccttccatcaaaaacagcaaagcagataagtgacaaaagaaggggactgataaaaagtccatcaaagggcaacggacagcagagacccaccaagcaaaaatcagaagaacagctgcaggcttactataaaaagacactagaggaacgactttcagctggggcacttaacaccttcccccgagcattcaagcaggtaatggaaggccgggatataaagctagtaatcaatcagacagcgcaggactgcttcggatgcctggaatccataagccaaataagaacggcaacccgagataaaaaggacacggtgacccgggagaaacacccaaagaaaccttttcagaagtggatgaagaagagagcaatcaaaaaaggtaattatcttcggttccagcgtttattttatcttgatagagggaaactggctaaaatcattttagatgatattgaatgcttgtcttgtgacataccactcagtgaaatttattcggtttttaaaacaagatgggaaacaactggtagctttaaaagccttggggactttaaaacttacgggaaggctgacaacactgccttcagagaattaattacggctaaagaaattgagaaaaatgtgcaggaaatgagcaaaggctcggctcccggtccagacgggattactcttggggacgtcgtaaagatggatcccgagttttcccggaccatggagattttcaatttatggttaacaactggtaaaatcccggacatggtgagggggtgcagaaccgttttgattccaaaatcatcagacccggatcgtttgaaagacattaataactggagacctatcacgatcggttccatcttgctgagactgttctccaggattgtaacagctaggctgagcaaagcgtgccccctgaacccaaggcaaagaggctttatcagagcggcgggatgctctgaaaacttaaaactcctgcaaactataatttggtcggccaaaagagaacacagaccactgggtgttgtattcgtggacatcgccaaggcttttgacaccgtaagccaccagcacatcattcatgctttgcagcaaagagaggtggatccccacatcgtcggtctggtgagcaatatgtacgagaacatcagtacgtatatcaccacaaagaggaacacacacacagacaaaatccagatccgggttggagtaaagcagggtgacccgatgtcgccccttttatttaacctggcaatggaccctctattatgcaagctggaagagagtggcaaaggataccaccgaggacagagcagcatcacagcgatggcatttgcagacgatctggttttgctgagcgactcctgggaaaatatgaatacaaatattagcatactggagaccttctgcaatctgaccggactcaaaacacaggggcaaaagtgccacggcttttacatcaagccgacaaagaagtcttacaccatcaatgactgcgctgcctggactatcaacggcacacccctgaacatgatcgaccccggcgaatctgagaaatacctcggcctgcagtttgacccgtggattggaatagcaaggtccggtctctccacaaaactagatttttggcttcagcggatcgatcaagcaccacttaaacctctgcagaaactggatattctcaaaacatacaccatccctcggctgatctacatagctgaccactcagaagtgaaaagcgcactactcgaaacccttgaccagaagatccggacagcggtcaaggaatggcttcacctacctccgtgcacctgcgatgccatcctgtactcgagcacgagagacggcggtttgggcatcaccaaattggcaggactgatccccagcgtgcaggcccgtagactgcatcggatcgcacagtcatctgacgatacgatgaaatgcttcatggaaaaagagaaaatggaacagctgcataagaaattgtggattcaagctggaggggacagagagaacataccctcgatttgggaagcaccaccgtcgagtgaaccaccaaacaacgtgagcacaaattcggaatgggaagcaccgacccagaaagataaatttccaaagccttgcaattggaggaaaaacgaattcaaaaaatggaccaaattggcatcccaaggccgcggaattgtaaattttgaaagagacaaaattagtaaccattggatccaatactacagacgcatacctcacaggaaactcctcactgcactacaactcagggccaacgtttaccccacgagagaatttctagccaggggtagacaagaccaatacatcaaggcgtgtaggcactgcgatgcggacaacgaatcctgcgcccacatcatcggcaactgcccagtgacacaggacgcccgaatcaagaggcacaattacatctgcgaactgcttctcgaggaggcgaagaagaaggactgggtagtgttcaaggaaccgcacataagggattccaacaaggaactgtacaaacctgacctgatatttgtgaaggatgggcgtgcacttgtcgtggatgtgacagtacggtatgaagcagccaaatcatcgctggaggaagccgctgcagagaaagtgagaaagtacaaacacctggaaacggaagtaagacatctcacgaatgcaaaggacgttacttttgtgggctttcccctaggagcgcgggggaaatggcaccaagataactttaaacttttgactgagcttggcctctccaaatcgaggcaagtgaaaatggcagagactttttccacagtagcgctcttttcatctgtggacattgtacatatgtttgccagtagggccagaaaatctatggttatgtgataataggctgccttctgcggggcttgccttctggccatgcccttcttctctcccttgcacctgtacctcttggtctttgaataaagcctgagtaggaaggaccggtaaaaaaaaaaaaaaaaaaaaaaaaaaaaaaacgttgactaaaaaaaaaaaaaaaaaaaaaaaaaaaaaaaaaaaaaaaaaaaaaaaaaaaaaaaaaaaaaaaaaaaaaa

SEQ ID NO: 11307 - DNA, 4349 bp, synthetic construct
  source 1..4349: mol_type = other DNA
gaaataagagagaaaagaagagtaagaagaaatataagagaattcgccaccatggcttcttgcccgaaacctggccccccggtttcagcaggggcaatgagtttggaaagtggactgaccacccactccgttctcgccatcgaacgtggtcccaattcgttggcaaattccggatcagactttgggggggggggtctggggctaccgttacgcctattgagggtatcggtcggcactcagacctcccgctccgactgggtagacctggtgtcctggagccacccaggacccacgtctaagtcccagcaggttgacctggtgtctttatttcctaaacaccgggttgacctgttatccaaaaacgaccaggtagacctggtggctcaatttttaccatctaaatttccccccaatttggcagaaaatgatttggctttgctggtgaacttagagttctacagatcggatttgcatgtgtatgagtgtgttcataaggctgcacattgggagggattaagtggtttgcctgaggtgtatgaacaacttgcaccacaaccgtgtgtgggagaaactttacattctagcctcccacgagacagtgaactgtttgtgcctgaagaggggagcagcgagaaggagagcgaggacgcgccaaaaacatctcctccggaaccagagacaacctccgtggcagcatctccaactctgcctgtaaccaacgtggaacagtcgtcggagagccccatcacagtaattgtgccggataaaaatccttcatgtccctgctgtggtattcgagcgagcggggtatcgggtttgattgagcatttgcgggaggttcacaggaggagggaggtttgctttcggtgttctaaatgtgagaaagaaaatactaattaccatagcattatttgtcattttcctaaatgcaagggtaaagaggaaacatctgcgccagccggggaatggtcctgtgaggagtgtgagaaaacatttgatacaaaaatcggcctggggcagcataagcgcttggtccacccagtcacaagaaatctcgagcggattaccgctgctcgccctaagacaggtactatgagaggggcacatcgtcggtgctggaccgaggatgagatggaattattgagaaagttggataaacaatatgaggggcagaaaaacatcaataagttgattgcggagcatattccgaccaagacaacaaaacagataagtgataaaagacgggaccttcgtaagagcccggtaaaaaagggaaaagatcagggtcagacaaaacatctagaactagaaggggaacacctcgtggaaggggaacatctcgtgtgcattggatcggagatggaggggggactgaggtcccgataccgaaagacagtttctgagtgggtaacatccggaaaattgtccattctccatggaatgtttgagcaggtgatcgaaggagaagaagatccagcactagttgctgataaggcaatgaaagactgtttcacgtgccttgcctctaagtccctggagttgaaaaccagccagggtcgaccgcgtcaggtggcccaaactgctcgaccttcggaaccaccaaaggggtggatgaagaagagagctaggaaacgggggcaatttctacgcttccagcggctgttctacctggatagggggaaactggccggtattatcctggatgacgtggaatccctgaagtgtgctatcccacaagacgagatacacaacgtgttcaagtcgagatgggagtcaccgggaacattcaagggcctgggtgcgttcagatccaagggcctggcggacaactcggcattcgaagccatgatcacggcaaaagaaatctctaaaaacatcagagagatgaacaagaacagtgcaccaggaccagacggactaagtctgcgggatatcatgaagatagacccccattgtgtccagctaatggaactattcaatctatggctggtgactggcaccgtaccggacgtggtgaaagaatgtcggactgtattaatatcgaaatcatctctgccggagcgccaaatggacattaataactggcgtccaattaccatcggatcgattatcttgaggctgttctcaaggatcctgacggcaaggctggcaaaggcatgccctattaactcccgacaaaagggctttattagatcagcgggatgtgctgaaaatttgaaactgttacagctcttgattaagagtgcaaaaaaggaacatcgacccttgggcgttgtctttattgacctggctaaagccttcgacacagtgagtcaccaccatcttatggcagtgctgaaacaaaagggtgtggaccatcacattatcaccctgattacgaacatgtatcaaaacattagaactcgcattactgtgaagaatgagcactcggatcccatcgggattcaaattggtgttaaacaaggagatccaatgtcacctttattgtttaacttatctgtggaccccctattgtgtaagttagaggaagaagggagtggataccatcatgactctaagggtgtaacatctatggcttttgcagatgatttggtattgttaagtgggtcgtgggaaggaatgcagagtaatattaaaatcctggaggccttttgtgagctgactggcctcaggacgcagggggagaaatgccatggcttttacatacaacctactaaggactcgtatactatcaatgattgtcctccatggcagattaacggcaccccattaaatatgattgaacctggtagctcggagaagtacttgggactgagaatagacccatggactggaatatcgaaacccgagctactcaggaaaataagagattggttacaacggattggagaagcaccactgaaaccgtttcagaaagttgacatcttgaagggatataccatcccgcgactgatttacttagcagaccaagccgatgtaaaagcaacgtacctagaagaacttgacctgacgattcgaactacggtcaaggagtggctacatctacctcctagtacctgcgatgccatcctgtattccagcacacgtgacggaggattaggcatcactagactctcgggcttgatccctagtatacaagctcgaaggctgcacagaattgcgcaatcttcggacgatgtgataagatcaatagtgaaacaagaggggatcgaaaaagactttgaaaaattgtggttaacagctgggggcgatagagagaaaataccatctatttgggacccgagtgcgattagggtaacatctgaggaattgggcgaggatgaatttgcttccgagtgggaaataccaactcccaaaaccatctttcctaaaccttgtgactggcgtaaacaggaatttattaattggaccaagttacagtcccagggccgtggtattgccaactttgagaaggataaaatcagtaataattggctcgaacgatatagaggcattcctcaccgaaaactcctcacggcattacaattgagagctaacgtgtaccccactagggaattcctggcaagggggagacaggagtcgcatataaaatcttgtcgacactgtcaagcggaaaatgaatcaagcgctcatatcattgggtactgccccgcggtgcaagacgccagaattaaaagacacaaccaattgtgtgatttattgataactgaagtaaaaaagaaggattggatcgtattccaagagcccatactaaaagatgaacaaaatgagatctacaagcctgatctcgtattcgtaaaaggggaccaggcgatggttattgatgtaacagtgcgatacgaatcggacgagacctctttggagatggcggccacggagaaagtggacaagtacaaacacctgaccaaagagatacgaacgatcaccaacgcgaaagacattgtttttatgggctttcccctcggagctcgggggaaatggtaccaagggaactttgaacttttgaaagcccttggactctccaaatcggatcgagaaaagactgcccggtccttgtcatccatagcactcatgtcatctgtggacatcgtccacatatttgccagcaaatccaggacttgcactacactgtgataataggctgccttctgcggggcttgccttctggccatgcccttcttctctcccttgcacctgtacctcttggtctttgaataaagcctgagtaggaaggaccggtaaaaaaaaaaaaaaaaaaaaaaaaaaaaaaacgttgactaaaaaaaaaaaaaaaaaaaaaaaaaaaaaaaaaaaaaaaaaaaaaaaaaaaaaaaaaaaaaaaaaaaaaa

SEQ ID NO: 11308 - DNA, 4247 bp, synthetic construct
  source 1..4247: mol_type = other DNA
gaaataagagagaaaagaagagtaagaagaaatataagagaattcgccaccatgtcaaaacctgaccctttaaacgtaaatatgtccactccattcttggggacacaaatgcgcctgctcagggtttcaactggaactcaaacatctatgtcagactgggcagactgggcacagaggctctgtggtacagctaccaggtctgcactgtgtaaggtggtcccggtgtccttactatccagacatcagacagaattactagctatgggccatgggagtcagatgcctctaaatgcaccccttaacaccccggacttaacagaaagtgaattggcttgtttggttttggactgggagttttacagaacagatttgtccgctagtagttttaaccttgttcaattttctgctaaccgagagagtttgagtgggctgcctgaggtgtatgaacagccgactccgtttcaacctgaaggggagaaaatctgccccccaagagactgtgaagcagttttggtcggggaaggggaggggagcagtgaggaggtcacaccagaaccatcgccccctgaaccagagacaacctccgtggcagcatctccaactctgcctgtaaccaacgtggaacagtcgtcggagagccccatcacagtaattgtgccggataaaaatccttcatgtccctgctgtggtattcgagcgagcggggtatcgggtttgattgagcatttgcgggaggttcacaggaggagggaggtttgctttcggtgttctaaatgtgagaaagaaaatactaattaccatagcattatttgtcattttcctaaatgcaagggtaaagaggaaacatctgcgccagccggggaatggtcctgtgaggagtgtgagaaaacatttgatacaaaaatcggcctggggcagcataagcgcttggtccacccagtcacaagaaatctcgagcggattaccgctgctcgccctaagacaggtactatgagaggggcacatcgtcggtgctggaccgaggatgagatggaattattgagaaagttggataaacaatatgaggggcagaaaaacatcaataagttgattgcggagcatattccgaccaagacaacaaaacagataagtgataaaagacgggaccttcgtaagagcccggtaaaaaagggaaaagatcagggtcagacaaaacatctagaactagaaggggaacacctcgtggaaggggaacatctcgtgtgcattggatcggagatggaggggggactgaggtcccgataccgaaagacagtttctgagtgggtaacatccggaaaattgtccattctccatggaatgtttgagcaggtgatcgaaggagaagaagatccagcactagttgctgataaggcaatgaaagactgtttcacgtgccttgcctctaagtccctggagttgaaaaccagccagggtcgaccgcgtcaggtggcccaaactgctcgaccttcggaaccaccaaaggggtggatgaagaagagagctaggaaacgggggcaatttctacgcttccagcggctgttctacctggatagggggaaactggccggtattatcctggatgacgtggaatccctgaagtgtgctatcccacaagacgagatacacaacgtgttcaagtcgagatgggagtcaccgggaacattcaagggcctgggtgcgttcagatccaagggcctggcggacaactcggcattcgaagccatgatcacggcaaaagaaatctctaaaaacatcagagagatgaacaagaacagtgcaccaggaccagacggactaagtctgcgggatatcatgaagatagacccccattgtgtccagctaatggaactattcaatctatggctggtgactggcaccgtaccggacgtggtgaaagaatgtcggactgtattaatatcgaaatcatctctgccggagcgccaaatggacattaataactggcgtccaattaccatcggatcgattatcttgaggctgttctcaaggatcctgacggcaaggctggcaaaggcatgccctattaactcccgacaaaagggctttattagatcagcgggatgtgctgaaaatttgaaactgttacagctcttgattaagagtgcaaaaaaggaacatcgacccttgggcgttgtctttattgacctggctaaagccttcgacacagtgagtcaccaccatcttatggcagtgctgaaacaaaagggtgtggaccatcacattatcaccctgattacgaacatgtatcaaaacattagaactcgcattactgtgaagaatgagcactcggatcccatcgggattcaaattggtgttaaacaaggagatccaatgtcacctttattgtttaacttatctgtggaccccctattgtgtaagttagaggaagaagggagtggataccatcatgactctaagggtgtaacatctatggcttttgcagatgatttggtattgttaagtgggtcgtgggaaggaatgcagagtaatattaaaatcctggaggccttttgtgagctgactggcctcaggacgcagggggagaaatgccatggcttttacatacaacctactaaggactcgtatactatcaatgattgtcctccatggcagattaacggcaccccattaaatatgattgaacctggtagctcggagaagtacttgggactgagaatagacccatggactggaatatcgaaacccgagctactcaggaaaataagagattggttacaacggattggagaagcaccactgaaaccgtttcagaaagttgacatcttgaagggatataccatcccgcgactgatttacttagcagaccaagccgatgtaaaagcaacgtacctagaagaacttgacctgacgattcgaactacggtcaaggagtggctacatctacctcctagtacctgcgatgccatcctgtattccagcacacgtgacggaggattaggcatcactagactctcgggcttgatccctagtatacaagctcgaaggctgcacagaattgcgcaatcttcggacgatgtgataagatcaatagtgaaacaagaggggatcgaaaaagactttgaaaaattgtggttaacagctgggggcgatagagagaaaataccatctatttgggacccgagtgcgattagggtaacatctgaggaattgggcgaggatgaatttgcttccgagtgggaaataccaactcccaaaaccatctttcctaaaccttgtgactggcgtaaacaggaatttattaattggaccaagttacagtcccagggccgtggtattgccaactttgagaaggataaaatcagtaataattggctcgaacgatatagaggcattcctcaccgaaaactcctcacggcattacaattgagagctaacgtgtaccccactagggaattcctggcaagggggagacaggagtcgcatataaaatcttgtcgacactgtcaagcggaaaatgaatcaagcgctcatatcattgggtactgccccgcggtgcaagacgccagaattaaaagacacaaccaattgtgtgatttattgataactgaagtaaaaaagaaggattggatcgtattccaagagcccatactaaaagatgaacaaaatgagatctacaagcctgatctcgtattcgtaaaaggggaccaggcgatggttattgatgtaacagtacggtatgaagcagccaaatcatcgctggaggaagccgctgcagagaaagtgagaaagtacaaacacctggaaacggaagtaagacatctcacgaatgcaaaggacgttacttttgtgggctttcccctaggagcgcgggggaaatggcaccaagataactttaaacttttgactgagcttggcctctccaaatcgaggcaagtgaaaatggcagagactttttccacagtagcgctcttttcatctgtggacattgtacatatgtttgccagtagggccagaaaatctatggttatgtgataataggctgccttctgcggggcttgccttctggccatgcccttcttctctcccttgcacctgtacctcttggtctttgaataaagcctgagtaggaaggaccggtaaaaaaaaaaaaaaaaaaaaaaaaaaaaaaacgttgactaaaaaaaaaaaaaaaaaaaaaaaaaaaaaaaaaaaaaaaaaaaaaaaaaaaaaaaaaaaaaaaaaaaaaa

SEQ ID NO: 11309 - DNA, 4337 bp, synthetic construct
  source 1..4337: mol_type = other DNA
gaaataagagagaaaagaagagtaagaagaaatataagagaattcgccaccatgggttggtctgggcggatttggttcgtcacagttgccacccagacaaaatactcggattgggcatttacggttcattccatcacgaaccctgagctggcaggggacgggattgcagatttgagaggactggaatttgtgaatagcgagaagggatattatgtggggcattccccttcccgatccagccttctggctactttaccggaggtatatgaaactccgagggtgatgggcaaagtcaccagcccgagttctgtgctgaccgaacatgagggaagcagcgagaaggagagcgaggacgcgccaaaaacatctcctccgacgcctgggaaacatggtttggaacagactggggaggaaaaagtgatggtgactgttcctgacaaaaatccaccttgtccttgctgtggtacccgggtaaactctgtgttgaatctgattgaacatctgaaagtgtcacacgggaaaaggggggtttgttttcggtgtgcaaaatgtggaaaggaaaatagtaactatcacagtgttgtttgtcattttaagaaatgcaggggtccagagacggagaaagccccagctggggagtggatttgtgaggtatgcaacagagattttacaaccaaaattggcctgggacaacacaagagattggcacacccagcagtgagaaatcaggaaaggatcgttgcttcccaaccgaaagaaacatcaaatagaggtgctcacaaaaggtgctggacaaaggaggaggaagaattactaataagactggaggctcagttcgagggaaacaaaaatattaataagcttattgcagaacacataaccaccaaaacagctaagcagatcagtgacaaaaggcgattgctgtccagaaagccagcagaggagccacgtatggagcctggaacgtgtcatcacaccaggagagcagctgcgagcctgagaacggagcctgagatgagtcatcacgcccaggcagaggacagagataatggacctgggagacgccctctgccaggcagggcagctgccggagggagaacaatggacgagataagacgccaccctgataaggccaacgatcagcaggaggccagtagcagtgggaggggcccagtgaccaggagagcagctgcaggaaagaaaacaaaaaagagtattgatcaccctactgataaggccaacggccagcaggtagccatcagcactagaaggggttgtttgaatagaggagtgactgccggggtagaaacaatagagggctcgagtcacctccctgataaggacagtgacggacagggcacccccagccgggagaaggagggacaattacaagatcactatcaagaagtcatcggagcctggttatcagatgggaggatcaatacctttccagaggcattcaaagggttgttagggaaacgagagatacaggcaacgatcaatcagtcaatactggattgttttgggggcattgattcaaaaagccaggtgaacaaaatgactcgagataagaaagataaaaagccagggagacctccccagaagtggatgaaaaagagagccatcaaaagaggtagctatcttcgcttccaacgtcttttccatcttgataggggaaaattagccaagattgttttggacaatatcgaatgtttgacgtgcgatatcccacccagtgaaatttattccgtttttaaggccaggtgggaaacagcaggcaaatttaccagtcttggggactttaaatttactgaaaaggtggacaatagtgcattcagggatttaattacagctaaggaagtagaaaagaacatgcaagaaatgagcaaaggctcggctcctggtccagatggaattactctgagagacattcaaaaaatggatcctaagctctccaggaccacagagattttcaacctttggttggctgcaggcaaaattccggatggggtgagggaatgcaggactgtcttaattccaaaatcaacaaaaccagaacgcttaaaggacattaacaattggagaccaattacaatcggatccaccttgcttagattattttccaggattttaacagccagactaagcaaggcatgccccctcaacccaagacagaagggcttcattcaagcagccggatgctcagaaaacctgcaactcctgcaatccataatttggtcagcaaaacgggaacacaggcccctgggtgtcgtatttgtggacatcgcaaaggcttttgacacagtaagccacaagcacattctacacgttctgcagcggaggggagtggatcctcacatcatcggcctggtgagtgatatgtatgaaaacattcatacttctatcaccacgaagaaagcacgtacggatcgcatccagatccgagttggagttaaacagggcgacccgatgtctccccttctattcaatctggcaatggaccccctgctgtgcgaactggaaacgaacggcaggggacaccaccgcggcacaaattgcatcacagccatggcgtttgctgacgacctggtcctactgagtgactcctgggaggacatgaagagcaacatcaagatattggaggccttctgcgatctcaccggcctcaaaacgcagggagagaagtgccacggcttttacatcaagccgacgaaggactcgtacacggtcaacgactgtgctgcttggactataaacggcactcccctgaacatgattcttcccggtgagtccgagaaatacctgggcctgcagatagacccatggactggattggcaaaatcggacctctctacaaaactcgactcatggctcgagcaaatcgatagagttccactcaaaccgctgcagaaaattgaactcctgaaaacatacaccatccctcggttgacatacgtggctgaccattcggacttgaaagttagtttcctggagacattggatcagaagattcggacaatagttaaagattggctacacctgcctgcatgtacctgcgatgccatcctatactctagcacgaaggatggcggcctgggcatcactaaattagcaaagctgattcctagcgtacaggctaggagactacacagaatagcccaatcatcggacgaaaccatgaagcaatttctccacagggacaagatggaagcaatgtaccagaaactgtggattcaagctggaggggacagagagaacataccctcgatttgggaagcaccaccgtcgagtgaaccaccaaacaacgtgagcacaaattcggaatgggaagcaccgacccagaaagataaatttccaaagccttgcaattggaggaaaaacgaattcaaaaaatggaccaaattggcatcccaaggccgcggaattgtaaattttgaaagagacaaaattagtaaccattggatccaatactacagacgcatacctcacaggaaactcctcactgcactacaactcagggccaacgtttaccccacgagagaatttctagccaggggtagacaagaccaatacatcaaggcgtgtaggcactgcgatgcggacaacgaatcctgcgcccacatcatcggcaactgcccagtgacacaggacgcccgaatcaagaggcacaattacatctgcgaactgcttctcgaggaggcgaagaagaaggactgggtagtgttcaaggaaccgcacataagggattccaacaaggaactgtacaaacctgacctgatatttgtgaaggatgggcgtgcacttgtcgtggatgtgacagtacggtatgaagcagccaaatcatcgctggaggaagccgctgcagagaaagtgagaaagtacaaacacctggaaacggaagtaagacatctcacgaatgcaaaggacgttacttttgtgggctttcccctaggagcgcgggggaaatggcaccaagataactttaaacttttgactgagcttggcctctccaaatcgaggcaagtgaaaatggcagagactttttccacagtagcgctcttttcatctgtggacattgtacatatgtttgccagtagggccagaaaatctatggttatgtgataataggctgccttctgcggggcttgccttctggccatgcccttcttctctcccttgcacctgtacctcttggtctttgaataaagcctgagtaggaaggaccggtaaaaaaaaaaaaaaaaaaaaaaaaaaaaaaacgttgactaaaaaaaaaaaaaaaaaaaaaaaaaaaaaaaaaaaaaaaaaaaaaaaaaaaaaaaaaaaaaaaaaaaaaa

SEQ ID NO: 11310 - DNA, 5264 bp, synthetic construct
  source 1..5264: mol_type = other DNA
gaaataagagagaaaagaagagtaagaagaaatataagagaattcgccaccatggcccctaagaaaaagcggaaggtgaatatcagcggctctagctgcggcagccccaacagcgccgacaccagcagcgacttcaaggacctgtggaccaagctgaaggaatgccacgaccgggaagtgcagggactccaggtgaaggtcaccaaactcaagcaagaaagaatcctggacgcccagagactggaagaattcttcaccaagaaccagcagctgagagagcagcagaaagtgctgcacgagacaatcaaggttctggaagatagactgcgggccggcctgtgcgacagatgcgccgtgaccgaggaacacatgcgcaaaaagcagcaggagttcgagaacattagacagcaaaatctgaaattgatcacagagctgatgaacgagagaaacacactgcaggaggagaacaagaagctgagcgagcagctgcaacagaagatcgagaatgatcagcaacaccaggccgctgagctggaatgtgaagaggacgtgatccccgacagcccaatcacagctttcagcttttctggcgtgaacagactgaggcggaaggaaaacccccacgtgcggtacatcgagcagacccataccaagctggaacacagcgtgtgtgccaacgagatgagaaaggtgtccaagtcctccacccatccccagcacaaccctaacgaaaatgagatcctggtggctgatacctacgaccagtctcagagccctatggccaaggcccacggcaccagctcttatacccctgataagagctccttcaacctggccaccgtggtggccgagacactgggcctgggcgtgcaggaggaaagcgagacacagggcccaatgagccctctgggagatgagctgtaccactgcctggaaggcaaccacaagaaacagccttttgagtccggctccgagactcctggaacaagcgagagcgctacacctgagggcagccctaagagaaaggtgtccagcgccgagggcgctgccaaggaagagcctaaacggagaagcgccagactgagcgccaagccccccgccaaggtggaagccaagcctaagaaggccgccgctaaggacaagagcagcgataagaaagtccagaccaagggcaagcggggcgccaaaggcaaacaggccgaggtggccaaccaggagacaaaggaagatctgcctgctgagaacggcgaaaccaagaccgaggaatctccagcttctgacgaggccggagagaaggaggccaaaagcgacagcggctctgagacacctggaacaagcgagagcgccaccccggaatcctatgaaactccgagggtgatgggcaaagtcaccagcccgagttctgtgctgaccgaaggggaggggagcagtgaggaggtcacaccagaaccatcgccccctgaaccagagacaacctccgtggcagcatctccaactctgcctgtaaccaacgtggaacagtcgtcggagagccccatcacagtaattgtgccggataaaaatccttcatgtccctgctgtggtattcgagcgagcggggtatcgggtttgattgagcatttgcgggaggttcacaggaggagggaggtttgctttcggtgttctaaatgtgagaaagaaaatactaattaccatagcattatttgtcattttcctaaatgcaagggtaaagaggaaacatctgcgccagccggggaatggtcctgtgaggtatgtggacgagattttaatactaaaattggcttgggacaacataaaagattggcacacccagctgttagaaatcaggaaagggtcgctgcttcccacccaaaagaaaattctaaacgaggagctcataaaaaatgttggactgaagaagaggaaaaattattaatagaattaatagctcagttcgaggggcatgcaaatattaataaattaattgcggaacatattacaaccaaaacagctaaacaaattagtgaaaaaaggagactgctctccaaaaaactaatggtagtggaggcagaatgtgaacctgggccaagtcatcggaccaggagagcagctgcagagataaggaagggagctgagatgaatcaccataatgaggatgctgctgaggacaatggagctgggaggggtcccctgaccaggagagcagctgccggagggagaacaatggacgagataagacgccaccctgataagggcaacggacagcagagacccaccaagcaaaaatcagaagaacagctgcaggcttactataaaaagacactagaggaacgactttcagctggggcacttaacaccttcccccgagcattcaagcaggtaatggaaggccgggatataaagctagtaatcaatcagacagcgcaggactgcttcggatgcctggaatccataagccaaataagaacggcaacccgagataaaaaggacacggtgacccgggagaaacacccaaagaaaccttttcagaagtggatgaagaagagagcaatcaaaaaaggtaattatcttcggttccagcgtttattttatcttgatagagggaaactggctaaaatcattttagatgatattgaatgcttgtcttgtgacataccactcagtgaaatttattcggtttttaaaacaagatgggaaacaactggtagctttaaaagccttggggactttaaaacttacgggaaggctgacaacactgccttcagagaattaattacggctaaagaaattgagaaaaatgtgcaggaaatgagcaaaggctcggctcccggtccagacgggattactcttggggacgtcgtaaagatggatcccgagttttcccggaccatggagattttcaatttatggttaacaactggtaaaatcccggacatggtgagggggtgcagaaccgttttgattccaaaatcatcaaagccggatcgtttgaaagacattaataactggagacctatcacgatcggttccatcttgctgagactgttctccaggattgtaacagctaggctgagcaaagcgtgccccctgaacccaaggcaaagaggctttatcagagcggcgggatgctctgaaaacttaaaactcctgcaaactataatttggtcggccaaaagagaacacagaccactgggtgttgtattcgtggacatcgccaaggcttttgacaccgtaagccaccagcacatcattcatgctttgcagcaaagagaggtggatccccacatcgtcggtctggtgagcaatatgtacgagaacatcagtacgtatatcaccacaaagaggaacacacacacagacaaaatccagatccgggttggagtaaagcagggtgacccgatgtcgccccttttatttaacctggcaatggaccctctattatgcaagctggaagagagtggcaaaggataccaccgaggacagagcagcatcacagcgatggcatttgcagacgatctggttttgctgagcgactcctgggaaaatatgaatacaaatattagcatactggagaccttctgcaatctgaccggactcaaaacacaggggcaaaagtgccacggcttttacatcaagccgacaaaggactcttacaccatcaatgactgcgctgcctggactatcaacggcacacccctgaacatgatcgaccccggcgaatctgagaaatacctcggcctgcagtttgacccgtggattggaatagcaaggtccggtctctccacaaaactagatttttggcttcagcggatcgatcaagcaccacttaaacctctgcagaaaactgatattctcaaaacatacaccatccctcggctgatctacatagctgaccactcagaagtgaaaagcgcactactcgaaacccttgaccagaagatccggacagcggtcaaggaatggcttcacctacctccgtgcacctgcgatgccatcctgtactcgagcacgagagacggcggtttgggcatcaccaaattggcaggactgatccccagcgtgcaggcccgtagactgcatcggatcgcacagtcatctgacgatacgatgaaatgcttcatggaaaaagagaaaatggaacagctgcataagaaattgtggattcaagctggaggggacagagagaacataccctcgatttgggaagcaccaccgtcgagtgaaccaccaaacaacgtgagcacaaattcggaatgggaagcaccgacccagaaagataaatttccaaagccttgcaattggaggaaaaacgaattcaaaaaatggaccaaattggcatcccaaggccgcggaattgtaaattttgaaagagacaaaattagtaaccattggatccaatactacagacgcatacctcacaggaaactcctcactgcactacaactcagggccaacgtttaccccacgagagaatttctagccaggggtagacaagaccaatacatcaaggcgtgtaggcactgcgatgcggacaacgaatcctgcgcccacatcatcggcaactgcccagtgacacaggacgcccgaatcaagaggcacaattacatctgcgaactgcttctcgaggaggcgaagaagaaggactgggtagtgttcaaggaaccgcacataagggattccaacaaggaactgtacaaacctgacctgatatttgtgaaggatgggcgtgcacttgtcgtggatgtgacaataagatatgaaataactacaaaaacattggaagaagcagcattggcgaaagcaaaaaagtatgctcatttaaaatcacaaattcaggacttgaccaatacttctattataaattttacaggctttcctttgggatcccgtggtaaatggtaccagggtaattacaatatattaaaggatttgggtctctccagttcccgacaagagaaggtcgccagacgattgtcgaattacgctttatttagctcggtggacattgttcacatgtttgcaagtaaagcgaggacagaggtaagatgataataggctgccttctgcggggcttgccttctggccatgcccttcttctctcccttgcacctgtacctcttggtctttgaataaagcctgagtaggaaggaccggtaaaaaaaaaaaaaaaaaaaaaaaaaaaaaaacgttgactaaaaaaaaaaaaaaaaaaaaaaaaaaaaaaaaaaaaaaaaaaaaaaaaaaaaaaaaaaaaaaaaaaaaaa

SEQ ID NO: 11311 - DNA, 5201 bp, synthetic construct
  source 1..5201: mol_type = other DNA
gaaataagagagaaaagaagagtaagaagaaatataagagaattcgccaccatggcccctaagaaaaagcggaaggtgaatatcagcggctctagctgcggcagccccaacagcgccgacaccagcagcgacttcaaggacctgtggaccaagctgaaggaatgccacgaccgggaagtgcagggactccaggtgaaggtcaccaaactcaagcaagaaagaatcctggacgcccagagactggaagaattcttcaccaagaaccagcagctgagagagcagcagaaagtgctgcacgagacaatcaaggttctggaagatagactgcgggccggcctgtgcgacagatgcgccgtgaccgaggaacacatgcgcaaaaagcagcaggagttcgagaacattagacagcaaaatctgaaattgatcacagagctgatgaacgagagaaacacactgcaggaggagaacaagaagctgagcgagcagctgcaacagaagatcgagaatgatcagcaacaccaggccgctgagctggaatgtgaagaggacgtgatccccgacagcccaatcacagctttcagcttttctggcgtgaacagactgaggcggaaggaaaacccccacgtgcggtacatcgagcagacccataccaagctggaacacagcgtgtgtgccaacgagatgagaaaggtgtccaagtcctccacccatccccagcacaaccctaacgaaaatgagatcctggtggctgatacctacgaccagtctcagagccctatggccaaggcccacggcaccagctcttatacccctgataagagctccttcaacctggccaccgtggtggccgagacactgggcctgggcgtgcaggaggaaagcgagacacagggcccaatgagccctctgggagatgagctgtaccactgcctggaaggcaaccacaagaaacagccttttgagtccggctccgagactcctggaacaagcgagagcgctacacctgagggcagccctaagagaaaggtgtccagcgccgagggcgctgccaaggaagagcctaaacggagaagcgccagactgagcgccaagccccccgccaaggtggaagccaagcctaagaaggccgccgctaaggacaagagcagcgataagaaagtccagaccaagggcaagcggggcgccaaaggcaaacaggccgaggtggccaaccaggagacaaaggaagatctgcctgctgagaacggcgaaaccaagaccgaggaatctccagcttctgacgaggccggagagaaggaggccaaaagcgacagcggctctgagacacctggaacaagcgagagcgccaccccggaatcctatgaaactccgagggtgatgggcaaagtcaccagcccgagttctgtgctgaccgaacatgagggagatagaacatcttctcccccaagaacaccacctcctattcttgagaccggggcagaccttccacaggagggcacacctgtggtaaaggtcccggatgataatccagcgtgtccatgctgcggtaatcgaataggaaggatttcggggcttatcgatcacttaaagagaacccatggaaagaaaaagatcctctttcaatgtgccaaatgtgggagaacaaatctgaaacatcacagtatcgcttgtcacgttccaaagtgcaaaggcgccaaggggaccagcccattaaggggctgggcctgcgaggaatgcaatagaacatttgggactaaaattggcttaggacaacacaagagattggcacacccagcagtgagaaatcaggaaaggatcgttgcttcccaaccgaaagaaacatcaaatagaggtgctcacaaaaggtgctggacaaaggaggaggaagaattactaataagactggaggctcagttcgagggaaacaaaaatattaataagcttattgcagaacacataaccaccaaaacagctaagcagatcagtgacaaaaggcgattgctgtccagaaagccagcagaggagccacgtgaggagcctggaacgtgtcatcacaccaggagagcagctgcgagcctgagaacggagcctgagatgagtcatcacgcccaggcagaggacagagataatggacctccatctaaaaagaaggtgaaagagctggggataagagaagaacttatgaaagagggagaatatctggaaaggagtggctcccaagaagaggggggactaaggtcccgatatcgaaagtcgattgcagaatggttaagaactcggaaaataaccactctcagggagatctacgagagagtgatgaaagggaaaaaagatcttcccgcgctagtggatgaagctgcccagggccactatgcatgcctgaaaaaagatcttttggaaggggaaagacggcaaattcagaagatccgagaaatccgcagatcccgtccacagaaaccatcaaagcaatggacaataaagagggccagaaaaagggggcagttcctacggttccagcggctattccatctggatagaaggaaactggccggtattatcctggacgatgtagaatccctccaatgtggtattccacttgatgcgatacatgaggtattcaagtcaagatgggaatcacccggaacattcaagggcctgggtacattctgtaccaatggacttgcagataattcagcattccaacctatgattactgtgaaggagattgagaagaatatcagagaaatgaacaaaaatacagcaccaggaccggatggggtcactctgcgggatctcatgaaagccgatccccaatgtgtcaatttaatggaattatttaatttatggttattaaccgggtatataccggatggcattaaaaattgtagaacaatattgatacctaaatcaaatgtaccagaaaagttaaacgatgtgaacaattggagacctataacaattggctcgattatattaagattgttttctaaaatattaacggcacgattaagtaaggcatgcccaattaatacccggcagagggggtttataaaatcgcctggatgctccgaaaatttaaaattattacagcttgtgattcagtatgcaaaaagggagcaccgccctctcggggtagtctttgttgatctggcgaaagcatttgatacggtgagccatgctcatataatagcagtattaaagcaaaaaggtgtggatgaacatataataaatttgattgaaaattcttatcataatattaagacttatattgatatgaaaaaggaaaaatctgactcaattggaattcgaattggagtaaaacaaggcgatccaatgtctccaattttgtttaacttatctgtcgatcctctattatgtaaactggatgagattggtaatgggtttgagtgtcatacgaaagttgtaacatcactggccttcgccgacgatttagtattattaagtgggtcctgggaaggcatgcagaaaaacatagaaattgtcgagaccttttgtgaacttacgggtctcaaaatgcagggggaaaaatgtcacggcttttacatcaagccaacaaaagattcatatactatcaatgattgtcctccttggactattaatggcaccccccttaatatgattgaacccggtagctctgagaaatatttgggtctccgtatagacccatggacaggaatatctaaaccagaactactggagaaagttgatagatggcttgcgaaagtgggaaaggctcctttgaaaccttttcagaaggttgatatcttgaaagggcacttgatcccaagattgatataccttgcggaccaagcaaatttaaaaccaactcatttggaaaatattgatttggccatacgaaacggagtcaaggagtggttgcacttaccagcgtgcacatgtgatgccatcctgtattctaatactcaggatggaggattgggaattaatagattggcagcattaattcctaatgttcaaactcgacgattacatagaattgcccagacaacggatgatgtattgaaagagattgtgaaacaagaaggaattgagagagaatatgagaaattgtgggtaatggctggtggtgataaggaaaagataccatctatatgggacccgaaatcaataatggtaatatcagaaacgggcggggaagaactatcggaatgggagtcccccaatccaaaattgatttatccaaaaccttgtaactggagaaaaagggaatttaacaattgggtcaaattgtcaacacagggtcgaggtattagtaattttgaaaaagataaaataagtaataattggatacaacaatataggggcattcctcaaaggaaagtaattacagcattacaattacgtgctaatatctatccaacaagggaatttttagcgagaggacaatcagaaacatatattaaatcttgtcgtcattgtcaggctgatatagaaacgtgtgcacatataattggctattgtccatctgtacaggatgcaagaattaaaagacataatcaaatttgtaatatattggcagaggaagctaagagtaaagattggcttgtgtatcaagaaccattattaagagatgaatcaaatgaattatataaacctgatttaatttttgttaaggagaatcaggctattgtgacggatgtaactataagatatgaaataactacaaaaacattggaagaagcagcattggcgaaagcaaaaaagtatgctcatttaaaatcacaaattcaggacttgaccaatacttctattataaattttacaggctttcctttgggatcccgtggtaaatggtaccagggtaattacaatatattaaaggatttgggtctctccagttcccgacaagagaaggtcgccagacgattgtcgaattacgctttatttagctcggtggacattgttcacatgtttgcaagtaaagcgaggacagaggtaagatgataataggctgccttctgcggggcttgccttctggccatgcccttcttctctcccttgcacctgtacctcttggtctttgaataaagcctgagtaggaaggaccggtaaaaaaaaaaaaaaaaaaaaaaaaaaaaaaacgttgactaaaaaaaaaaaaaaaaaaaaaaaaaaaaaaaaaaaaaaaaaaaaaaaaaaaaaaaaaaaaaaaaaaaaaa

SEQ ID NO: 11312 - DNA, 5078 bp, synthetic construct
  source 1..5078: mol_type = other DNA
gaaataagagagaaaagaagagtaagaagaaatataagagaattcgccaccatggcccctaagaaaaagcggaaggtgaatatcagcggctctagctgcggcagccccaacagcgccgacaccagcagcgacttcaaggacctgtggaccaagctgaaggaatgccacgaccgggaagtgcagggactccaggtgaaggtcaccaaactcaagcaagaaagaatcctggacgcccagagactggaagaattcttcaccaagaaccagcagctgagagagcagcagaaagtgctgcacgagacaatcaaggttctggaagatagactgcgggccggcctgtgcgacagatgcgccgtgaccgaggaacacatgcgcaaaaagcagcaggagttcgagaacattagacagcaaaatctgaaattgatcacagagctgatgaacgagagaaacacactgcaggaggagaacaagaagctgagcgagcagctgcaacagaagatcgagaatgatcagcaacaccaggccgctgagctggaatgtgaagaggacgtgatccccgacagcccaatcacagctttcagcttttctggcgtgaacagactgaggcggaaggaaaacccccacgtgcggtacatcgagcagacccataccaagctggaacacagcgtgtgtgccaacgagatgagaaaggtgtccaagtcctccacccatccccagcacaaccctaacgaaaatgagatcctggtggctgatacctacgaccagtctcagagccctatggccaaggcccacggcaccagctcttatacccctgataagagctccttcaacctggccaccgtggtggccgagacactgggcctgggcgtgcaggaggaaagcgagacacagggcccaatgagccctctgggagatgagctgtaccactgcctggaaggcaaccacaagaaacagccttttgagtccggctccgagactcctggaacaagcgagagcgctacacctgagggcagccctaagagaaaggtgtccagcgccgagggcgctgccaaggaagagcctaaacggagaagcgccagactgagcgccaagccccccgccaaggtggaagccaagcctaagaaggccgccgctaaggacaagagcagcgataagaaagtccagaccaagggcaagcggggcgccaaaggcaaacaggccgaggtggccaaccaggagacaaaggaagatctgcctgctgagaacggcgaaaccaagaccgaggaatctccagcttctgacgaggccggagagaaggaggccaaaagcgacagcggctctgagacacctggaacaagcgagagcgccaccccggaatcctatgaaactccgagggtgatgggcaaagtcaccagcccgagttctgtgctgaccgaacatgagggagatagaacatcttctcccccaagaacaccacctcctattcttgagaccggggcagaccttccacaggagggcacacctgtggtaaaggtcccggatgataatccagcgtgtccatgctgcggtaatcgaataggaaggatttcggggcttatcgatcacttaaagagaacccatggaaagaaaaagatcctctttcaatgtgccaaatgtgggagaacaaatctgaaacatcacagtatcgcttgtcacgttccaaagtgcaaaggcgccaaggggaccagcccattaaggggctgggcctgcgaggaatgcaatagaacatttgggactaaaattggcttagggcagcataagcgcttggtccatccagtcacaagaaatctcgagcggattgccactacacgccccaaggcaggtacaatgaggggggcacatcgtcggtgctggaccgaggatgagattgaactattgaggaagttggataaacaatatgaggggcagaaaaacatcaacaagttgattgcggagcatattccgaccaagacaacgaagcagataagcgataaaagacgggaccttcataagagcccatctaaaaagaaggtgaaagagctggggataagagaagaacttatgaaagagggagaatatctggaaaggagtggctcccaagaagaggggggactaaggtcccgatatcgaaagtcgattgcagaatggttaagaactcggaaaataaccactctcagggagatctacgagagagtgatgaaagggaaaaaagatcttcccgcgctagtggatgaagctgcccagggccactatgcatgcctgaaaaaagatcttttggaaggggaaagacggcaaattcagaagatccgagaaatccgcagatcccgtccacagaaaccatcaaagcaatggacaataaagagggccagaaaaagggggcagttcctacggttccagcggctattccatctggatagaaggaaactggccggtattatcctggacgatgtagaatccctccaatgtggtattccacttgatgcgatacatgaggtattcaagtcaagatgggaatcacccggaacattcaagggcctgggtacattctgtaccaatggacttgcagataattcagcattccaacctatgattactgtgaaggagattgagaagaatatcagagaaatgaacaaaaatacagcaccaggaccggatggggtcactctgcgggatctcatgaaagccgatccccaatgtgtcaatttaatggaattatttaatttatggttattaaccgggtatataccggatggcattaaaaattgtagaacaatattgatacctaaatcaaatgtaccagaaaagttaaacgatgtgaacaattggagacctataacaattggctcgattatattaagattgttttctaaaatattaacggcacgattaagtaaggcatgcccaattaatacccggcagagggggtttataaaatcgcctggatgctccgaaaatttaaaattattacagcttgtgattcagtatgcaaaaagggagcaccgccctctcggggtagtctttgttgatctggcgaaagcatttgatacggtgagccatgctcatataatagcagtattaaagcaaaaaggtgtggatgaacatataataaatttgattgaaaattcttatcataatattaagacttatattgatatgaaaaaggaaaaatctgactcaattggaattcgaattggagtaaaacaaggcgatccaatgtctccaattttgtttaacttatctgtcgatcctctattatgtaaactggatgagattggtaatgggtttgagtgtcatacgaaagttgtaacatcactggccttcgccgacgatttagtattattaagtgggtcctgggaaggcatgcagaaaaacatagaaattgtcgagaccttttgtgaacttacgggtctcaaaatgcagggggaaaaatgtcacggcttttacatcaagccaacaaaagattcatatactatcaatgattgtcctccttggactattaatggcaccccccttaatatgattgaacccggtagctctgagaaatatttgggtctccgtatagacccatggacaggaatatctaaaccagaactactggagaaagttgatagatggcttgcgaaagtgggaaaggctcctttgaaaccttttcagaaggttgatatcttgaaagggcacttgatcccaagattgatataccttgcggaccaagcaaatttaaaaccaactcatttggaaaatattgatttggccatacgaaacggagtcaaggagtggttgcacttaccagcgtgcacatgtgatgccatcctgtattctaatactcaggatggaggattgggaattaatagattggcagcattaattcctaatgttcaaactcgacgattacatagaattgcccagacaacggatgatgtattgaaagagattgtgaaacaagaaggaattgagagagaatatgagaaattgtgggtaatggctggtggtgataaggaaaagataccatctatatgggacccgaaatcaataatggtaatatcagaaacgggcggggaagaactatcggaatgggagtcccccaatccaaaattgatttatccaaaaccttgtaactggagaaaaagggaatttaacaattgggtcaaattgtcaacacagggtcgaggtattagtaattttgaaaaagataaaataagtaataattggatacaacaatataggggcattcctcaaaggaaagtaattacagcattacaattacgtgctaatatctatccaacaagggaatttttagcgagaggacaatcagaaacatatattaaatcttgtcgtcattgtcaggctgatatagaaacgtgtgcacatataattggctattgtccatctgtacaggatgcaagaattaaaagacataatcaaatttgtaatatattggcagaggaagctaagagtaaagattggcttgtgtatcaagaaccattattaagagatgaatcaaatgaattatataaacctgatttaatttttgttaaggagaatcaggctattgtgacggatgtaactataagatatgaaataactacaaaaacattggaagaagcagcattggcgaaagcaaaaaagtatgctcatttaaaatcacaaattcaggacttgaccaatacttctattataaattttacaggctttcctttgggatcccgtggtaaatggtaccagggtaattacaatatattaaaggatttgggtctctccagttcccgacaagagaaggtcgccagacgattgtcgaattacgctttatttagctcggtggacattgttcacatgtttgcaagtaaagcgaggacagaggtaagatgataataggctgccttctgcggggcttgccttctggccatgcccttcttctctcccttgcacctgtacctcttggtctttgaataaagcctgagtaggaaggaccggtaaaaaaaaaaaaaaaaaaaaaaaaaaaaaaacgttgactaaaaaaaaaaaaaaaaaaaaaaaaaaaaaaaaaaaaaaaaaaaaaaaaaaaaaaaaaaaaaaaaaaaaaa

SEQ ID NO: 11313 - DNA, 5222 bp, synthetic construct
  source 1..5222: mol_type = other DNA
gaaataagagagaaaagaagagtaagaagaaatataagagaattcgccaccatggcccctaagaaaaagcggaaggtgaatatcagcggctctagctgcggcagccccaacagcgccgacaccagcagcgacttcaaggacctgtggaccaagctgaaggaatgccacgaccgggaagtgcagggactccaggtgaaggtcaccaaactcaagcaagaaagaatcctggacgcccagagactggaagaattcttcaccaagaaccagcagctgagagagcagcagaaagtgctgcacgagacaatcaaggttctggaagatagactgcgggccggcctgtgcgacagatgcgccgtgaccgaggaacacatgcgcaaaaagcagcaggagttcgagaacattagacagcaaaatctgaaattgatcacagagctgatgaacgagagaaacacactgcaggaggagaacaagaagctgagcgagcagctgcaacagaagatcgagaatgatcagcaacaccaggccgctgagctggaatgtgaagaggacgtgatccccgacagcccaatcacagctttcagcttttctggcgtgaacagactgaggcggaaggaaaacccccacgtgcggtacatcgagcagacccataccaagctggaacacagcgtgtgtgccaacgagatgagaaaggtgtccaagtcctccacccatccccagcacaaccctaacgaaaatgagatcctggtggctgatacctacgaccagtctcagagccctatggccaaggcccacggcaccagctcttatacccctgataagagctccttcaacctggccaccgtggtggccgagacactgggcctgggcgtgcaggaggaaagcgagacacagggcccaatgagccctctgggagatgagctgtaccactgcctggaaggcaaccacaagaaacagccttttgagtccggctccgagactcctggaacaagcgagagcgctacacctgagggcagccctaagagaaaggtgtccagcgccgagggcgctgccaaggaagagcctaaacggagaagcgccagactgagcgccaagccccccgccaaggtggaagccaagcctaagaaggccgccgctaaggacaagagcagcgataagaaagtccagaccaagggcaagcggggcgccaaaggcaaacaggccgaggtggccaaccaggagacaaaggaagatctgcctgctgagaacggcgaaaccaagaccgaggaatctccagcttctgacgaggccggagagaaggaggccaaaagcgacagcggctctgagacacctggaacaagcgagagcgccaccccggaatccttcgagtctccgaaggtgtcgggcaggactatcagcccaagctctgtgcagaccgaatatacaggagaaagaacatcatctcctccaataacaccacctcccatcttggaagccggggcagatcctccgcaggagggcacacctgtggtaaagatcccagacaaaaatccagcttgtccatgctgcggcaaccgaatgggaaagattacgggactggttgatcatctgaagagaacccatgggaagagaaagatcttattccagtgtgcccgttgtgggagaacgaacccgaaacatcatagtatcgcttgccacatcccaaagtgtaaaggcgctgaggagcccagcatatcgatgggctgggcctgtgaggaatgcaatagaacatttgggacaaaaattggtttgggacaacataaaagattggcacacccagctgttagaaatcaggaaagggtcgctgcttcccacccaaaagaaaattctaaacgaggagctcataaaaaatgttggactgaagaagaggaaaaattattaatagaattaatagctcagttcgaggggcatgcaaatattaataaattaattgcggaacatattacaaccaaaacagctaaacaaattagtgaaaaaaggagactgctctccaaaaaactaatggtagtggaggcagaatgtgaacctgggccaagtcatcggaccaggagagcagctgcagagataaggaagggagctgagatgaatcaccataatgaggatgctgctgaggacaatggagctccatctaagaaatctccatctaaaagaaaagggaaaaatctggcgctgcgagaacaacttatggaagaaggggaacatctaccagagagtggctcacaagatggagggggactgcggccccattaccgaaaggttattgctgaatggataagatctcagaaaataacctccctcaaggatgtctttgagagagtgatcaaagggaaagaagatctcccattactagtggacaaagctgcccaggaccactatgcatgcctgaaaatggatttgattgaagagggggatcggcaaagtcaaaagatccgagaaatccgcaggccccgtccacagaaaccatcaaaacaatggactaaaagaagggccagaaaaagggggcagttcctacggttccagcggctgttccacctagatagagggaaacttgccggtattatcctggacgacgtggaatccctccaatgtggtattccacttgacgtggtgcatgaagtattcaagtcaagatgggaatcacccggtacattcaagggcctgggaacattcaatactattggacacgcggacaattccgcatttcaaaccttgattactgcaaaggagatcgtgaaaaacatccgagaaatgaataaaaacgcagcaccaggaccggacgggatttccctgcgggatctcatgaaaaccgacccccattgtactaaattaatggaattatttaatttgtggttgactactggttatataccagagggaataaaaaattgtagaacaatattgataccgaaatcatctgtaccagaaaagttaaatgatgtaaataattggagacctataactattggctcgattgtattaagattgttttcaaaaatcttgactgctcgattaactaaggcatgtcctattaacactcggcaaagagggtttataagatctcctggttgttccgaaaatttgaagttattacaattattaattcgatatgcaaaaagggaacaccttcccctcggggttgtctttgttgacttggcaaaagcatttgatacggtgagccactcccatataattgcagttcttaaacaaaagggagtcgatgagcatataataagactaattgaaaattcatatgaaaatattaatacatatattgatatgaaaaatgttaaatctgaccttattggaatacaaattggtgtgaaacaaggcgatccgatgtctccaattttgtttaacttgtctgtggaccctcttttatgtaaacttgaagaaatgggtaacggatttcaatattatacgaaagatgtaacatcactggccttcgctgacgatttagtattagtaagtgggtcctgggaaggtatgcaaagaaatatagaaatcgtcgagaccttttgtgaacttactggtctcaaaatgcaaggggaaaagtgccatggcttttacatcaagccaacaaaggactcatatacgatcaatgactgtccaccatggactattaacggcacccccctcaatatgattgaacctggtagctctgagaaatacctgggtctatatattgacccatggacaggaatatctaaacccgagctactcgagaaagtcgatagatggttgtcgaaagtgggaaaggcaccattaaaaccttttcagaaggttgacatcttgaaggggcacctgatcccaagattaatttatcttgcggaccaagcaaatttgaaatcaactcacttagagtcccttgacttagccatacgaattggagtcaaggagtggttgcacttaccatcgtgcacctgtgattccatcctttattctaatactcaggatggaggattagggatcagtagattggcggcactgatccccagtgtgcaagctcggagactgcacagaattgcccaaactacggacgatgttttaagaactgtagtcgaaagagaaggaatagaaggagaatttaagaaattatgggtgacggctggtggtgacaaagaaaagattccatctatatgggaccccaaaacaattatggtaatatctgaaacgggcggtgaccaatcactatcggaatgggagactcccaatccaaaaattttctatccaaaaccttgtaactggcgaaaaagggaatttaacaattggactaaattattaactcaaggtcggggtatcgctaactttgaaaaagataaaataagtaacaattggattatacattacaggggcattcctcaaaggaaattgattactgcattacaactgcgtgctaatatttatccaacaagggaatttttatctagaggacggtcagaaacttatattaaatcttgccgtcactgtcaggctgacaatgaaacttgttcacatataattggctattgtccatctgtacaagacgcaagaatcaaaaggcataatcaaatttgtcatatattggcagaagaagccaaaagtaaggattggctggtttaccaagaaccgttattaagggatcagcaaaatgaattatataaacctgatttgatttttgttaaagggaatcaggcaatagttaccgatataacaattagatatgaaacatctttaacaactttggaggaggcagcattggaaaaagcaaagaagtatgcacatttagttactcaaattcaggacctgacgaatacatctgttataaattttacaggctttcctttgggatctcgtggtaaatggtaccagaacaacttcaaaatattaaaggaattgggtctctccagctcccgacaagaaaaggtcgccagacgattgtcaaactatgctttatttagctcggtggacattgttcacatgtttgctagtaaagcgaggacagaggtaagatgataataggctgccttctgcggggcttgccttctggccatgcccttcttctctcccttgcacctgtacctcttggtctttgaataaagcctgagtaggaaggaccggtaaaaaaaaaaaaaaaaaaaaaaaaaaaaaaacgttgactaaaaaaaaaaaaaaaaaaaaaaaaaaaaaaaaaaaaaaaaaaaaaaaaaaaaaaaaaaaaaaaaaaaaaa

SEQ ID NO: 11314 - DNA, 5225 bp, synthetic construct
  source 1..5225: mol_type = other DNA
gaaataagagagaaaagaagagtaagaagaaatataagagaattcgccaccatggcccctaagaaaaagcggaaggtgaatatcagcggctctagctgcggcagccccaacagcgccgacaccagcagcgacttcaaggacctgtggaccaagctgaaggaatgccacgaccgggaagtgcagggactccaggtgaaggtcaccaaactcaagcaagaaagaatcctggacgcccagagactggaagaattcttcaccaagaaccagcagctgagagagcagcagaaagtgctgcacgagacaatcaaggttctggaagatagactgcgggccggcctgtgcgacagatgcgccgtgaccgaggaacacatgcgcaaaaagcagcaggagttcgagaacattagacagcaaaatctgaaattgatcacagagctgatgaacgagagaaacacactgcaggaggagaacaagaagctgagcgagcagctgcaacagaagatcgagaatgatcagcaacaccaggccgctgagctggaatgtgaagaggacgtgatccccgacagcccaatcacagctttcagcttttctggcgtgaacagactgaggcggaaggaaaacccccacgtgcggtacatcgagcagacccataccaagctggaacacagcgtgtgtgccaacgagatgagaaaggtgtccaagtcctccacccatccccagcacaaccctaacgaaaatgagatcctggtggctgatacctacgaccagtctcagagccctatggccaaggcccacggcaccagctcttatacccctgataagagctccttcaacctggccaccgtggtggccgagacactgggcctgggcgtgcaggaggaaagcgagacacagggcccaatgagccctctgggagatgagctgtaccactgcctggaaggcaaccacaagaaacagccttttgagtccggctccgagactcctggaacaagcgagagcgctacacctgagggcagccctaagagaaaggtgtccagcgccgagggcgctgccaaggaagagcctaaacggagaagcgccagactgagcgccaagccccccgccaaggtggaagccaagcctaagaaggccgccgctaaggacaagagcagcgataagaaagtccagaccaagggcaagcggggcgccaaaggcaaacaggccgaggtggccaaccaggagacaaaggaagatctgcctgctgagaacggcgaaaccaagaccgaggaatctccagcttctgacgaggccggagagaaggaggccaaaagcgacagcggctctgagacacctggaacaagcgagagcgccaccccggaatccttcgagtctccgaaggtgtcgggcaggactatcagcccaagctctgtgcagaccgaatatacaggagaaagaacatcatctcctccaataacaccacctcccatcttggaagccggggcagatcctccgcaggagggcacacctgtggtaaagatcccagacaaaaatccagcttgtccatgctgcggcaaccgaatgggaaagattacgggactggttgatcatctgaagagaacccatgggaagagaaagatcttattccagtgtgcccgttgtgggagaacgaacccgaaacatcatagtatcgcttgccacatcccaaagtgtaaaggcgctgaggagcccagcatatcgatgggctgggcctgtgaggaatgcaatagaacatttgggacaaaaattggtttgggacaacataaaagattggcacacccagctgttagaaatcaggaaagggtcgctgcttcccacccaaaagaaaattctaaacgaggagctcataaaaaatgttggactgaagaagaggaaaaattattaatagaattaatagctcagttcgaggggcatgcaaatattaataaattaattgcggaacatattacaaccaaaacagctaaacaaattagtgaaaaaaggagactgctctccaaaaaactaatggtagtggaggcagaatgtgaacctgggccaagtcatcggaccaggagagcagctgcagagataaggaagggagctgagatgaatcaccataatgaggatgctgctgaggacaatggagctccatctaagaaatctccatctaaaagaaaagggaaaaatctggcgctgcgagaacaacttatggaagaaggggaacatctaccagagagtggctcacaagatggagggggactgcggccccattaccgaaaggttattgctgaatggataagatctcagaaaataacctccctcaaggatgtctttgagagagtgatcaaagggaaagaagatctcccattactagtggacaaagctgcccaggaccactatgcatgcctgaaaatggatttgattgaagagggggatcggcaaagtcaaaagatccgagaaatccgcaggccccgtccacagaaaccatcaaaacaatggactaaaagaagggccagaaaaagggggcagttcctacggttccagcggctgttccacctagatagagggaaacttgccggtattatcctggacgacgtggaatccctccaatgtggtattccacttgacgtggtgcatgaagtattcaagtcaagatgggaatcacccggtacattcaagggcctgggaacattcaatactattggacacgcggacaattccgcatttcaaaccttgattactgcaaaggagatcgtgaaaaacatccgagaaatgaataaaaacgcagcaccaggaccggacgggatttccctgcgggatctcatgaaaaccgacccccattgtactaaattaatggaattatttaatttgtggttgactactggttatataccagagggaataaaaaattgtagaacaatattgataccgaaatcatctgtaccagaaaagttaaatgatgtaaataattggagacctataactattggctcgattgtattaagattgttttcaaaaatcttgactgctcgattaactaaggcatgtcctattaacactcggcaaagagggtttataagatctcctggttgttccgaaaatttgaagttattacaattattaattcgatatgcaaaaagggaacaccttcccctcggggttgtctttgttgacttggcaaaagcatttgatacggtgagccactcccatataattgcagttcttaaacaaaagggagtcgatgagcatataataagactaattgaaaattcatatgaaaatattaatacatatattgatatgaaaaatgttaaatctgaccttattggaatacaaattggtgtgaaacaaggcgatccgatgtctccaattttgtttaacttgtctgtggaccctcttttatgtaaacttgaagaaatgggtaacggatttcaatattatacgaaagatgtaacatcactggccttcgctgacgatttagtattagtaagtgggtcctgggaaggtatgcaaagaaatatagaaatcgtcgagaccttttgtgaacttactggtctcaaaatgcaaggggaaaagtgccatggcttttacatcaagccaacaaaggactcatatacgatcaatgactgtccaccatggactattaacggcacccccctcaatatgattgaacctggtagctctgagaaatacctgggtctatatattgacccatggacaggaatatctaaacccgagctactcgagaaagtcgatagatggttgtcgaaagtgggaaaggcaccattaaaaccttttcagaaggttgacatcttgaaggggcacctgatcccaagattaatttatcttgcggaccaagcaaatttgaaatcaactcacttagagtcccttgacttagccatacgaattggagtcaaggagtggttgcacttaccatcgtgcacctgtgattccatcctttattctaatactcaggatggaggattagggatcagtagattggcggcactgatccccagtgtgcaagctcggagactgcacagaattgcccaaactacggacgatgttttaagaactgtagtcgaaagagaaggaatagaaggagaatttaagaaattatgggtgacggctggtggtgacaaagaaaagattccatctatatgggaccccaaaacaattatggtaatatctgaaacgggcggtgaccaatcactatcggaatgggagactcccaatccaaaaattttctatccaaaaccttgtaactggcgaaaaagggaatttaacaattggactaaattattaactcaaggtcggggtatcgctaactttgaaaaagataaaataagtaacaattggattatacattacaggggcattcctcaaaggaaattgattactgcattacaactgcgtgctaatatttatccaacaagggaatttttatctagaggacggtcagaaacttatattaaatcttgccgtcactgtcaggctgacaatgaaacttgttcacatataattggctattgtccatctgtacaagacgcaagaatcaaaaggcataatcaaatttgtcatatattggcagaagaagccaaaagtaaggattggctggtttaccaagaaccgttattaagggatcagcaaaatgaattatataaacctgatttgatttttgttaaagggaatcaggcaatagttaccgatataacagtacggtatgaagcagccaaatcatcgctggaggaagccgctgcagagaaagtgagaaagtacaaacacctggaaacggaagtaagacatctcacgaatgcaaaggacgttacttttgtgggctttcccctaggagcgcgggggaaatggcaccaagataactttaaacttttgactgagcttggcctctccaaatcgaggcaagtgaaaatggcagagactttttccacagtagcgctcttttcatctgtggacattgtacatatgtttgccagtagggccagaaaatctatggttatgtgataataggctgccttctgcggggcttgccttctggccatgcccttcttctctcccttgcacctgtacctcttggtctttgaataaagcctgagtaggaaggaccggtaaaaaaaaaaaaaaaaaaaaaaaaaaaaaaacgttgactaaaaaaaaaaaaaaaaaaaaaaaaaaaaaaaaaaaaaaaaaaaaaaaaaaaaaaaaaaaaaaaaaaaaaa

SEQ ID NO: 11315 - DNA, 4436 bp, synthetic construct
  source 1..4436: mol_type = other DNA
gaaataagagagaaaagaagagtaagaagaaatataagagaattcgccaccatggcttcttgccctaagcttggacctcctatttctgctggcgctatgtctcttgagtctggccttactactcactctgtgcttgctattgagcacggccctaactctcttgctaactctggctctgacttcggcggcggcggacttggccttcctgtttgtttgcttcgtgtgtctgtgggcactcagacttctcgttctgactgggtggaccttgtgtcttggagccaccctggcccttcttctaagtctcagcgtgtggacctggtgtctcttttccctaagcaccgtgtggacttgctttctaagaacgaccaggtggacttggtggctcagttccttccttctaagttccctcctaaccttgctgagaacgaccttgctcttcttgtgaaccttgagttctaccgttctgaccttcacgtgtacgagtgcgtgcacttcgctgctgactgggagggcctttctgggttgcctgaggtgtacgagcagcttgctcctcagccttgcgtgggcgagactcttcactcttctcttcctcgtgactctgagcctttcgtgcctgaggagggctcttctgagaaggagtctgaggacgctcctaagacttctcctcctactcctggcaagcacggcgagcagactggcgaggagaaggttgtggtgactgtgcctgacaagaaccctccttgcccttgctgcggcactcgtgtgaactctgtgctgaaccgtattgagcaccttaaggtgtctcacggcaagcgtggcgtgtgcttccgttgcgctaagtgcggcaaggaaaactctaactaccactctgtggtgtgccacttccctaagtgccgtggccctgagactgagaaggctcctgctggagaatggatttacgaggtgtgcaaccgtaacttcactactaagattggccttggccagcacaagcgtcttgctcaccctgctgtgcgtaaccaggagcgtattgtggcttctcagcctaaggagacttctaaccgtggcgctcacaagcgttgctggactaaggaggaggaggaacttcttattcgtcttgaggctcagttcgagggcaacaagaacattaacaagcttattgctgagcacattactactaagactgctaagcagatttctgacaagcgtcgtcttttgcctcgtaagcctgctgaggagactcgtgaggagcctggcgtgtgtcaccgtactcgtcgtgctgctgctggccttcgtactgagcctgagatgtctcaccacgctcaggctgaggctcgtgacaatggccctggacgtagacctcttcctggccgtgctgcagctagaggccgtactatggacgagattcgtcaccaccctgacaagggcaacggccgtcagcgtactactaagcagaagtctgagggccagcttcaggcttactacaagaaaactcttgaggagcgtctttctgccggcgctcttaacactttccctcgtgctttcaagcaggtgactgagggccgtgacattcagcttgtgattaaccagactgctcagtcttgcttcggctgccttgagtctatttctcagattcgtactgctactcgtgacaagaaggacactgtgactcgtgaagagcgtcctaagaagcctttccagaagtggatgaaggaccgtgctattaagaagggcaactaccttcgtttccagcgtcttttctaccttgaccgtggcaagcttgctaagattattcttgacgacattgagtgcctttcttgcgacattcctccttctgagatttactctgtgttcaagactcgttgggagactactggcaacttcaagtctcttggcgacttcaagacttacggcaaggctgacaacactgctttccgtgagcttattactgctaaggagattgagaagaacgtgcaggagatgtctaagggctctgctcctggccctgacggcattactcttggcgatgtggtgaagatggaccctgagttctctcgaactatggagattttcaacctttggcttactacgggcaagattcctgacatggtgcgtggctgccgtactgtgcttattcctaagtctactaagcctgaccgtcttaaggacattaacaactggcgtcctattactattggctctattcttcttcgtcttttctctcgtattgtgactgctcgtctttctaaggcttgccctcttaaccctcgtcagcgtggcttcattcgggcagcgggatgttctgagaaccttaagcttcttcagactattatttggtctgctaagcgtgagcaccgtcctcttggcgtggtgttcgtggacattgctaaggctttcgacactgtgtctcaccagcacattattcacgctcttcagcagcgtgaggtggaccctcacattgtgggccttgtgtctaacatgtacgagaacatttctacttacattactacgaagcgtaacactcacactgacaagattcagattcgtgtgggcgtgaagcagggcgaccctatgtctcctcttcttttcaacctggctatggaccctcttctttgcaagcttgaggagtctggcaagggctaccaccgtggccagtctagcattactgctatggctttcgctgacgaccttgtgcttctttctgactcttgggagaacatgaacactaacatttctattcttgagactttctgcaaccttactggccttaagactcagggccagaagtgccacggcttctacattaagcctactaaggactcttacactattaacgactgcgctgcttggactattaacggcactcctcttaacatgattgaccctggcgagtctgagaagtaccttggccttcagttcgacccttggattggcattgctcgttctggcctttctactaagcttgacttctggcttcagcgtattgaccaggctcctcttaagcctcttcaaaagactgacattcttaagacttacacgattcctcgtcttatttacattgctgaccactctgaggtgaaaactggccttcttgagacgcttgaccagaagattaggactgctgtgaaggagtggcttcaccttcctccttgcacttgcgacgctattctttactcttctactcgtgatggcggccttggcattacaaagctcgctggccttattccttctgtgcaggctcggcgcttgcaccgtattgctcagtctagcgacgagactatgaagtgcttcatggagaaggagaagatggagcagcttcacaagaagctttggattcaggctggcggcgaccgtgagaacattccttctatttgggaggctcctccttcttctgagcctcctaacaacgtgtctactaactctgagtgggaggcccctactcagaaggacaagttccctaagccttgcaactggcgtaagaacgagttcaagaagtggactaagcttgcttctcagggccgtggcattgtgaacttcgagcgtgacaagatttctaacccttggatacagtactaccgtcgtattcctcaccgtaagcttcttactgctcttcagcttcgtgctaacgtgtaccctactcgtgagttccttgctcgtggccgtcaggaccagtacattaaggcttgcaggcactgcgacgctgacattgagtcttgcgctcacattattggcaactgccctgtgactcaggacgctcgtattaagcgtcacaactacatttgcgagcttcttcttgaggaggctaagaagaaggactgggtggtgttcaaggagcctcacattcgtgactctaacaaggagctttacaagcctgaccttattttcgtgaaggacgctagggctcttgtggtggacgtgactgtgcgttacgaggctgctaagtctagccttgaggaagctgctgctgagaaggtgcgtaagtacaagcaccttgagactgaggtgcgtcaccttactaacgctaaggacgtgactttcgtgggcttccctcttggcgctcgtggcaagtggcatcaagacaacttcaagctgcttactgagcttggattatccaagtctcgtcaagtaaaaatggctgagactttcagcactgtggctcttttctcttctgtggacattgtgcacatgttcgcttctcgtgctcgtaagtctatggtgatgtgataataggctgccttctgcggggcttgccttctggccatgcccttcttctctcccttgcacctgtacctcttggtctttgaataaagcctgagtaggaaggaccggtaaaaaaaaaaaaaaaaaaaaaaaaaaaaaaacgttgactaaaaaaaaaaaaaaaaaaaaaaaaaaaaaaaaaaaaaaaaaaaaaaaaaaaaaaaaaaaaaaaaaaaaaa

SEQ ID NO: 11316 - DNA, 5153 bp, synthetic construct
  source 1..5153: mol_type = other DNA
gaaataagagagaaaagaagagtaagaagaaatataagagaattcgccaccatggcccctaagaaaaagcggaaggtgaatatcagcggctctagctgcggcagccccaacagcgccgacaccagcagcgacttcaaggacctgtggaccaagctgaaggaatgccacgaccgggaagtgcagggactccaggtgaaggtcaccaaactcaagcaagaaagaatcctggacgcccagagactggaagaattcttcaccaagaaccagcagctgagagagcagcagaaagtgctgcacgagacaatcaaggttctggaagatagactgcgggccggcctgtgcgacagatgcgccgtgaccgaggaacacatgcgcaaaaagcagcaggagttcgagaacattagacagcaaaatctgaaattgatcacagagctgatgaacgagagaaacacactgcaggaggagaacaagaagctgagcgagcagctgcaacagaagatcgagaatgatcagcaacaccaggccgctgagctggaatgtgaagaggacgtgatccccgacagcccaatcacagctttcagcttttctggcgtgaacagactgaggcggaaggaaaacccccacgtgcggtacatcgagcagacccataccaagctggaacacagcgtgtgtgccaacgagatgagaaaggtgtccaagtcctccacccatccccagcacaaccctaacgaaaatgagatcctggtggctgatacctacgaccagtctcagagccctatggccaaggcccacggcaccagctcttatacccctgataagagctccttcaacctggccaccgtggtggccgagacactgggcctgggcgtgcaggaggaaagcgagacacagggcccaatgagccctctgggagatgagctgtaccactgcctggaaggcaaccacaagaaacagccttttgagtccggctccgagactcctggaacaagcgagagcgctacacctgagggcagccctaagagaaaggtgtccagcgccgagggcgctgccaaggaagagcctaaacggagaagcgccagactgagcgccaagccccccgccaaggtggaagccaagcctaagaaggccgccgctaaggacaagagcagcgataagaaagtccagaccaagggcaagcggggcgccaaaggcaaacaggccgaggtggccaaccaggagacaaaggaagatctgcctgctgagaacggcgaaaccaagaccgaggaatctccagcttctgacgaggccggagagaaggaggccaaaagcgacagcggctctgagacacctggaacaagcgagagcgccaccccggaatcctatgagactccgatgttgcagggcaatgtcatcagcccacgttctgagccggccgaacaggaaggagaaagaccatcttctcctccgataacacctccacctcccattctggaaaccgaggcagacctcccgcaagagggcacacctgtggtgaaggtcccggacgaaaatccagcatgtccatgctgcgggaaccggatgggaaggatctcggggcttattgaccatcttaagaggacccatggaaagagaaagatcttatttcaatgtgcccgatgtggaaaaacaaatttgaaacatcaaagtatcgcttgccacgtcccaaagtgtaaaggcgtagagggattgagtccagtaagagcttggacttgcgaggaatgcaatagatcatttgggacaaaaattggtctgggacaacataaaagattggcacacccagctgttagaaatcaggaaagggtcgctgcttcccacccaaaagaaaattctaaacgaggagctcataaaaaatgttggactgaagaagaggaaaaattattaatagaattaatagctcagttcgaggggcatgcaaatattaataaattaattgcggaacatattacaaccaaaacagctaaacaaattagtgaaaaaaggagactgctctccaaaaaactaatggtagtggaggcagaatgtgaacctgggccaagtcatcggaccaggagagcagctgcagagataaggaagggagctgagatgaatcaccataatgaggatgctgctgaggacaatggagctccatcaaagaaaaatgggaaagatctgacgttgcgggaacaactcacggaggaaggagaacatctaattgagagtggctcccaagaaggtgggggactacggtcccactaccgtaagtcgattgcagaatggataagatctcagaaaataacgtcactcaggaaaatctttgagagagtgattgaagggaaagaagatctcccatccatagtcgatgaagctgcccaggattgctatgcatgcctgaaaagagatctcactgaaggggaaggtcgacaaattcaaaagatccgagagatccgcaggacccacccacaaaaaccatcaaaacaatggacaaaaaaaagggccagaaaacgagggcagttcctacggttccagcggctgttctacttggatagagggaaattggccggtataatcctggacgacgtggaatccctcaaatgtggtattccacttgacgtggtgcatgaagtattcaagtcaagatgggaatcacccggaacattcaagggcctgggtacttttaagaccattggtcaggcagacaattctgctttccaagctatgattaccatgaaggagattaagaaaaacatccgagaaatgaataaaaatgcggctccagggccggatgggatttccttgcgggacctcatgaagattgatccccagtgtgcgaaattaatggaattatttaatttgtggttgttaaccgggtatataccggatggggttaaaaattgtagaacaatattgataccaaaatcaactgtaccagaaaagttaaatgatgtgaataattggagacctataacgattggctcgattatattgagactattttcaaaaatattaacggcacgattaactaaggcatgccctattaacatacgacagaggggttttataaagtcatctggttgttctgaaaatctgaaattattacaactgataattagatatgcaaaaagagaacacaggccccttggggtggtctttgtcgacctggctaaagcatttgatacggtgagccactctcacatactgtcggtattaaaacaaaagggtgtggatgaacatataataaaactaattgaaaactcgtattataacatcaaaacctatattgatttgaaaaatgaaaaatctgactctattggaattcgaattggcgtaaaacaaggcgatccaatgtctccaattttgtttaacttatctgtcgatcctctattatgtaaacttgaagaaatgggtaatggatttcaatgtcatagccaaaatgtaacagcactggccttcgccgacgatttagtattactaagtgggtcctgggagggcatgcaaaataatataacaattgtagagaccttttgtgagctcactggtctcaagatgcagggggaaaagtgccacggcttttatatcaagccaacaaaagattcctatacgatcaatgactgtcccgtgtggactatcaatggcaccccccttaatatgattgaaccaggtagttctgagaaatacttgggtctttatgtcgacccgtggataggaatatctaaaccagaactactggagaaagttgacagatggcttgtgaaagtgggcaaggcaccattaaaaccttttcagaaagtcgacatcttgaaaggatacctgatcccgagagtaatatacctcgcggatcaagcaaatttaaaaccaacatatttagaatccattgacttggctatacgaactggagtcaaggaatggttgcacctaccagcgtgcacgtgtgacgccatcctttattcgaatactcaggatggagggttaggaatcagcagattggcagcactgattccgagtgtgcaggttcggagactgcacagaattgcccaaacctctgacgaagttttaaaaactatcgtcaaaagagaaggaatagaaagagaatttgagaaattatggttgatggccggtggtgataaggaaaggataccatctatatgggacccaaaaactgttatgataatatcggaaacgggcggtgaccaaatattgtcggaatgggagattcccaatccaaaactaatttatccaaaaccctgtaactggagaaaaagggaatttaataattggactaaattactgagccaaggccgaggtattgtaaattttgaaaaagataaaataagtaataattggttaatacactataggggcattcctcaaaggaaattaattacagcattacaattacgggcgaatatatacccgacgagggaatttttagctagaggacggtcggaaacttatattaaatcctgccgtcactgtcaggccgataatgagacttgcgcacatataattggctactgtccatctgtacaagatgcgagaattaaaagacataatcaaatctgtcatatattggcagaagaagctaagagaaaagattggttggtatatcaagaaccattattaagagatcaacaaaatgaattacgatacgaatcggacgagacctctttggagatggcggccacggagaaagtggacaagtacaaacacctgaccaaagagatacgaacgatcaccaacgcgaaagacattgtttttatgggctttcccctcggagctcgggggaaatggtaccaagggaactttgaacttttgaaagcccttggactctccaaatcggatcgagaaaagactgcccggtccttgtcatccatagcactcatgtcatctgtggacatcgtccacatatttgccagcaaatccaggacttgcactacactgtgataataggctgccttctgcggggcttgccttctggccatgcccttcttctctcccttgcacctgtacctcttggtctttgaataaagcctgagtaggaaggaccggtaaaaaaaaaaaaaaaaaaaaaaaaaaaaaaacgttgactaaaaaaaaaaaaaaaaaaaaaaaaaaaaaaaaaaaaaaaaaaaaaaaaaaaaaaaaaaaaaaaaaaaaaa

SEQ ID NO: 11317 - DNA, 5171 bp, synthetic construct
  source 1..5171: mol_type = other DNA
gaaataagagagaaaagaagagtaagaagaaatataagagaattcgccaccatggcccctaagaaaaagcggaaggtgaatatcagcggctctagctgcggcagccccaacagcgccgacaccagcagcgacttcaaggacctgtggaccaagctgaaggaatgccacgaccgggaagtgcagggactccaggtgaaggtcaccaaactcaagcaagaaagaatcctggacgcccagagactggaagaattcttcaccaagaaccagcagctgagagagcagcagaaagtgctgcacgagacaatcaaggttctggaagatagactgcgggccggcctgtgcgacagatgcgccgtgaccgaggaacacatgcgcaaaaagcagcaggagttcgagaacattagacagcaaaatctgaaattgatcacagagctgatgaacgagagaaacacactgcaggaggagaacaagaagctgagcgagcagctgcaacagaagatcgagaatgatcagcaacaccaggccgctgagctggaatgtgaagaggacgtgatccccgacagcccaatcacagctttcagcttttctggcgtgaacagactgaggcggaaggaaaacccccacgtgcggtacatcgagcagacccataccaagctggaacacagcgtgtgtgccaacgagatgagaaaggtgtccaagtcctccacccatccccagcacaaccctaacgaaaatgagatcctggtggctgatacctacgaccagtctcagagccctatggccaaggcccacggcaccagctcttatacccctgataagagctccttcaacctggccaccgtggtggccgagacactgggcctgggcgtgcaggaggaaagcgagacacagggcccaatgagccctctgggagatgagctgtaccactgcctggaaggcaaccacaagaaacagccttttgagtccggctccgagactcctggaacaagcgagagcgctacacctgagggcagccctaagagaaaggtgtccagcgccgagggcgctgccaaggaagagcctaaacggagaagcgccagactgagcgccaagccccccgccaaggtggaagccaagcctaagaaggccgccgctaaggacaagagcagcgataagaaagtccagaccaagggcaagcggggcgccaaaggcaaacaggccgaggtggccaaccaggagacaaaggaagatctgcctgctgagaacggcgaaaccaagaccgaggaatctccagcttctgacgaggccggagagaaggaggccaaaagcgacagcggctctgagacacctggaacaagcgagagcgccaccccggaatcctatgaaactccgagggtgatgggcaaagtcaccagcccgagttctgtgctgaccgaacatgagggagatagaacatcttctcccccaagaacaccacctcctattcttgagaccggggcagaccttccacaggagggcacacctgtggtaaaggtcccggatgataatccagcgtgtccatgctgcggtaatcgaataggaaggatttcggggcttatcgatcacttaaagagaacccatggaaagaaaaagatcctctttcaatgtgccaaatgtgggagaacaaatctgaaacatcacagtatcgcttgtcacgttccaaagtgcaaaggcgccaaggggaccagcccattaaggggctgggcctgcgaggaatgcaatagaacatttgggactaaaattggcttaggacaacataaaagattggcacacccagctgttagaaatcaggaaagggtcgctgcttcccacccaaaagaaaattctaaacgaggagctcataaaaaatgttggactgaagaagaggaaaaattattaatagaattaatagctcagttcgaggggcatgcaaatattaataaattaattgcggaacatattacaaccaaaacagctaaacaaattagtgaaaaaaggagactgctctccaaaaaactaatggtagtggaggcagaatgtgaacctgggccaagtcatcggaccaggagagcagctgcagagataaggccatctaagaaatctccatctaaaagaaaagggaaaaatctggcgctgcgagaacaacttatggaagaaggggaacatctaccagagagtggctcacaagatggagggggactgcggccccattaccgaaaggttattgctgaatggataagatctcagaaaataacctccctcaaggatgtctttgagagagtgatcaaagggaaagaagatctcccattactagtggacaaagctgcccaggaccactatgcatgcctgaaaatggatttgattgaagagggggatcggcaaagtcaaaagatccgagaaatccgcaggccccgtccacagaaaccatcaaaacaatggactaaaagaagggccagaaaaagggggcagttcctacggttccagcggctgttccacctagatagagggaaacttgccggtattatcctggacgacgtggaatccctccaatgtggtattccacttgacgtggtgcatgaagtattcaagtcaagatgggaatcacccggtacattcaagggcctgggaacattcaatactattggacacgcggacaattccgcatttcaaaccttgattactgcaaaggagatcgtgaaaaacatccgagaaatgaataaaaacgcagcaccaggaccggacgggatttccctgcgggatctcatgaaaaccgacccccattgtactaaattaatggaattatttaatttgtggttgactactggttatataccagagggaataaaaaattgtagaacaatattgataccgaaatcatctgtaccagaaaagttaaatgatgtaaataattggagacctataactattggctcgattgtattaagattgttttcaaaaatcttgactgctcgattaactaaggcatgtcctattaacactcggcaaagagggtttataagatctcctggttgttccgaaaatttgaagttattacaattattaattcgatatgcaaaaagggaacaccttcccctcggggttgtctttgttgacttggcaaaagcatttgatacggtgagccactcccatataattgcagttcttaaacaaaagggagtcgatgagcatataataagactaattgaaaattcatatgaaaatattaatacatatattgatatgaaaaatgttaaatctgaccttattggaatacaaattggtgtgaaacaaggcgatccgatgtctccaattttgtttaacttgtctgtggaccctcttttatgtaaacttgaagaaatgggtaacggatttcaatattatacgaaagatgtaacatcactggccttcgctgacgatttagtattagtaagtgggtcctgggaaggtatgcaaagaaatatagaaatcgtcgagaccttttgtgaacttactggtctcaaaatgcaaggggaaaagtgccatggcttttacatcaagccaacaaaggactcatatacgatcaatgactgtccaccatggactattaacggcacccccctcaatatgattgaacctggtagctctgagaaatacctgggtctatatattgacccatggacaggaatatctaaacccgagctactcgagaaagtcgatagatggttgtcgaaagtgggaaaggcaccattaaaaccttttcagaaggttgacatcttgaaggggcacctgatcccaagattaatttatcttgcggaccaagcaaatttgaaatcaactcacttagagtcccttgacttagccatacgaattggagtcaaggagtggttgcacttaccatcgtgcacctgtgattccatcctttattctaatactcaggatggaggattagggatcagtagattggcggcactgatccccagtgtgcaagctcggagactgcacagaattgcccaaactacggacgatgttttaagaactgtagtcgaaagagaaggaatagaaggagaatttaagaaattatgggtgacggctggtggtgacaaagaaaagattccatctatatgggaccccaaaacaattatggtaatatctgaaacgggcggtgaccaatcactatcggaatgggagactcccaatccaaaaattttctatccaaaaccttgtaactggcgaaaaagggaatttaacaattggactaaattattaactcaaggtcggggtatcgctaactttgaaaaagataaaataagtaacaattggattatacattacaggggcattcctcaaaggaaattgattactgcattacaactgcgtgctaatatttatccaacaagggaatttttatctagaggacggtcagaaacttatattaaatcttgccgtcactgtcaggctgacaatgaaacttgttcacatataattggctattgtccatctgtacaagacgcaagaatcaaaaggcataatcaaatttgtcatatattggcagaagaagccaaaagtaaggattggctggtttaccaagaaccgttattaagggatcagcaaaatgaattatataaacctgatttgatttttgttaaagggaatcaggcaatagttaccgatataacaattcggtatgaaagtaaattgtcatcattggcagacgcggcggcagaaaaagttaaaaaatattgccatctcaaaagtcaaattcaggaattgacgaatgctaaaaatattacatttaagggattccctgtgggcgcacgaggtaaatggtactctggcaattacgaagtgttgaaagcattaggaatctcaaactcccgacaagacaaaatagcacgatgtatgtcaagaaaagctttatttacctctgttgatatcatacatatgtttgtgagtcattcgagatctattgtaagaacctgataataggctgccttctgcggggcttgccttctggccatgcccttcttctctcccttgcacctgtacctcttggtctttgaataaagcctgagtaggaaggaccggtaaaaaaaaaaaaaaaaaaaaaaaaaaaaaaacgttgactaaaaaaaaaaaaaaaaaaaaaaaaaaaaaaaaaaaaaaaaaaaaaaaaaaaaaaaaaaaaaaaaaaaaaa

SEQ ID NO: 11318 - DNA, 5099 bp, synthetic construct
  source 1..5099: mol_type = other DNA
gaaataagagagaaaagaagagtaagaagaaatataagagaattcgccaccatggcccctaagaaaaagcggaaggtgaatatcagcggctctagctgcggcagccccaacagcgccgacaccagcagcgacttcaaggacctgtggaccaagctgaaggaatgccacgaccgggaagtgcagggactccaggtgaaggtcaccaaactcaagcaagaaagaatcctggacgcccagagactggaagaattcttcaccaagaaccagcagctgagagagcagcagaaagtgctgcacgagacaatcaaggttctggaagatagactgcgggccggcctgtgcgacagatgcgccgtgaccgaggaacacatgcgcaaaaagcagcaggagttcgagaacattagacagcaaaatctgaaattgatcacagagctgatgaacgagagaaacacactgcaggaggagaacaagaagctgagcgagcagctgcaacagaagatcgagaatgatcagcaacaccaggccgctgagctggaatgtgaagaggacgtgatccccgacagcccaatcacagctttcagcttttctggcgtgaacagactgaggcggaaggaaaacccccacgtgcggtacatcgagcagacccataccaagctggaacacagcgtgtgtgccaacgagatgagaaaggtgtccaagtcctccacccatccccagcacaaccctaacgaaaatgagatcctggtggctgatacctacgaccagtctcagagccctatggccaaggcccacggcaccagctcttatacccctgataagagctccttcaacctggccaccgtggtggccgagacactgggcctgggcgtgcaggaggaaagcgagacacagggcccaatgagccctctgggagatgagctgtaccactgcctggaaggcaaccacaagaaacagccttttgagtccggctccgagactcctggaacaagcgagagcgctacacctgagggcagccctaagagaaaggtgtccagcgccgagggcgctgccaaggaagagcctaaacggagaagcgccagactgagcgccaagccccccgccaaggtggaagccaagcctaagaaggccgccgctaaggacaagagcagcgataagaaagtccagaccaagggcaagcggggcgccaaaggcaaacaggccgaggtggccaaccaggagacaaaggaagatctgcctgctgagaacggcgaaaccaagaccgaggaatctccagcttctgacgaggccggagagaaggaggccaaaagcgacagcggctctgagacacctggaacaagcgagagcgccaccccggaatccttcgagtctccgaaggtgtcgggcaggactatcagcccaagctctgtgcagaccgaatatacaggagaaagaacatcatctcctccaataacaccacctcccatcttggaagccggggcagatcctccgcaggagggcacacctgtggtaaagatcccagacaaaaatccagcttgtccatgctgcggcaaccgaatgggaaagattacgggactggttgatcatctgaagagaacccatgggaagagaaagatcttattccagtgtgcccgttgtgggagaacgaacccgaaacatcatagtatcgcttgccacatcccaaagtgtaaaggcgctgaggagcccagcatatcgatgggctgggcctgtgaggaatgcaatagaacatttgggacaaaaattggtttggggcagcataagcgcttggtccatccagtcacaagaaatctcgagcggattgccactacacgccccaaggcaggtacaatgaggggggcacatcgtcggtgctggaccgaggatgagattgaactattgaggaagttggataaacaatatgaggggcagaaaaacatcaacaagttgattgcggagcatattccgaccaagacaacgaagcagataagcgataaaagacgggaccttcataagagcccatctaagaaatctccatctaaaagaaaagggaaaaatctggcgctgcgagaacaacttatggaagaaggggaacatctaccagagagtggctcacaagatggagggggactgcggccccattaccgaaaggttattgctgaatggataagatctcagaaaataacctccctcaaggatgtctttgagagagtgatcaaagggaaagaagatctcccattactagtggacaaagctgcccaggaccactatgcatgcctgaaaatggatttgattgaagagggggatcggcaaagtcaaaagatccgagaaatccgcaggccccgtccacagaaaccatcaaaacaatggactaaaagaagggccagaaaaagggggcagttcctacggttccagcggctgttccacctagatagagggaaacttgccggtattatcctggacgacgtggaatccctccaatgtggtattccacttgacgtggtgcatgaagtattcaagtcaagatgggaatcacccggtacattcaagggcctgggaacattcaatactattggacacgcggacaattccgcatttcaaaccttgattactgcaaaggagatcgtgaaaaacatccgagaaatgaataaaaacgcagcaccaggaccggacgggatttccctgcgggatctcatgaaaaccgacccccattgtactaaattaatggaattatttaatttgtggttgactactggttatataccagagggaataaaaaattgtagaacaatattgataccgaaatcatctgtaccagaaaagttaaatgatgtaaataattggagacctataactattggctcgattgtattaagattgttttcaaaaatcttgactgctcgattaactaaggcatgtcctattaacactcggcaaagagggtttataagatctcctggttgttccgaaaatttgaagttattacaattattaattcgatatgcaaaaagggaacaccttcccctcggggttgtctttgttgacttggcaaaagcatttgatacggtgagccactcccatataattgcagttcttaaacaaaagggagtcgatgagcatataataagactaattgaaaattcatatgaaaatattaatacatatattgatatgaaaaatgttaaatctgaccttattggaatacaaattggtgtgaaacaaggcgatccgatgtctccaattttgtttaacttgtctgtggaccctcttttatgtaaacttgaagaaatgggtaacggatttcaatattatacgaaagatgtaacatcactggccttcgctgacgatttagtattagtaagtgggtcctgggaaggtatgcaaagaaatatagaaatcgtcgagaccttttgtgaacttactggtctcaaaatgcaaggggaaaagtgccatggcttttacatcaagccaacaaaggactcatatacgatcaatgactgtccaccatggactattaacggcacccccctcaatatgattgaacctggtagctctgagaaatacctgggtctatatattgacccatggacaggaatatctaaacccgagctactcgagaaagtcgatagatggttgtcgaaagtgggaaaggcaccattaaaaccttttcagaaggttgacatcttgaaggggcacctgatcccaagattaatttatcttgcggaccaagcaaatttgaaatcaactcacttagagtcccttgacttagccatacgaattggagtcaaggagtggttgcacttaccatcgtgcacctgtgattccatcctttattctaatactcaggatggaggattagggatcagtagattggcggcactgatccccagtgtgcaagctcggagactgcacagaattgcccaaactacggacgatgttttaagaactgtagtcgaaagagaaggaatagaaggagaatttaagaaattatgggtgacggctggtggtgacaaagaaaagattccatctatatgggaccccaaaacaattatggtaatatctgaaacgggcggtgaccaatcactatcggaatgggagactcccaatccaaaaattttctatccaaaaccttgtaactggcgaaaaagggaatttaacaattggactaaattattaactcaaggtcggggtatcgctaactttgaaaaagataaaataagtaacaattggattatacattacaggggcattcctcaaaggaaattgattactgcattacaactgcgtgctaatatttatccaacaagggaatttttatctagaggacggtcagaaacttatattaaatcttgccgtcactgtcaggctgacaatgaaacttgttcacatataattggctattgtccatctgtacaagacgcaagaatcaaaaggcataatcaaatttgtcatatattggcagaagaagccaaaagtaaggattggctggtttaccaagaaccgttattaagggatcagcaaaatgaattatataaacctgatttgatttttgttaaagggaatcaggcaatagttaccgatataacaattcggtatgaaagtaaattgtcatcattggcagacgcggcggcagaaaaagttaaaaaatattgccatctcaaaagtcaaattcaggaattgacgaatgctaaaaatattacatttaagggattccctgtgggcgcacgaggtaaatggtactctggcaattacgaagtgttgaaagcattaggaatctcaaactcccgacaagacaaaatagcacgatgtatgtcaagaaaagctttatttacctctgttgatatcatacatatgtttgtgagtcattcgagatctattgtaagaacctgataataggctgccttctgcggggcttgccttctggccatgcccttcttctctcccttgcacctgtacctcttggtctttgaataaagcctgagtaggaaggaccggtaaaaaaaaaaaaaaaaaaaaaaaaaaaaaaacgttgactaaaaaaaaaaaaaaaaaaaaaaaaaaaaaaaaaaaaaaaaaaaaaaaaaaaaaaaaaaaaaaaaaaaaaa

SEQ ID NO: 11319 - DNA, 5099 bp, synthetic construct
  source 1..5099: mol_type = other DNA
gaaataagagagaaaagaagagtaagaagaaatataagagaattcgccaccatggcccctaagaaaaagcggaaggtgaatatcagcggctctagctgcggcagccccaacagcgccgacaccagcagcgacttcaaggacctgtggaccaagctgaaggaatgccacgaccgggaagtgcagggactccaggtgaaggtcaccaaactcaagcaagaaagaatcctggacgcccagagactggaagaattcttcaccaagaaccagcagctgagagagcagcagaaagtgctgcacgagacaatcaaggttctggaagatagactgcgggccggcctgtgcgacagatgcgccgtgaccgaggaacacatgcgcaaaaagcagcaggagttcgagaacattagacagcaaaatctgaaattgatcacagagctgatgaacgagagaaacacactgcaggaggagaacaagaagctgagcgagcagctgcaacagaagatcgagaatgatcagcaacaccaggccgctgagctggaatgtgaagaggacgtgatccccgacagcccaatcacagctttcagcttttctggcgtgaacagactgaggcggaaggaaaacccccacgtgcggtacatcgagcagacccataccaagctggaacacagcgtgtgtgccaacgagatgagaaaggtgtccaagtcctccacccatccccagcacaaccctaacgaaaatgagatcctggtggctgatacctacgaccagtctcagagccctatggccaaggcccacggcaccagctcttatacccctgataagagctccttcaacctggccaccgtggtggccgagacactgggcctgggcgtgcaggaggaaagcgagacacagggcccaatgagccctctgggagatgagctgtaccactgcctggaaggcaaccacaagaaacagccttttgagtccggctccgagactcctggaacaagcgagagcgctacacctgagggcagccctaagagaaaggtgtccagcgccgagggcgctgccaaggaagagcctaaacggagaagcgccagactgagcgccaagccccccgccaaggtggaagccaagcctaagaaggccgccgctaaggacaagagcagcgataagaaagtccagaccaagggcaagcggggcgccaaaggcaaacaggccgaggtggccaaccaggagacaaaggaagatctgcctgctgagaacggcgaaaccaagaccgaggaatctccagcttctgacgaggccggagagaaggaggccaaaagcgacagcggctctgagacacctggaacaagcgagagcgccaccccggaatccttcgagtctccgaaggtgtcgggcaggactatcagcccaagctctgtgcagaccgaatatacaggagaaagaacatcatctcctccaataacaccacctcccatcttggaagccggggcagatcctccgcaggagggcacacctgtggtaaagatcccagacaaaaatccagcttgtccatgctgcggcaaccgaatgggaaagattacgggactggttgatcatctgaagagaacccatgggaagagaaagatcttattccagtgtgcccgttgtgggagaacgaacccgaaacatcatagtatcgcttgccacatcccaaagtgtaaaggcgctgaggagcccagcatatcgatgggctgggcctgtgaggaatgcaatagaacatttgggacaaaaattggtttggggcagcataagcgcttggtccatccagtcacaagaaatctcgagcggattgccactacacgccccaaggcaggtacaatgaggggggcacatcgtcggtgctggaccgaggatgagattgaactattgaggaagttggataaacaatatgaggggcagaaaaacatcaacaagttgattgcggagcatattccgaccaagacaacgaagcagataagcgataaaagacgggaccttcataagagcccatctaagaaatctccatctaaaagaaaagggaaaaatctggcgctgcgagaacaacttatggaagaaggggaacatctaccagagagtggctcacaagatggagggggactgcggccccattaccgaaaggttattgctgaatggataagatctcagaaaataacctccctcaaggatgtctttgagagagtgatcaaagggaaagaagatctcccattactagtggacaaagctgcccaggaccactatgcatgcctgaaaatggatttgattgaagagggggatcggcaaagtcaaaagatccgagaaatccgcaggccccgtccacagaaaccatcaaaacaatggactaaaagaagggccagaaaaagggggcagttcctacggttccagcggctgttccacctagatagagggaaacttgccggtattatcctggacgacgtggaatccctccaatgtggtattccacttgacgtggtgcatgaagtattcaagtcaagatgggaatcacccggtacattcaagggcctgggaacattcaatactattggacacgcggacaattccgcatttcaaaccttgattactgcaaaggagatcgtgaaaaacatccgagaaatgaataaaaacgcagcaccaggaccggacgggatttccctgcgggatctcatgaaaaccgacccccattgtactaaattaatggaattatttaatttgtggttgactactggttatataccagagggaataaaaaattgtagaacaatattgataccgaaatcatctgtaccagaaaagttaaatgatgtaaataattggagacctataactattggctcgattgtattaagattgttttcaaaaatcttgactgctcgattaactaaggcatgtcctattaacactcggcaaagagggtttataagatctcctggttgttccgaaaatttgaagttattacaattattaattcgatatgcaaaaagggaacaccttcccctcggggttgtctttgttgacttggcaaaagcatttgatacggtgagccactcccatataattgcagttcttaaacaaaagggagtcgatgagcatataataagactaattgaaaattcatatgaaaatattaatacatatattgatatgaaaaatgttaaatctgaccttattggaatacaaattggtgtgaaacaaggcgatccgatgtctccaattttgtttaacttgtctgtggaccctcttttatgtaaacttgaagaaatgggtaacggatttcaatattatacgaaagatgtaacatcactggccttcgctgacgatttagtattagtaagtgggtcctgggaaggtatgcaaagaaatatagaaatcgtcgagaccttttgtgaacttactggtctcaaaatgcaaggggaaaagtgccatggcttttacatcaagccaacaaaggactcatatacgatcaatgactgtccaccatggactattaacggcacccccctcaatatgattgaacctggtagctctgagaaatacctgggtctatatattgacccatggacaggaatatctaaacccgagctactcgagaaagtcgatagatggttgtcgaaagtgggaaaggcaccattaaaaccttttcagaaggttgacatcttgaaggggcacctgatcccaagattaatttatcttgcggaccaagcaaatttgaaatcaactcacttagagtcccttgacttagccatacgaattggagtcaaggagtggttgcacttaccatcgtgcacctgtgattccatcctttattctaatactcaggatggaggattagggatcagtagattggcggcactgatccccagtgtgcaagctcggagactgcacagaattgcccaaactacggacgatgttttaagaactgtagtcgaaagagaaggaatagaaggagaatttaagaaattatgggtgacggctggtggtgacaaagaaaagattccatctatatgggaccccaaaacaattatggtaatatctgaaacgggcggtgaccaatcactatcggaatgggagactcccaatccaaaaattttctatccaaaaccttgtaactggcgaaaaagggaatttaacaattggactaaattattaactcaaggtcggggtatcgctaactttgaaaaagataaaataagtaacaattggattatacattacaggggcattcctcaaaggaaattgattactgcattacaactgcgtgctaatatttatccaacaagggaatttttatctagaggacggtcagaaacttatattaaatcttgccgtcactgtcaggctgacaatgaaacttgttcacatataattggctattgtccatctgtacaagacgcaagaatcaaaaggcataatcaaatttgtcatatattggcagaagaagccaaaagtaaggattggctggtttaccaagaaccgttattaagggatcagcaaaatgaattatataaacctgatttgatttttgttaaagggaatcaggcaatagttaccgatataacagtacggtatgaagcagccaaatcatcgctggaggaagccgctgcagagaaagtgagaaagtacaaacacctggaaacggaagtaagacatctcacgaatgcaaaggacgttacttttgtgggctttcccctaggagcgcgggggaaatggcaccaagataactttaaacttttgactgagcttggcctctccaaatcgaggcaagtgaaaatggcagagactttttccacagtagcgctcttttcatctgtggacattgtacatatgtttgccagtagggccagaaaatctatggttatgtgataataggctgccttctgcggggcttgccttctggccatgcccttcttctctcccttgcacctgtacctcttggtctttgaataaagcctgagtaggaaggaccggtaaaaaaaaaaaaaaaaaaaaaaaaaaaaaaacgttgactaaaaaaaaaaaaaaaaaaaaaaaaaaaaaaaaaaaaaaaaaaaaaaaaaaaaaaaaaaaaaaaaaaaaaa

SEQ ID NO: 11320 - DNA, 5096 bp, synthetic construct
  source 1..5096: mol_type = other DNA
gaaataagagagaaaagaagagtaagaagaaatataagagaattcgccaccatggcccctaagaaaaagcggaaggtgaatatcagcggctctagctgcggcagccccaacagcgccgacaccagcagcgacttcaaggacctgtggaccaagctgaaggaatgccacgaccgggaagtgcagggactccaggtgaaggtcaccaaactcaagcaagaaagaatcctggacgcccagagactggaagaattcttcaccaagaaccagcagctgagagagcagcagaaagtgctgcacgagacaatcaaggttctggaagatagactgcgggccggcctgtgcgacagatgcgccgtgaccgaggaacacatgcgcaaaaagcagcaggagttcgagaacattagacagcaaaatctgaaattgatcacagagctgatgaacgagagaaacacactgcaggaggagaacaagaagctgagcgagcagctgcaacagaagatcgagaatgatcagcaacaccaggccgctgagctggaatgtgaagaggacgtgatccccgacagcccaatcacagctttcagcttttctggcgtgaacagactgaggcggaaggaaaacccccacgtgcggtacatcgagcagacccataccaagctggaacacagcgtgtgtgccaacgagatgagaaaggtgtccaagtcctccacccatccccagcacaaccctaacgaaaatgagatcctggtggctgatacctacgaccagtctcagagccctatggccaaggcccacggcaccagctcttatacccctgataagagctccttcaacctggccaccgtggtggccgagacactgggcctgggcgtgcaggaggaaagcgagacacagggcccaatgagccctctgggagatgagctgtaccactgcctggaaggcaaccacaagaaacagccttttgagtccggctccgagactcctggaacaagcgagagcgctacacctgagggcagccctaagagaaaggtgtccagcgccgagggcgctgccaaggaagagcctaaacggagaagcgccagactgagcgccaagccccccgccaaggtggaagccaagcctaagaaggccgccgctaaggacaagagcagcgataagaaagtccagaccaagggcaagcggggcgccaaaggcaaacaggccgaggtggccaaccaggagacaaaggaagatctgcctgctgagaacggcgaaaccaagaccgaggaatctccagcttctgacgaggccggagagaaggaggccaaaagcgacagcggctctgagacacctggaacaagcgagagcgccaccccggaatccttcgagtctccgaaggtgtcgggcaggactatcagcccaagctctgtgcagaccgaatatacaggagaaagaacatcatctcctccaataacaccacctcccatcttggaagccggggcagatcctccgcaggagggcacacctgtggtaaagatcccagacaaaaatccagcttgtccatgctgcggcaaccgaatgggaaagattacgggactggttgatcatctgaagagaacccatgggaagagaaagatcttattccagtgtgcccgttgtgggagaacgaacccgaaacatcatagtatcgcttgccacatcccaaagtgtaaaggcgctgaggagcccagcatatcgatgggctgggcctgtgaggaatgcaatagaacatttgggacaaaaattggtttggggcagcataagcgcttggtccatccagtcacaagaaatctcgagcggattgccactacacgccccaaggcaggtacaatgaggggggcacatcgtcggtgctggaccgaggatgagattgaactattgaggaagttggataaacaatatgaggggcagaaaaacatcaacaagttgattgcggagcatattccgaccaagacaacgaagcagataagcgataaaagacgggaccttcataagagcccatctaagaaatctccatctaaaagaaaagggaaaaatctggcgctgcgagaacaacttatggaagaaggggaacatctaccagagagtggctcacaagatggagggggactgcggccccattaccgaaaggttattgctgaatggataagatctcagaaaataacctccctcaaggatgtctttgagagagtgatcaaagggaaagaagatctcccattactagtggacaaagctgcccaggaccactatgcatgcctgaaaatggatttgattgaagagggggatcggcaaagtcaaaagatccgagaaatccgcaggccccgtccacagaaaccatcaaaacaatggactaaaagaagggccagaaaaagggggcagttcctacggttccagcggctgttccacctagatagagggaaacttgccggtattatcctggacgacgtggaatccctccaatgtggtattccacttgacgtggtgcatgaagtattcaagtcaagatgggaatcacccggtacattcaagggcctgggaacattcaatactattggacacgcggacaattccgcatttcaaaccttgattactgcaaaggagatcgtgaaaaacatccgagaaatgaataaaaacgcagcaccaggaccggacgggatttccctgcgggatctcatgaaaaccgacccccattgtactaaattaatggaattatttaatttgtggttgactactggttatataccagagggaataaaaaattgtagaacaatattgataccgaaatcatctgtaccagaaaagttaaatgatgtaaataattggagacctataactattggctcgattgtattaagattgttttcaaaaatcttgactgctcgattaactaaggcatgtcctattaacactcggcaaagagggtttataagatctcctggttgttccgaaaatttgaagttattacaattattaattcgatatgcaaaaagggaacaccttcccctcggggttgtctttgttgacttggcaaaagcatttgatacggtgagccactcccatataattgcagttcttaaacaaaagggagtcgatgagcatataataagactaattgaaaattcatatgaaaatattaatacatatattgatatgaaaaatgttaaatctgaccttattggaatacaaattggtgtgaaacaaggcgatccgatgtctccaattttgtttaacttgtctgtggaccctcttttatgtaaacttgaagaaatgggtaacggatttcaatattatacgaaagatgtaacatcactggccttcgctgacgatttagtattagtaagtgggtcctgggaaggtatgcaaagaaatatagaaatcgtcgagaccttttgtgaacttactggtctcaaaatgcaaggggaaaagtgccatggcttttacatcaagccaacaaaggactcatatacgatcaatgactgtccaccatggactattaacggcacccccctcaatatgattgaacctggtagctctgagaaatacctgggtctatatattgacccatggacaggaatatctaaacccgagctactcgagaaagtcgatagatggttgtcgaaagtgggaaaggcaccattaaaaccttttcagaaggttgacatcttgaaggggcacctgatcccaagattaatttatcttgcggaccaagcaaatttgaaatcaactcacttagagtcccttgacttagccatacgaattggagtcaaggagtggttgcacttaccatcgtgcacctgtgattccatcctttattctaatactcaggatggaggattagggatcagtagattggcggcactgatccccagtgtgcaagctcggagactgcacagaattgcccaaactacggacgatgttttaagaactgtagtcgaaagagaaggaatagaaggagaatttaagaaattatgggtgacggctggtggtgacaaagaaaagattccatctatatgggaccccaaaacaattatggtaatatctgaaacgggcggtgaccaatcactatcggaatgggagactcccaatccaaaaattttctatccaaaaccttgtaactggcgaaaaagggaatttaacaattggactaaattattaactcaaggtcggggtatcgctaactttgaaaaagataaaataagtaacaattggattatacattacaggggcattcctcaaaggaaattgattactgcattacaactgcgtgctaatatttatccaacaagggaatttttatctagaggacggtcagaaacttatattaaatcttgccgtcactgtcaggctgacaatgaaacttgttcacatataattggctattgtccatctgtacaagacgcaagaatcaaaaggcataatcaaatttgtcatatattggcagaagaagccaaaagtaaggattggctggtttaccaagaaccgttattaagggatcagcaaaatgaattatataaacctgatttgatttttgttaaagggaatcaggcaatagttaccgatataacaattagatatgaaacatctttaacaactttggaggaggcagcattggaaaaagcaaagaagtatgcacatttagttactcaaattcaggacctgacgaatacatctgttataaattttacaggctttcctttgggatctcgtggtaaatggtaccagaacaacttcaaaatattaaaggaattgggtctctccagctcccgacaagaaaaggtcgccagacgattgtcaaactatgctttatttagctcggtggacattgttcacatgtttgctagtaaagcgaggacagaggtaagatgataataggctgccttctgcggggcttgccttctggccatgcccttcttctctcccttgcacctgtacctcttggtctttgaataaagcctgagtaggaaggaccggtaaaaaaaaaaaaaaaaaaaaaaaaaaaaaaacgttgactaaaaaaaaaaaaaaaaaaaaaaaaaaaaaaaaaaaaaaaaaaaaaaaaaaaaaaaaaaaaaaaaaaaaaa

SEQ ID NO: 11321 - DNA, 4214 bp, synthetic construct
  source 1..4214: mol_type = other DNA
gaaataagagagaaaagaagagtaagaagaaatataagagaattcgccaccatggcccctcggtccgatggcggaaccggcagcggcagcggactgactacccaccccgccccagaatctgaaagcggccatgattctacgaatcctggccctgtcctggccgccggcgacggagcccggccagtgctgctggtctctgtcggcacacagacctgcaaggaggacatcaccagccggcctacaaagcttattgagtctgagctgggactcctggtgaacttcagcctggaggtgtacagaagcgacctgaagggcgacgtgcagggcgttcattttcctgataactggggcgtgctggatggattccctgaagtgtacgagcagctggcccctcagactggcgaaggggatggactgaagccttccctgcagggcgattccgagggcgacgtgctggagaagggcagcagcgagaaggagaaggaggtgacacccgaagccctgccgccaaagcggaaggcccacagcgagcagagccaggacaacatcgtgaaggtgaccgttccagataagaaccccccatgtccctgctgcggcgtcagactgaattccgtgctggccctgatcgagcacctgaagggccacggcaaacgaagagtgtgcttcagatgcgccaagtgtggcagagagaacttcaaccaccactctaccgtgtgccacttcgccaagtgcaagggcccccagaccgaacggcctcccgtgggcgagtggatctgcgaggtgtgtggccgggacttcaccacgaagatcggcctgggacagcacaagagacacatgcacgccatggaaagaaaccaggagcgcattgacgccagtcagcctaaggaaaccagcaaccggggagctcacaagaggtgctggacaaaggaagaggaagagctgcttatgaagctggaagtgcagttcgagagccacaagaacatcaacaagctgatcgcagagcacctgacaaccaagaccgccaaacagatcagtgataagagaagaatgctgctgaagaagggccgagtgacagccggcaacctggatagcgagccaggcatgaaccaccaacctcaagccgaagtgaaagacaacgagctgggcggctgccacctgcctggcggtcctgcagtggacaagggcaagctgggccaacacctggagagcggcaatggccaccaggaaaccgccggccagaagaaggaaagagggctgcaggccagataccgcagaagaatcatgaaaagactggctgccggcaccatcaacatcttccccaaagtgttcaaagaactgctgaactgtcaggaggccaggcctctgatcaaccagaccaccgaggaatgcttcggcctcctggactccgcctgccagatccggaccgccctgcgggacaagggaagagcacaggaggaaagacccagaaagcagtaccagaagtggatgaagaagcgggccatcaagcggggaaactacctgagattccagcggctgttccacctggatagaggcaagctggccagaatcatcctagacaacaccgagagcctgagctgtgagattcccccttcagaaatctacagcgtgttcaaggctagatgggaaacccctggccagttcaacggcctgggagatttcgagatcaagggaaaggccaacaacaaggcctttagagatctgatcacagcaaaagagatcgaaaaaaacgtgagagagatgagcaagggaagcgcccctggccctgacggaatcgccctgggggacatccggaagatggatccaggttatagcagaacagccgagctgttcaacctgtggctgacctctggcgacattcccgacatggtgagaggttgtcggacggtgctgatccccaagagcaccacacctgagagactgaaggacatcaacaactggaggcctatcaccatcggcagcatcctgttaagactgttcagcagaatcatcacagccaggatgaccaaggcctgtcctctcaaccctagacaacggggcttcatctctgcccccggctgcagcgagaacctgaagctgctgcagagcatcataagaaccgccaagagcgagcacagacccctcggcgtgatcttcgtggatatcgccaaggcttttgacaccgtcagccaccagcatataatccacgtgctgcagcagagacgggtggaccctcacatcgtgggcctggtgaacaacatgtacaacgatattagcaccagaatcaccactaaaaaagacacacacacggacaagatccagatcagggttggcgtgaagcagggcgatcccctgagtcctctgctcttcaatctggccatggaccctctgctgtgtaaattagaggagtccggcaagggttttcacagaggccaatctagcatcaccgccatggccttcgccgatgacctagtgctgctgtctgactcctgggagaacatgaaggagaatatcagaatcctggagactttttgcgacctgaccggcctaaaaacccagggccaaaagtgccacggcttttacatcaagcctaccaaggacagctacaccgtgaacaattgccctgcctggacaattaacggcacccctctgaacatgatcaaccctggcgaatctgagaagtacctgggcctgcagatcgacccttggaccggcatcgccaagtatgacctgtcgaccaaattgaaagcctggctggaatccatcgacagagcccctctgaagcctctgcagaaactggatattcttaagacctacaccatcccaagactgacctatctggccgatcacagcgaaatgaaggctggcgctctcgaggccctggaccagcagatccggaccgccgtgaaggactggctgcaccttccttcttgcacctgtgacgccatcctgtacgtgtccacaagagacggcggactgggcgtgaccaaactggctggcctcatccccagcgttcaagccagacggctgcacagaatcgcccagagccctgatcagacaatgaaagattttctggaaaaggcccaaatggaaaagatgtacgagaagctgtggatccaggcaggaggcaaaaagaaaggcatgccttctatatgggaggcgccgcctgccacagtgcctccagtaaatgccggcacactgagcgaatgggaggcccccaaccctaagagcagataccctaagccttgtgactggcggagaaaggaactgaagaagtggaccaagctggaaagccagggaaggggagtgaagaacttccggaacgacaccatcagcaatgactggatccagtgctaccggcgcattccccatagaaagctgctgaccgccatccagctgagagctaatgtgtaccccaccagagaattcctgggccgggggagaggcgatgattgcgtgaagttctgcagacactgcgaaatggacctggaatcttgcgggcacatcatcggcttctgccccgtgaccaaagatgctagaatcaagcggcacaaccggatttgcgaccggctgtgcgacgaggccatcaagcgggattgggtcgtgttcaaggagccccacctgaaagacgccacaagagaactgttcaagcctgacctgatttttgtgaaggagggcagagccctggtcgtcgacgtgaccgtgagatacgaggccgccaagaccaccctggaagctgctgccgctgagaaggtcgacaaatacaagcacctggaacctgaggtgaaaagcctgaccaacgccacagacgtggtgttcatgggcttccctctgggagctcgcggcaagttctacaagggcaatttcgacctcctggaaacactgggactgcctaaaacaagacaaatctccgtggccaagaccctgtctacctacgccctgacaagcagcgtggacatcgtgcacatgtttgtgagcaaggccagaaagtctaatgtgtgataataggctgccttctgcggggcttgccttctggccatgcccttcttctctcccttgcacctgtacctcttggtctttgaataaagcctgagtaggaaggaccggtaaaaaaaaaaaaaaaaaaaaaaaaaaaaaaacgttgactaaaaaaaaaaaaaaaaaaaaaaaaaaaaaaaaaaaaaaaaaaaaaaaaaaaaaaaaaaaaaaaaaaaaaa

SEQ ID NO: 11322 - DNA, 3983 bp, synthetic construct
  source 1..3983: mol_type = other DNA
gaaataagagagaaaagaagagtaagaagaaatataagagaattcgccaccatgggatggagcggcagaatctggttcgtgaccgtggccacccaaacaaaatactctgactgggcctttaccgtgcacagcatcaccaaccctgagctggccggcgacggaatcgccgacctgagaggactggagttcgtgaacagcgagaagggctactacgtgggccactctccttccagatcttctctgctggctacactgcccgaggtgtacgaaacccctcgggtcatgggcaaggtgacctcccccagcagcgtgctgacagaacatgagggcgatagaaccagctctcctcctagaactcctcctccaatcctggaaaccggcgccgatctgcctcaggagggcacgcccgtggtgaaggtgcccgacgataaccccgcctgcccttgctgcggaaaccggatcggaagaatctctggactcatcgaccacctgaaaagaacacacggcaagaagaaaatcctgttccagtgcgctaagtgcggcagaaccaacctgaagcaccactctatcgcttgtcacgtgccaaagtgtaaaggcgccaagggcaccagccctctgcggggctgggcctgtgaagagtgcaaccggacattcggcaccaagatcggcctgtcccagcacaagaggctggcgcatccagtgacccggaacatcgagagaattaccgccagcagacctaaggaggagagcgctcggggcgcccacagaagatgctggtctgaagaggaagttgaactgctgaagaagctggagaagcagtacgagggcaacaagaacatcaacaagctaatcgccgagcacctccccagcaaaaccgccaagcaaatcagcgacaagcggagaggtctgatcaaaagccccagcaagaaaaacggcaaggatttgacactgagagaacagctcaccgaggagggcgagcacctgatcgaatcaggcagccaggagggcggtggactgagaagccactaccgcaaatctattgccgagtggatcagaagccaaaagatcacatccttgcggaagatcttcgagagagtgatcgagggcaaggaggacctgcctagtatcgtggatgaggccgcccaggaccactacgcctgtctgaagcgggacctgaccgagggggagggccgccagatccagaagatcagagaaatccggcggacccaccctcagaagcccagcaagcagtggaccaagaagagggcccggaagcggggccagttcctgagattccagcgacttttctacctggacagaggcaaactggccggcatcattctggatgatgtggaaagcctgaagtgcggcatccctctcgacgtggtgcatgaagtgttcaagagcagatgggagagccctggcacctttaagggcctgggcaccttcaagaccatcggacaggccgataattctgccttccaggccatgatcacaatgaaggaaatcaaaaagaacatccgagaaatgaacaagaacgccgcacctggtcctgatggcataagcctgagagacctgatgaaaaccgaccctcagtgcgccaaactgatggaactgttcaacctgtggctgctgacgggatatatccctgatggcgtgaaaaattgcaggacaatcctgattccaaagtccactgtgcctgagaagctgaacgacgtgaacaactggagaccgatcaccatcggctctatcatcctaagactgttcagcaagattctgacagccagactgaccaaggcctgccccatcaacatcagacagagaggcttcatcaagagcagcggatgtagcgagaatctgaaactgctgcagctgattatcagatatgctaagagagagcacagacctctgggagtggtgtttgtggacctggctaaagccttcgacaccgtgagccacagccatatcctgagcgttctgaaacagaagggagtggacgagcacatcatcaagctgatcgaaaacagctactacaacatcaagacctacatcgacctgaaaaacgagaagagcgacagcatcggcatcagaatcggcgtgaaacagggcgatcccatgagcccaatcctgtttaacctgagcgttgaccctctgctgtgcaagctcgaagaaatgggcaacgggttccaatgtcacagccaaaatgtgaccgcccttgctttcgccgacgatctcgtgctgctgagcggcagctgggagggcatgcagaacaacatcacgatcgtggaaacattctgcgagctgacagggctgaaaatgcagggcgagaaatgccacggattctacatcaagcccaccaaggatagctacaccatcaacgactgccccgtgtggaccatcaatggcacacccctcaacatgatcgagcctggcagcagcgagaagtacctgggactctacgtggacccctggatcggcatctcgaagcccgagctgctggaaaaggtggacagatggcttgtgaaggtcggcaaggcccctctgaagccgttccaaaaagtcgatattctgaagggctacctgatccctcgggtgatttacctggccgatcaggcaaacctgaagcctacatacctggaatctatcgacctggccatccggacaggagtgaaagagtggctgcatctgcctgcttgcacctgtgacgccatcctgtacagcaacacccaggacggcggcctgggcatcagccggctggccgccctcatccctagcgtgcaggtgagacggctgcacagaatcgcccagacctctgacgaagtcctgaaaaccatcgtgaagagagagggcatcgaaagagaattcgaaaagctgtggctgatggccggcggcgataaggaacggattccatccatctgggaccctaaaacagttatgattatctccgaaaccggcggcgaccagctgtctgaatgggaaatccctaaccctaagctgatctaccccaagccttgtaattggagaaagcgagagtttaacaactggacaaagctgctgagccagggcaggggtatcgtgaacttcgagaaagacaagataagcaacaactggctgattcactacagaggaatcccccagagaaagctgatcaccgcccttcagctgcgcgccaacatctaccccaccagagagttcctggccagaggcagaagcgagacatacatcaagtcctgtagacactgccaggccgacaacgagacatgcgctcacatcatcggctactgcccctccgttcaggatgctcggataaagcggcacaaccagatctgccacatactggcagaagaagctaaaagaaaagactggctggtgtatcaggagcctctgctgcgggaccagcagaatgaactgtataagcctgatctgatctttgtgaagggcaaccaggccattgtgacagacatcaccatccggtacgaaacaaccatcaccaccctggaagaagccgctctggagaaggccaagaaatacgtccacctggagtctcaagtgcaagacttgaccaatacctccgtcatcaacttcaccggatttcctctgggttccagaggcaagtggtaccagggcaactacaagatcctgaacgagctgggcctgagcaacagccggcaggagaaggtggccagacggctgtccaattacgccctgtttagtagcgtcgatatcatccacatgttcgccagcaaggcacggaccgaggtgcggtgataataggctgccttctgcggggcttgccttctggccatgcccttcttctctcccttgcacctgtacctcttggtctttgaataaagcctgagtaggaaggaccggtaaaaaaaaaaaaaaaaaaaaaaaaaaaaaaacgttgactaaaaaaaaaaaaaaaaaaaaaaaaaaaaaaaaaaaaaaaaaaaaaaaaaaaaaaaaaaaaaaaaaaaaaa

SEQ ID NO: 11323 - DNA, 2409 bp, synthetic construct; identical to SEQ ID NO: 1323
  source 1..2409: mol_type = other DNA

SEQ ID NO: 11324 - DNA, 4532 bp, synthetic construct
  source 1..4532: mol_type = other DNA
gaaataagagagaaaagaagagtaagaagaaatataagagaattcgccaccatgtcaaaacctgaccctttaaacgtaaatatgtccactccattcttggggacacaaatgcgcctgctcagggtttcaactggaactcaaacatctatgtcagactgggcagactgggcacagaggctctgtggtacagctaccaggtctgcactgtgtaaggtggtcccggtgtccttactatccagacatcagacagaattactagctatgggccatgggagtcagatgcctctaaatgcaccccttaacaccccggacttaacagaaagtgaattggcttgtttggttttggactgggagttttacagaacagatttgtccgctagtagttttaaccttgttcaattttctgctaaccgagagagtttgagtgggctgcctgaggtgtatgaacagccgactccgtttcaacctgaaggggagaaaatctgccccccacgagacagtgaactgtttgtgcctgaagaggggagcagcgagaaggagagcgaggacgcgccaaaaacatctcctccgacgcctgggaaacatggtttggaacagactggggaggaaaaagtgatggtgactgttcctgacaaaaatccaccttgtccttgctgtggtacccgggtaaactctgtgttgaatctgattgaacatctgaaagtgtcacacgggaaaaggggggtttgttttcggtgtgcaaaatgtggaaaggaaaatagtaactatcacagtgttgtttgtcattttaagaaatgcaggggtccagagacggagaaagccccagctggggagtggatttgtgaggtatgcaacagagattttacaaccaaaattggcctgggacaacacaagagattggcacacccagcagtgagaaatcaggaaaggatcgttgcttcccaaccgaaagaaacatcaaatagaggtgctcacaaaaggtgctggacaaaggaggaggaagaattactaataagactggaggctcagttcgagggaaacaaaaatattaataagcttattgcagaacacataaccaccaaaacagctaagcagatcagtgacaaaaggcgattgctgtccagaaagccagcagaggagccacgtatggagcctggaacgtgtcatcacaccaggagagcagctgcgagcctgagaacggagcctgagatgagtcatcacgcccaggcagaggacagagataatggacctgggagacgccctctgccaggcagggcagctgccggagggagaacaatggacgagataagacgccaccctgataaggccaacgatcagcaggaggccagtagcagtgggaggggcccagtgaccaggagagcagctgcaggaaagaaaacaaaaaagagtattgatcaccctactgataaggccaacggccagcaggtagccatcagcactagaaggggttgtttgaatagaggagtgactgccggggtagaaacaatagagggctcgagtcacctccctgataaggacagtgacggacagggcacccccagccgggagaaggagggacaattacaagatcactatcaagaagtcatcggagcctggttatcagatgggaggatcaatacctttccagaggcattcaaagggttgttagggaaacgagagatacaggcaacgatcaatcagtcaatactggattgttttgggggcattgattcaaaaagccaggtgaacaaaatgactcgagataagaaagataaaaagccagggagacctccccagaagtggatgaaaaagagagccatcaaaagaggtagctatcttcgcttccaacgtcttttccatcttgataggggaaaattagccaagattgttttggacaatatcgaatgtttgacgtgcgatatcccacccagtgaaatttattccgtttttaaggccaggtgggaaacagcaggcaaatttaccagtcttggggactttaaatttactgaaaaggtggacaatagtgcattcagggatttaattacagctaaggaagtagaaaagaacatgcaagaaatgagcaaaggctcggctcctggtccagatggaattactctgagagacattcaaaaaatggatcctaagctctccaggaccacagagattttcaacctttggttggctgcaggcaaaattccggatggggtgagggaatgcaggactgtcttaattccaaaatcaacaaaaccagaacgcttaaaggacattaacaattggagaccaattacaatcggatccaccttgcttagattattttccaggattttaacagccagactaagcaaggcatgccccctcaacccaagacagaagggcttcattcaagcagccggatgctcagaaaacctgcaactcctgcaatccataatttggtcagcaaaacgggaacacaggcccctgggtgtcgtatttgtggacatcgcaaaggcttttgacacagtaagccacaagcacattctacacgttctgcagcggaggggagtggatcctcacatcatcggcctggtgagtgatatgtatgaaaacattcatacttctatcaccacgaagaaagcacgtacggatcgcatccagatccgagttggagttaaacagggcgacccgatgtctccccttctattcaatctggcaatggaccccctgctgtgcgaactggaaacgaacggcaggggacaccaccgcggcacaaattgcatcacagccatggcgtttgctgacgacctggtcctactgagtgactcctgggaggacatgaagagcaacatcaagatattggaggccttctgcgatctcaccggcctcaaaacgcagggagagaagtgccacggcttttacatcaagccgacgaaggactcgtacacggtcaacgactgtgctgcttggactataaacggcactcccctgaacatgattcttcccggtgagtccgagaaatacctgggcctgcagatagacccatggactggattggcaaaatcggacctctctacaaaactcgactcatggctcgagcaaatcgatagagttccactcaaaccgctgcagaaaattgaactcctgaaaacatacaccatccctcggttgacatacgtggctgaccattcggacttgaaagttagtttcctggagacattggatcagaagattcggacaatagttaaagattggctacacctgcctgcatgtacctgcgatgccatcctatactctagcacgaaggatggcggcctgggcatcactaaattagcaaagctgattcctagcgtacaggctaggagactacacagaatagcccaatcatcggacgaaaccatgaagcaatttctccacagggacaagatggaagcaatgtaccagaaactgtggattcaagctggaggggacagagagaacataccctcgatttgggaagcaccaccgtcgagtgaaccaccaaacaacgtgagcacaaattcggaatgggaagcaccgacccagaaagataaatttccaaagccttgcaattggaggaaaaacgaattcaaaaaatggaccaaattggcatcccaaggccgcggaattgtaaattttgaaagagacaaaattagtaaccattggatccaatactacagacgcatacctcacaggaaactcctcactgcactacaactcagggccaacgtttaccccacgagagaatttctagccaggggtagacaagaccaatacatcaaggcgtgtaggcactgcgatgcggacaacgaatcctgcgcccacatcatcggcaactgcccagtgacacaggacgcccgaatcaagaggcacaattacatctgcgaactgcttctcgaggaggcgaagaagaaggactgggtagtgttcaaggaaccgcacataagggattccaacaaggaactgtacaaacctgacctgatatttgtgaaggatgggcgtgcacttgtcgtggatgtgacagtacggtatgaagcagccaaatcatcgctggaggaagccgctgcagagaaagtgagaaagtacaaacacctggaaacggaagtaagacatctcacgaatgcaaaggacgttacttttgtgggctttcccctaggagcgcgggggaaatggcaccaagataactttaaacttttgactgagcttggcctctccaaatcgaggcaagtgaaaatggcagagactttttccacagtagcgctcttttcatctgtggacattgtacatatgtttgccagtagggccagaaaatctatggttatgtgataataggctgccttctgcggggcttgccttctggccatgcccttcttctctcccttgcacctgtacctcttggtctttgaataaagcctgagtaggaaggaccggtaaaaaaaaaaaaaaaaaaaaaaaaaaaaaaacgttgactaaaaaaaaaaaaaaaaaaaaaaaaaaaaaaaaaaaaaaaaaaaaaaaaaaaaaaaaaaaaaaaaaaaaaa

SEQ ID NO: 11325 - DNA, 4433 bp, synthetic construct
  source 1..4433: mol_type = other DNA
gaaataagagagaaaagaagagtaagaagaaatataagagaattcgccaccatggcttcttgccctaagcctggacctcctgtgtctgctggcgctatgtctcttgagtctggccttactactcactctgtgcttgctattgagcgtggccctaactctcttgctaactctggctctgacttcggcggcggcggacttggccttcctgtttgtttgcttcgtgtgtctgtgggcactcagacttctcgttctgactgggtggaccttgtgtcttggagccaccctggcccttcttctaagtctcagcgtgtggacctggtgtctcttttccctaagcaccgtgtggacttgctttctaagaacgaccaggtggacttggtggctcagttccttccttctaagttccctcctaaccttgctgagaacgaccttgctcttcttgtgaaccttgagttctaccgttctgaccttcacgtgtacgagtgcgtgcacttcgctgctgactgggagggcctttctggtttgcccgaggtgtacgagcagcttgctcctcagccttgcgttggcgagactcttcactcttctcttcctcgtgactctgagcctttcgtgcctgaggagggctcttctgagaaggagtctgaggacgctcctaagacttctcctcctactcctggcaagcacggcgagcagactggcgaggagaaggttgtggtgactgtgcctgacaagaaccctccttgcccttgctgcggcactcgtgtgaactctgtgctgaaccgtattgagcaccttaaggtgtctcacggcaagcgtggcgtgtgcttccgttgcgctaagtgcggcaaggaaaactctaactaccactctgtggtgtgccacttccctaagtgccgtggccctgagactgagaaggctcctgctggagaatggatttacgaggtgtgcaaccgtaacttcactactaagattggccttggccagcacaagcgtcttgctcaccctgctgtgcgtaaccaggagcgtattgtggcttctcagcctaaggagacttctaaccgtggcgctcacaagcgttgctggactaaggaggaggaggaacttcttattcgtcttgaggctcagttcgagggcaacaagaacattaacaagcttattgctgagcacattactactaagactgctaagcagatttctgacaagcgtcgtcttttgcctcgtaagcctgctgaggagactcgtgaggagcctggcgtgtgtcaccgtactcgtcgtgctgctgctggccttcgtactgagcctgagatgtctcaccacgctcaggctgaggctcgtgacaatggccctggacgtagacctcttcctggccgtgctgcagctagaggccgtactatggacgagattcgtcaccaccctgacaagggcaacggccgtcagcgtactactaagcagaagtctgagggccagcttcaggcttactacaagaaaactcttgaggagcgtctttctgccggcgctcttaacactttccctcgtgctttcaagcaggtgactgagggccgtgacattcagcttgtgattaaccagactgctcagtcttgcttcggctgccttgagtctatttctcagattcgtactgctactcgtgacaagaaggacactgtgactcgtgaagagcgtcctaagaagcctttccagaagtggatgaaggaccgtgctattaagaagggcaactaccttcgtttccagcgtcttttctaccttgaccgtggcaagcttgctaagattattcttgacgacattgagtgcctttcttgcgacattcctccttctgagatttactctgtgttcaagactcgttgggagactactggcaacttcaagtctcttggcgacttcaagacttacggcaaggctgacaacactgctttccgtgagcttattactgctaaggagattgagaagaacgtgcaggagatgtctaagggctctgctcctggccctgacggcattactcttggcgatgtggtgaagatggaccctgagttcagcaggacaatggagattttcaacctttggcttactacgggcaagattcctgacatggtgcgtggctgccgtactgtgcttattcctaagtctactaagcctgaccgtcttaaggacattaacaactggcgtcctattactattggctctattcttcttcgtcttttctctcgtattgtgactgctcgtctttctaaggcttgccctcttaaccctcgtcagcgtggcttcattcgcgctgcgggatgttctgagaaccttaagcttcttcagactattatttggtctgctaagcgtgagcaccgtcctcttggcgtggtgttcgtggacattgctaaggctttcgacactgtgtctcaccagcacattattcacgctcttcagcagcgtgaggtggaccctcacattgtgggccttgtgtctaacatgtacgagaacatttctacttacattactacgaagcgtaacactcacactgacaagattcagattcgtgtgggcgtgaagcagggcgaccctatgtctcctcttcttttcaacctggctatggaccctcttctttgcaagcttgaggagtctggcaagggctaccaccgtggccagtctagcattactgctatggctttcgctgacgaccttgtgcttctttctgactcttgggagaacatgaacactaacatttctattcttgagactttctgcaaccttactggccttaagactcagggccagaagtgccacggcttctacattaagcctactaaggactcttacactattaacgactgcgctgcttggactattaacggcactcctcttaacatgattgaccctggcgagtctgagaagtaccttggccttcagttcgacccttggattggcattgctcgttctggcctttctactaagcttgacttctggcttcagcgtattgaccaggctcctcttaagcctctacaaaagactgacattcttaagacttacacgattcctcgtcttatttacattgctgaccactctgaggtgaaaactggccttcttgagacgcttgaccagaagattaggactgctgtgaaggagtggcttcaccttcctccttgcacttgcgacgctattctttactcttctactcgtgatggcggccttggcattaccaaattggctggccttattccttctgtgcaggctcggcgcttacaccgtattgctcagtctagcgacgagactatgaagtgcttcatggagaaggacaagatggagcagcttcacaagaagctttggattcaggctggcggcgaccgtgagaacattccttctatttgggaggctcctccttctattgagcctcctaacaacgtgtctactaactctgagtgggaggcccctactcagaaggataagttccctaagccttgcaactggcgtaagaacgagttcaagaagtggactaagcttgcttctcagggccgtggcattgtgaacttcgagcgtgacaagatttctaacccttggatacagtactaccgtcgtattcctcaccgtaagcttcttactgctcttcagcttcgtgctaacgtgtaccctactcgtgagttccttgctcgtggccgtcaggaccagtacattaaggcttgcaggcactgcgacgctgacattgagtcttgcgctcacattattggcaactgccctgtgactcaggacgctcgtattaagcgtcacaactacatttgcgagcttcttcttgaggaggctaagaagaaggactgggtggtgttcaaggagcctcacattcgtgactctaacaaggagctttacaagcctgaccttattttcgtgaaggacgctagggctcttgtggtggacgtgactgtgcgttacgaggctgctaagtctagccttgaggaagctgctgctgagaaggtgcgtaagtacaagcaccttgagatggaggtgcgtcaccttactaacgctaaggacgtgactttcgtgggcttccctcttggcgctcgtggcaagtggcatcaagacaacttcaaattacttactgagcttggtctgtctaagtctcgtcaagtcaaaatggctgagactttcagcactgtggctcttttctcttctgtggacattgtgcacatgttcgcttctcgtgctcgtcagatggtgatgtgataataggctgccttctgcggggcttgccttctggccatgcccttcttctctcccttgcacctgtacctcttggtctttgaataaagcctgagtaggaaggaccggtaaaaaaaaaaaaaaaaaaaaaaaaaaaaaaacgttgactaaaaaaaaaaaaaaaaaaaaaaaaaaaaaaaaaaaaaaaaaaaaaaaaaaaaaaaaaaaaaaaaaaaaaa

SEQ ID NO: 11326 - DNA, 4439 bp, synthetic construct
  source 1..4439: mol_type = other DNA
gaaataagagagaaaagaagagtaagaagaaatataagagaattcgccaccatggcttcttgccctaagcctggacctcctgtgtctgctggcgctatgtctagcgagtctggccttactactcactctgtgcttgctattgagcgtggccctaactctcttgctaactctggctctgacttcggcggcggcggacttggccttcctcttagacttcttcgtctttctgtgggcactcagacttctcgttctgactgggtggaccttgtgtcttggagccaccctggccctacttctaagtctcagcaggtggacctggtgtctcttttccctaagcaccgtgtggaccttctttctaagaacgaccaggtggacttggtggctcagttccttccttctaagttccctcctaaccttgctgagaacgaccttgctcttcttgtgaaccttgagttctaccgttctgaccttcacgtgtacgagtgcgtgcacttcgctgctcactgggagggcctttctggccttcctgaggtgtacgagcagcttgctcctcagccttgcgtgggcgagactcttcactcttctcttcctcgtgactctgagcttttcgtgcctgaggagggctcttctgagaaggagtctgaggacgctcctaagacttctcctcctactcctggcaagcacggccttgagcagactggcgaggagaaggtgatggtgactgtgcctgacaagaaccctccttgcccttgctgcggcactcgtgtgaactctgtgctgaaccttattgagcaccttaaggtgtctcacggcaagcgtggcgtgtgcttccgttgcgctaagtgcggcaaggagaactctaactaccactctgtggtgtgccacttccctaagtgccgtggccctgagactgagaaggctcctgctggagaatggatttgcgaggtgtgcaaccgtgacttcactactaagattggccttggccagcacaagcgtcttgctcaccctgctgtgcgtaaccaggagcgtattgtggcttctcagcctaaggagacttctaaccgtggcgctcacaagcgttgctggactaaggaggaggaggaacttcttattcgtcttgaggctcagttcgagggcaacaagaacattaacaagcttattgctgagcacattactactaagactgctaagcagatttctgacaagcgtcgtctgctttctcgtaagcctgctgaggagcctcgtgaggagcctggcacttgtcatcacactcgtcgtgctgctgcttctcttcgtactgagcctgagatgtctcaccacgctcaggctgaggaccgtgacaacggccctggacgtcgtcctttacctggacgtgctgccgctggaggacgtactatggacgagattcgtcgtcaccctgacaagggcaacggccagcaacgtcctactaagcagaagtctgaggagcagcttcaggcttactacaagaaaactcttgaggagcgtcttagtgccggggctcttaacactttccctcgtgctttcaagcaggtgatggagggccgtgacattaagcttgtgattaaccacactgctcaggactgcttcggctgccttgagtctatttctcagattcgtactgctactcgtgacaagaaggacactgtgactcgtgagaagcaccctaagaagcctttccagaagtggatgaaggaccgtgctattaagaagggcaactaccttcgtttccagcgtcttttctaccttgaccgtggcaagcttgctaagattgtgcttgacgacattgagtgcctttcttgcgacattcctctttctgagatttactctgtgttcaagactcgttgggagactactggctctttcaagtctcttggcgacttcaagacttacggcaaggctgacaacactgctttccgtgagcttattactgctaaggagattgagaagaacgtgcaggagatgtctaagggctctgctcctggccctgatggcattactcttggggacgtggtgaagatggaccctgagttctctcgtacgatggagattttcaacctttggcttactactggcaagattcctgacatggtgcgtggctgccgtactgtgcttattcctaagtctagcaagcctgaccgtcttaaggacattaacaactggcgtcctattactattggctctattcttcttaggcttttctctcgtattgtgactgctcgtctttctaaggcttgccctcttaaccctcgtcagcgtggcttcattcgtgctgccggctgctctgagaaccttaagcttcttcagactattatttggtctgctaagcgtgagcaccgtcctcttggcgtggtgttcgtggacattgctaaggctttcgacactgtgtctcaccagcacattattcacgctcttcagcagcgtgaggtggaccctcacattgtgggccttgtgtctaacatgtacgagaacatttctacttacattactacgaagcgtaacactcacactgacaagattcagattcgtgtgggcgtgaagcagggcgaccctatgtctcctcttcttttcaacctggctatggaccctcttctttgcaagcttgaggagtctggcaagggctaccaccgtggccagtctaagattactgctatggctttcgctgacgaccttgtgcttctttctgactcttgggagaacatgaacactaacatttctattcttgagactttctgcaaccttactggccttcagactcagggccagaagtgccacggcttctacattaagcctactaaggactcttacactattaacgactgcgctgcttggactattaacggcactcctcttaacatgattgaccctggcgagtctgagaagtaccttggccttcagttcgacccttggattggcattgctcgttcttctctttctactaagcttgacttctggcttcagcgtattgaccaggctcctcttaagcctcttcagaaaactgacattcttaagacttacactatccctcgtcttatttacattgctgaccactctgaggttaagactgcactcctggagactcttgaccagaagattaggactgctgtgaaggagtggcttcaccttcctccttgcacttgcgacgctattctttactcttctactagggacggcggccttggcattactaagctggctggccttattccttctgtgcaggctcgtcgtctgcaccgtattgctcagtctagcgacgacactatgaagtgcttcatggagaaggagaagatggaacagttgcacaagaagctttggattcaggctggcggcgaccgtgagaacattccttctatttgggaggctcctccttcttctgagcctcctaacaacgtgtctactaactctgagtgggaagctcctactcagaaggacaagttccctaagccttgcaactggcgtaagaacgagttcaagaagtggactgagcttgcttctcagggccgtggcattgctaacttcgagcgtgacaagatttctaaccactggattcagtactaccgttctattcctcaccgtaagcttcttactgctcttcagcttcgtgctaacgtgtaccctactcgtgagttccttgctcgtggccgtcaggaccagtacattaaggcttgcaggcactgcgacgctgacattgagtcttgcgctcacattattggcaactgccctgtgactcaggacgctcgtattaagcgtcacaactacatttgcgagcgtctgcttgaggaggctaagaagaaggactgggtggtgttcaaggagcctcacattcgtgactctaacaaggagctttacaagcctgacttgattttcgtgaaggacgctagggctcacgtggtggacgtgactgtgcgttacgaggctgctaagagctctctggaggaggctgctgctgagaaggtgcgtaagtacaagcaccttgagactgaggtgcgtcagcttactaacgctaaggacgtgactttctggggcttccctcttggcgctcgtggaaagtggcaccaggacaacttcaagcttctgactgagctgggcctttctaagtctaggcaggtgaaaatggctgagactttcagcactgtggctcttttctcttctgtggacattgtgcacatgttcgcttctcgtgctcgtaagtctatggtgatgtgataataggctgccttctgcggggcttgccttctggccatgcccttcttctctcccttgcacctgtacctcttggtctttgaataaagcctgagtaggaaggaccggtaaaaaaaaaaaaaaaaaaaaaaaaaaaaaaacgttgactaaaaaaaaaaaaaaaaaaaaaaaaaaaaaaaaaaaaaaaaaaaaaaaaaaaaaaaaaaaaaaaaaaaaaa

SEQ ID NO: 11327 - DNA, 4433 bp, synthetic construct
  source 1..4433: mol_type = other DNA
gaaataagagagaaaagaagagtaagaagaaatataagagaattcgccaccatggcttcttgccctaagcctggacctcctgtgtctgctggcgctatgtctcttgagtctggccttactactcactctgtgcttgctattgagcgtggccctaactctcttgctaactctggctctgacttcggcggcggcggacttggccttcctgtttgtttgcttcgtgtgtctgtgggcactcagacttctcgttctgactgggtggaccttgtgtcttggagccaccctggcccttcttctaagtctcagcgtgtggacctggtgtctcttttccctaagcaccgtgtggacttgctttctaagaacgaccaggtggacttggtggctcagttccttccttctaagttccctcctaaccttgctgagaacgaccttgctcttcttgtgaaccttgagttctaccgttctgaccttcacgtgtacgagtgcgtgcacttcgctgctgactgggagggcctttctgggttaccggaggtgtacgagcagcttgctcctcagccttgcgtgggcgagactcttcactcttctcttcctcgtgactctgagcctttcgtgcctgaggagggctcttctgagaaggagtctgaggacgctcctaagacttctcctcctactcctggcaagcacggcgagcagactggcgaggagaaggttgtggtgactgtgcctgacaagaaccctccttgcccttgctgcggcactcgtgtgaactctgtgctgaaccgtattgagcaccttaaggtgtctcacggcaagcgtggcgtgtgcttccgttgcgctaagtgcggcaaggaaaactctaactaccactctgtggtgtgccacttccctaagtgccgtggccctgagactgagaaggctcctgctggagaatggatttacgaggtgtgcaaccgtaacttcactactaagattggccttggccagcacaagcgtcttgctcaccctgctgtgcgtaaccaggagcgtattgtggcttctcagcctaaggagacttctaaccgtggcgctcacaagcgttgctggactaaggaggaggaggaacttcttattcgtcttgaggctcagttcgagggcaacaagaacattaacaagcttattgctgagcacattactactaagactgctaagcagatttctgacaagcgtcgtcttttgcctcgtaagcctgctgaggagactcgtgaggagcctggcgtgtgtcaccgtactcgtcgtgctgctgctggccttcgtactgagcctgagatgtctcaccacgctcaggctgaggctcgtgacaatggccctggacgtagacctcttcctggccgtgctgcagctagaggccgtactatggacgagattcgtcaccaccctgacaagggcaacggccgtcagcgtactactaagcagaagtctgagggccagcttcaggcttactacaagaaaactcttgaggagcgtctttctgccggcgctcttaacactttccctcgtgctttcaagcaggtgactgagggccgtgacattcagcttgtgattaaccagactgctcagtcttgcttcggctgccttgagtctatttctcagattcgtactgctactcgtgacaagaaggacactgtgactcgtgaagagcgtcctaagaagcctttccagaagtggatgaaggaccgtgctattaagaagggcaactaccttcgtttccagcgtcttttctaccttgaccgtggcaagcttgctaagattattcttgacgacattgagtgcctttcttgcgacattcctccttctgagatttactctgtgttcaagactcgttgggagactactggcaacttcaagtctcttggcgacttcaagacttacggcaaggctgacaacactgctttccgtgagcttattactgctaaggagattgagaagaacgtgcaggagatgtctaagggctctgctcctggccctgacggcattactcttggcgatgtggtgaagatggaccctgagttctcccgtacgatggagattttcaacctttggcttactacgggcaagattcctgacatggtgcgtggctgccgtactgtgcttattcctaagtctactaagcctgaccgtcttaaggacattaacaactggcgtcctattactattggctctattcttcttcgtcttttctctcgtattgtgactgctcgtctttctaaggcttgccctcttaaccctcgtcagcgtggcttcattagagctgctggctgctctgagaaccttaagcttcttcagactattatttggtctgctaagcgtgagcaccgtcctcttggcgtggtgttcgtggacattgctaaggctttcgacactgtgtctcaccagcacattattcacgctcttcagcagcgtgaggtggaccctcacattgtgggccttgtgtctaacatgtacgagaacatttctacttacattactacgaagcgtaacactcacactgacaagattcagattcgtgtgggcgtgaagcagggcgaccctatgtctcctcttcttttcaacctggctatggaccctcttctttgcaagcttgaggagtctggcaagggctaccaccgtggccagtctagcattactgctatggctttcgctgacgaccttgtgcttctttctgactcttgggagaacatgaacactaacatttctattcttgagactttctgcaaccttactggccttaagactcagggccagaagtgccacggcttctacattaagcctactaaggactcttacactattaacgactgcgctgcttggactattaacggcactcctcttaacatgattgaccctggcgagtctgagaagtaccttggccttcagttcgacccttggattggcattgctcgttctggcctttctactaagcttgacttctggcttcagcgtattgaccaggctcctcttaagcctcttcagaaaactgacattcttaagacttacacgattcctcgtcttatttacattgctgaccactctgaggtgaaaactggccttcttgagacgcttgaccagaagattaggactgctgtgaaggagtggcttcaccttcctccttgcacttgcgacgctattctttactcttctactcgtgatggcggccttggcattaccaagttggctggccttattccttctgtgcaggctcgtagattgcaccgtattgctcagtctagcgacgagactatgaagtgcttcatggagaaggagaagatggagcagcttcacaagaagctttggattcaggctggcggcgaccgtgagaacattccttctatttgggaggctcctccttcttctgagcctcctaacaacgtgtctactaactctgagtgggaggcccctactcagaaggacaagttccctaagccttgcaactggcgtaagaacgagttcaagaagtggactaagcttgcttctcagggccgtggcattgtgaacttcgagcgtgacaagatttctaacccttggatacagtactaccgtcgtattcctcaccgtaagcttcttactgctcttcagcttcgtgctaacgtgtaccctactcgtgagttccttgctcgtggccgtcaggaccagtacattaaggcttgcaggcactgcgacgctgacattgagtcttgcgctcacattattggcaactgccctgtgactcaggacgctcgtattaagcgtcacaactacatttgcgagcttcttcttgaggaggctaagaagaaggactgggtggtgttcaaggagcctcacattcgtgactctaacaaggagctttacaagcctgaccttattttcgtgaaggacgctagggctcttgtggtggacgtgactgtgcgttacgaggctgctaagtctagccttgaggaagctgctgctgagaaggtgcgtaagtacaagcaccttgagactgaggtgcgtcaccttactaacgctaaggacgtgactttcgtgggcttccctcttggcgctcgtggcaagtggcatcaagacaacttcaagctgcttactgagcttgggctgtcgaagtctcgtcaagtcaagatggctgagactttcagcactgtggctcttttctcttctgtggacattgtgcacatgttcgcttctcgtgctcgtaagatggtgatgtgataataggctgccttctgcggggcttgccttctggccatgcccttcttctctcccttgcacctgtacctcttggtctttgaataaagcctgagtaggaaggaccggtaaaaaaaaaaaaaaaaaaaaaaaaaaaaaaacgttgactaaaaaaaaaaaaaaaaaaaaaaaaaaaaaaaaaaaaaaaaaaaaaaaaaaaaaaaaaaaaaaaaaaaaaa

SEQ ID NO: 11328-11335 - skipped (8 entries)

SEQ ID NO: 11336 - DNA, 4198 bp, synthetic construct
  source 1..4198: mol_type = other DNA
ggtcgggatcatagttactagctgggcagagttgcagaggtcacacctccacgtggtcccgctggatgcccttcggggtaaccaagttgacctctgccccagtgtgagagggagttatagttccttcctccctatcgattggcttcgccgacctgtcgatagtattccaggtgaaacaaatttctggcaattgattcggtatcattgcccaaagccttgcccacgggtataaagttgggcagagtctgatagcggctggagggggctgctatccggcttataagacccctcacattgcaggacaaaatgggccggccgatacgagtggccttcgtatcggtggcaacacagacaagtcccttggacttgagagacgatgtggtcattaaatccatcatcgaccacagggaagtggtgggagaggaaattgaatatagaggactggagtttataaactcacagattgttggggtgatggcccaccctcccactccgattgagactttggccatgttaccagatgtgtacgaggtccctgatgtgggtcctaggggcgctacaactagcccccatttagtggaggtggagagtgaagaggaggaggtactctcacctccgggtgcaacggctcacccaattcagataccatcaacgcctatccttggtgctggaagcgagcatccaaccgagggcacaccggttgtgaaggttccggacaataatccaccttgtccctgctgcggcaaccggatgggaaaaatgtcgggactgattgaacatctccggagagcgcatgggaagagaaagatcctgttccagtgtgcccgatgtggacggaccaatgtgaaacatcatagtattgcctgccattttcctaagtgcaaaggggatattacatctcccccaaaaggtgattgggtctgtgaggaatgcgggaaggcatttgaaacgaaaatcggcctgggacaacataagcgtttggtccacccagctgcgaggaatattgagcggattatcgcctcccgccctaaggaaggtaccgctagagggttacaccgacaatgttggacggaagaggaggttgagttgttgaaaagattggataagcagtatgagggaagtaagaacatcaataaactgattgcggaacatattccatcaaaaaccgctaaacaaataagtgataaaagaaggggacttcataagagtccaataaagagaggtgggaaagaacaaggtgggaagaaacttttggaagaggaaggagaacatcttgtggagactggttcgcatgaaaacgggggtttaagatctcattatagaaggacggtttcggaatggataacatcagagaagttacccattcttcaggggacctttgagagcgtgttggaaggatcgggagagccatcaaccctggttgatgaagcggtggacgaatcctacgcacgcatgttcagaacatccatcgaattgaaagcttgccaagagagaaagcagcggatggcccgcagggctcgtccctcggaaccaccgaaagggtggatgaagaggagggccaagaaaagggggcaatttctacgattccagcggctgtttcacctagatagagggaaacttgccggtattatcctggatgatgtggaatccctgaagtgtgaaatcccactggatgaggtgcacagtgtgttcaagtcgagatgggaatcaccgggaacattcaagggcctgggtgctttcaggaccaacgtgcaggcggacaattccgcattcgaggccatgattacggcaaaagaaatctcaaagaacatcaaagagatgagtaagaacgcagcaccaggaccagatggactgactttaagagatcttattaagatggatccagagtgtgatcaattgatggaggtgtttaatttgtggctggtcactggctctataccgaacatggtgagagaatgccgaacagtattaatatctaagtcagccttgcctgagcgtcagagggacatcaataattggcgccctattactatcggttccatcctcttgagactattctcaaggattttaactgcgaggctgaccaaagcgtgccccattaatccaagacaaaggggatttattaaatctgctgggtgtgcagagaatttaaagctattacaactgttaattaagaacgcaaaaaagaaccatcgacccctggggatagtattcgttgacttagcaaaagcctttgacacggtgagccatcatcacatcattatggctcttattcaacggggcgtggacaatcatattattgccctaattaagaacttgtacagtaacatcagtactcgaatttacctgaagaatgagcagtctgatcccattgggatccacattggtgtaaagcaaggcgatccaatgtctccgatattatttaatttggccatagaccctctgctgtgtaagttggaaaaggaagggaatgggttccaacactgttcgaggacaataacagcattggcttttgcagacgacctggttctgctgagtggatcatgggagggtatggagagaaatattgaaattttagaggcattttgtcacctgactggcctcaaaacacaaggtgaaaagtgccatgggttttacatcaaaccgactaaggactcatatacgatcaatgactgtccagcttggattataaacggcacgccattgaatatgatcgaaccgggggaaactgagaaatatctgggtctacagattgatccatgggttggtatatctaagcccgaattacgtatgaaaattgaagattggctccaacggattgggagggctcctttaaagccgtttcagaaggttgacatcttgaaagggtataccattcctcgcttgatctatctggcagatcaggccgatgtgaaagtcacatatcttgaatcccttgacctgattatacgaactacggtcaaggagtggctacatttaccaactagcacttgcgacgccatactctactccaacactcgagatggcggcttggggattgtgagacttgtgggcctgatccctaatatccaggcccgaaggctgcaccgaatagcgcagtcatcggacgaactaattcgatctgtcgtccaagaagagggcatagagagagaatttgagaaactgtgggttacagctggaggaaaagtggacaaaattccatcgatatgggacccagggacggtcatgataatatcagagggagtgggcggtgaggaaccagcctcggaatgggagatagccgctccgaaagccatctttccgagaccttgtgactggaggaaacaagaatttgcgaactggaccaaactcttatcccagggccgtggtatttccaactttgaaaaagataaaatcagtaacagttggcttgaatattacaggggcattccccacagaaaactaatcacggcattacaactaagagcaaatgtctgccctacaagggaattcttagcgagaggcagacaggaattacaaattaaagcgtgccgacattgtctggcggaaaatgaatcatgttcccatattataggcttttgtcctgcggtacaggacgcaaggataaagcgtcataatcaattgtgcgaaacgttggcaaatgaagccaaaaagaaaaattggattatttttaatgaaccagtactcagaaatgagcaaaatgaattatacaaaccagatttaatatttgtcaaggaaaatcaggccatggtggtagatataacaataaggtatgaaagtaaaatcacttcccttgtagatgctgctaatgaaaaagttaaaaaatacgaacctttaaaaatacaaattcaagatttgactaattgtgagaatatcaaattttatggatttccaattggtgcacgcggaaaatggcatcaaggcaattatcaattattaactgaactgggactctcctcatcccgacgagagaaggtggctcgacaaatgtcaaagcgagcgttgtttacatctgtagatattatgcatatgtttatgagcaaatcgagaagcgtcgtgagatcataaccggtagcgctagcaccggtaaaaaaaaaaaaaaaaaaaaaaaaaaaaaaaacgttgactaaaaaaaaaaaaaaaaaaaaaaaaaaaaaaaaaaaaaaaaaaaaaaaaaaaaaaaaaaaaaaaaaaaaaa

SEQ ID NO: 11337 - DNA, 4274 bp, synthetic construct
  source 1..4274: mol_type = other DNA
gaaataagagagaaaagaagagtaagaagaaatataagagaattcgccaccatggcttattgcctgaaacctggccccccggtttcagacaggggcaaagagttcggaagtggactgaccacccaccccgaacccgagagcgaatctggtcatgacccaactgtcccaaatcctggtccgtctcttggagcgggggaaggtgcacagccactacccttactcagggtatcggtgggcacccaaacctgtgaagaggactttataacatctagaccaaccaaattacccggaattgaatcagaattaggcccgctggtgaagttttctttagaggtttacaggtcagatcttaagggggatgtgcaatttgaggggattcattttccagataattggggggtactggaggggtttcctgaggtgtacgaacaactggcaccacagccaaacgggggagacgagttaaatcatagtctcccaggggacagggagggggatgtacttgagaaggatagcagcgaaaaggagaaggaggctgcaccagaggcattgccctcagtgcaaagggcccgcagtgaacagttgccagataacatcgtaaaggtgactgttcccgacaaaaatccaccatgtccctgctgtggtgtccgcttaaactcagtgttagctctgattgaacatctgaagggctcacacgggaggaggagggtgtgctttaggtgtgccaaatgtgggagggagaattttaaccaccatagtactgtttgtcattacgcaaagtgcaaaggtccacagattgaaaggccaccagtgggagagtggatctgtgaggtatgcggaagggacttcacgaccaaaattggcctgggacaacacaaaagacatatgcatgcaatggtgagaaaccaggaaaggatcgatgcttcccaaccgaaagagacatcaaatcgaggagcccacaagaggtgctggacgaaggaggaggaagaactgctcatgaagttggaggtacagtttgagaatcacaaaaacatcaataagcttatcgcagagcaattaacaactaaaacagctaaacaaattagtgataaaaggagaatgctgctcaaaaaaggtagggggacaactggtaatttggaaacagagcctgggatgagtcatcaatcgcaggcaaaagttaaggacaatggactgggtggggaccatctgccgggaggaccagttgtcgataagggatacatagggaagccaggacaacatcttgacacagataacagccatcaaataactgctggcaagaagaaagggggagggctgcaggctcgttatagaaggagaataatgaaacgattagcggccgggacaattaacatcttccccaaagtgtttaaagaactgattaacgaccaagaggcgagaccgctaatcaatcaaacaacagaggactgctttggcctcttggactctgcatgccaaattagaacggcactccgggagaagggcaaatctcaggaggaacgaccaagaaaacagtatcagaagtggatgaagaagagagcgattaaaaggggggactatctccgcttccagcgattattccatctagacagggggaaactggcgagaattatcttggacaacactgagagcttgtcttgcgatatatcacccagtgaaatttattcggtattcaaggccagatgggaaacacctggacacttcaacggccttggggactttgaaattaaagggaaggccaacaacaaagccttcagggacttcatcacggctaaagaaattgaaaagaacgtgcgggaaatgagtaagggttcggcgccaggtccagatgggatcgcccttggggacatcaagaagatggatcccgggtattcccggaccgccgagctattcaacttgtggctgacagctggtgacatcccggacatggtgagggggtgcaggactgttttgatcccgaaatcgacgacaccggagcgcctaaaggacatcaacaactggagacccatcacgattggttccatcttgctaaggctgttctccaggatcataacggcgaggatgactaaggcgtgccccctcaacccgagacagagaggcttcatcagtgcgccgggatgctctgagaacctgaaactcctgcaatctataattcggactgccaaaaatgagcacaagccgctgggtgttattttcgtggacattgctaaggcttttgacaccgtgagccaccaacacatcatacacgttttacagcaacggagggttgacccccacattgttggactggtgaacaatatgtacaaggacatcagtacgtatgtcaccacaaagaagaacacacacacggacaaaatccagatccgggttggagtgaagcagggtgacccactatcaccccttctattcaacttggcaatggaccccctgttgtgtaagctggaagaaagtggcaaaggattccatcgaggacagagctcaataaccgcgatggcgttcgccgacgatctggtcttgttaagcgactcctgggagaacatgaaagagaacatcaaaatactggagaccttttgcaatctcaccggactcaaaacacagggtcagaagtgccacggcttttacatcaagcctacaaaggactcttacaccatcaacaactgccctgcatggaccatcaacggcacacccctgaacatgatcaaccccggggagtcagagaaatacctcggcctgcagatcgacccatggactggagtagcaaaatacgatctctccacaaaattgaaaatatggctcgaaagcattgaccgagctccacttaaacctctgcaaaaattagacatcctcaaaacatacaccattcctcgactgacctacctggctgaccattcagagatgaaagcaggggctctggaagcactcgaccagcagattcgaacagcggtcaaagactggctgcacctgccctcgtgcacctgtgatgccatcttgtacgtgagcacgagggacggcggtttgggtgttaccaagttggcgggactgattccaagtgtgcaagcccggaggctgcatcgcattgcgcagtcgccggacgagacgatgaaggacttcctagagaaggcgcagatggagaagatgtatgagaagttatgggttcaagctggaggcaaaaagaaggacatgccgtcaatttgggaggccctaccgatgactgtaccacccactaatacaggtaatctttcggagtgggaagcaccgaaccccaaaagtaagtacccaaaaccttgtgattggagaaggaaagagcttaaaaagtggacaaaattggagtcccaaggtcgtggagtcaaaaattttaggaatgatacaattagtaacgattggatccaatattatagacgcatacctcacaggaaactcctcactgccatacaactcagggccaatgtataccccacaagggaatttctcgcgcgggggaggggtgataaccaggttaagttttgtaggcactgtgaagcggaccttgaaacctgtggccatatcatcggcttttgcccagtaacgaaggacgcccgaatcaagaggcacaatcgcatatgcgacaggctttgcgaggaggcagctaagagggaatgggtggtgttcaaggagccgcacttgagggatgccaccacggaactgtttaaaccggatgtgatattcgtgaaagaggaccgtgcactggttgtggatgtgacagtacgatatgaatcagccaagacaacgctggaggcagctgctatggagaaagtggacaagtacaaacatctggaggcagaagtgaaggaactcaccaacgcaaaggacgttgtttttatggggttcccccttggagcgcgagggaaattctacaaagggaactttaacttgctagagactcttggcctcccaaaaacgaggcaattgagtgtggcaaagactctatccacgtacgcgctcatgtcatctgtggacattgtgcatatgtttgccagtagatctaggaaaccaaatgtctgataataggctgccttctgcggggcttgccttctggccatgcccttcttctctcccttgcacctgtacctcttggtctttgaataaagcctgagtaggaaggaccggtaaaaaaaaaaaaaaaaaaaaaaaaaaaaaaacgttgactaaaaaaaaaaaaaaaaaaaaaaaaaaaaaaaaaaaaaaaaaaaaaaaaaaaaaaaaaaaaaaaaaaaaaa

SEQ ID NO: 11338-11366 - skipped (29 entries)

SEQ ID NO: 11367 - DNA, 6377 bp, synthetic construct
  source 1..6377: mol_type = other DNA
gagtaactatgactctcttaaaagagtatagttacaacctgggcatagccgcagagatcgcacctcctcgtggtcccgctggtaaccctgccaagggtgacaaagtcgatctctgccccaggacggagccgttgggactcgccaccccaacgaactccagccaaaactcggtgaaaccaatttctcggcaaaagccgcacggctcattgcctgaaacctggccccccggtttcataggggcaatgcctcccaccgcccaaggtggtcccattgagatgggtgagaattctggatctgattttggggggggggtctggtttagagcgccggtacgcctgtccagggtatcggtgggctcccagacctcccccagtgactgggttgacctgttgtcctggaatttaaatctatttccaggatctaaaacccagtgggttgacctgttgcctgtgcacggggtcgacctggtgtccaaaaatgaccgggtaaacctggccgctcgaaatttaccatccaaattgtcccccgattcggcagaaaatgaattggctttggtggcgaacttggagttctataggtcggacttgcaggagggtgttcatttttctgctaaccgggagggattgagcgggctgcccgaggtgtatgaacaactaacaccacaaccgtgtgcgggagatagtttacatgctaacctcccgcgagacgctaaactgtttgtgcttgagcaaaggtgcagcgaggagaaggagagcgaggaagcgccgaaaacatcacctccaacgcctgggaagcccggggagcagacacctgaggagaccgtgacggtgactgttccggacaaaaatccaccttgtccttgttgtggtacccgggtgaactctgtgttggccctaatcgaacatctaaaggggtcgcacgggagaaggagggtttgttttcggtgtgtgaaatgtggaaaggaaggttctaactatcacagtattgtttgtcattttcccaaatgcaggggtgcagagactgaagcggctccagctggggagtggatctgtgaggtatgcggaagagatttccaaactaaaatcggcctgggacaacataaaagacatgcacacccgctggttaggaaccaagaaaggatcgttgcttcccacccgaaagaaacatctaaccgaggagctcacaaaagatgctggacaaaggaggaggaagagatgctgataagattagaggcgcagttcgagggccacaaaaacatcaataaactcatcgcggaacacattacaaccaaaacagctaagcagataagcgacaaaaggagattgctgcccaggaagccagttgaggaccttgaagaagaacctgctgtgagtactcgcaccaggagagcagctgcgggtctaagaaaggaacctggggtgagtcatcaaggccaggctgtagccgagaacaatggcccaggcaggagccgcctgccaggggagccagctgccggagaggaaacaatggacgagataaggcgccgccctgataagggtaacggccggaggggagccatcaagaagcaaaaggaggggcaactgcaggcccattaccaccggacactcggggaacggctatcagctgggacaattaacaccttcccccgggcattcaagcagttaattgagggtcaggaaatgcaagcaacgatcaaccagacagcgcaggactgcttcggatgcctggaagcgataagccagataagaacagcaacccgagataagaacaacaaaggggcccaggagaaaagaccaaagagaccttttcagaagtggatgaaggacagagcaattaggaagggtaattaccttcgcttccagcgattattccatctcgatagggggaaacttgctaaaattattttagacgatattgagacattgtcctgcgatatcccacccagtgaaatttattcggtttttaagaacagatgggaaacacctggtaacttcactagccttggggaattccaaattaacgggaaagccgacaatagcgctttcagagacttaattacggccaaagaagtcgagaaaaatgtgcaggaaatgagcaagggctcagctcccggtccagatgggattactcttggggacatcaagaagatggatcccgagtactcccggacagcggagatcttcaatctgtggttaacatctggaaaaatcccggacacggtgaggggatgcaggactgttttgattcctaagtcgacagaacctgagcgtttaaaggacattaacaactggagacccatcacaatcggttccatcttgctgagactattctccaggattataacagctaggctgagcaaagcctgccccctcaacccaaggcaaagaggattcatcagagcggcgggatgctctgaaaacctgaaactcctgcagtctttaatgtggtccgccaaaaaagaacacaaaccactgggtgttgtattcgtggacattgccaaggcttttgacaccataagccaccagcacatcattcaagctttgcagcaaagggaagtggacccccacatcatcggcctggtgagcaatatgtacaaggacaccagtacatatatcaccgtgaagaaaaacacacgcacagacgaaatccatttccgggttggagtaaaacagggtgacccgatgtcaccccttttatttaatctggctatggaccccctgttgtgcaagctggaagaaagcggcaaagggtaccatcgaggagggagcagcatcacggcgatggcatttgcggacgatctggtcttgctgagtgactcctgggaaaatatgaaaactaacatcaagatattagagaccttttgcaatcttaccggtctcaaaacacagggagtaaagtgccacggctactacatcaagccgacaaaggactcttacaccgtcaatgactgcgctgcgtggaccatcaatggcacacccctgaacatgattgaccccggagaaactgagaagtacctcggcctgcagattgacccctggactgggatagcaaaatccaatctctccacaaaactggaatattggcttcagcgaattgatcaagctccacttaaacccctgcagaaagttgatatcctcaaaacatacaccatccctcgactgacatacctggccgaccattcagacctgaaggctgggttcctggaaagcctcgaccaaaaaattagaacgacggtcaaggactggctgcacttaccttcgtgcacgtgcgatgccatcctgtactcgagcacgaaggacggtggtttgggcattaccaaattggcgggactgatccccagcgtgcaggcccgaaggctgcatcgtatcgctcaatcttcggacgaaacgatgaaaatgttcctggagaaagatcaaatggaacaactgtataggaaattgtgggttcaagctggaggggacagggagaagatcccttcaatttgggatgcaccaccggtgagcgaaccagctaacagtgcagagacatattcggagtgggaagcaccgtccttgaaaactaaatttccaaaaccgtgcaattggaggaaaaatgaatttaagaattggactaaattagtgtcccagggccgtggaattacaaattttgaaggcgataaaattagcaaccattggctacaatattacagaagcatacctcacaggaagctcctcactgctttacaacttagagccaacgtataccccacgagagagttcttagctagggggagacaggataaatacatcaaggcatgcaggcactgcgatgcagatattgaaagctgcgcccacatcatcggcaactgcccagtaacgcaggacgcccggatcaagaggcacaattacatctgcgatgtgcttcttgaggaggcgaaaaagaaggactgggtggtgttcaaggaaccgcacataagggataccaccaaggaactgtacaagcctgacctgatattcgtgaaggacgcccgtgcacttgtggtggatgtgacagtacgatacgaagcagccaaaacatcgctggatgacgccgctgcagagaaggtgaacaagtacaagcatttagagaccgaggtacgaaacctcaccaacgcaaaggacgttgcttttatgggctttccccttggagcgcgggggaaatggcaccagaaaaactttgagctattgggagctctgggcctctccaagtcgaggcaggagaaaatcgcaaggactttatccacaacagcgctcatgtcatctgtggacattgtacatatgtttgccagtagggccagaaaattaggtaaccaggagtagtaccgtacgtcgacgcggcctactcgacggatcgatccgaacaaacgacccaacacccgtgcgttttattctgtctttttattgccgatcccctcagaagaactcgtcaagaaggcgatagaaggcgatgcgctgcgaatcgggagcggcgataccgtaaagcacgaggaagcggtcagcccattcgccgccaagctcttcagcaatatcacgggtagccaacgctatgtcctgatagcggtcggccgctttacttgtacagctcgtccatgccgagagtgatcccggcggcggtcacgaactccagcaggaccatgtgatcgcgcttctcgttggggtctttgctcagggcggactgggtgctcaggtagtggttgtcgggcagcagcacggggccgtcgccgatgggggtgttctgctggtagtggtcggccagctgcacgctgccgtcctcgatgttgtggcggatcttgaagttcaccttgatgccgttcttctgcttgtcggccatgatatagacgttgtggctgttgtagttgtactccagcttgtgccccaggatgttgccgtcctccttgaagtcgatgcccttcagctcgatgcggttcaccagggtgtcgccctcgaacttcacctcggcgcgggtcttgtagttgccgtcgtccttgaagaagatggtgcgctcctggacgtagccttcgggcatggcggacttgaagaagtcgtgctgcttcatgtggtcggggtagcggctgaagcactgcacgccgtaggtcagggtggtcacgagggtgggccagggcacgggcagcttgccggtggtgcagatgaacttcagggtcagcttgccgtaggtggcatcgccctcgccctcgccggacacgctgaacttgtggccgtttacgtcgccgtccagctcgaccaggatgggcaccaccccggtgaacagctcctcgcccttgctcaccatggtggctcgagaactagatcgcgccgagtgagggttgtgggctcttttattgagctcggggagcagaagcgcgcgaacagaagcgagaagcgaactgattggttagttcaaataaggcacagggtcatttcaggtccttggggcaccctggaaacatctgatggttctctagaaactgctgagggcgggaccgcatctggggaccatctgttcttggccctgagccggggcaggaactgcttaccacagatatcctgtttggcccatattctgctgttccaactgttcttggccctgagccggggcaggaactgcttaccacagatatcctgtttggcccatattctgctgtctctctgttcctaaccttgatcctagcttgccaaacctacaggtggggtctttcattcccccctttttctggagactaaataaaatcttttattctatctatggctcgtactctataggcttcagctggtgatattgttgagtcaaaactagagcctggaccactgatatcctgtctttaacaaattggactaatcgaattcgaagcttgattttatttatttttattcttgttattgttataggttgttttactttttgttgtatttttgtctttttgtattttgttgcaatgttttgtatgttttcttattatttaaaaaaaaaaaaaaaaaaaaaaaaaaaaaaaaaaaaaaaaaaaaaaaccaataaaaaagacagtagctagggacgcagggcagccacaagccagttaggtagctgatagtgagtagggacaggactttttatttcataccgcgtcaattaccacccgaactggaccaatttaccggatttgtccaaggtggacgggccacctttacttaacccggaaaaggaacatatattatttatatgtgttcgaaaaatagccaaatgcctcgtcatcccggtagcgctagcaccggtaaaaaaaaaaaaaaaaaaaaaaaaaaaaaaaacgttgactaaaaaaaaaaaaaaaaaaaaaaaaaaaaaaaaaaaaaaaaaaaaaaaaaaaaaaaaaaaaaaaaaaaaaa

SEQ ID NO: 11368 - DNA, 4439 bp, synthetic construct
  source 1..4439: mol_type = other DNA
gaaataagagagaaaagaagagtaagaagaaatataagagaattcgccaccatggcttcttgcccgaaacctggccccccggtttcagcaggggcaatgagtttggaaagtggactgaccacccactccgttctcgccatcgaacgtggtcccaattcgttggcaaattccggatcagactttgggggggggggtctggggctaccgttacgcctattgagggtatcggtcggcactcagacctcccgctccgactgggtagacctggtgtcctggagccacccaggacccacgtctaagtcccagcaggttgacctggtgtctttatttcctaaacaccgggttgacctgttatccaaaaacgaccaggtagacctggtggctcaatttttaccatctaaatttccccccaatttggcagaaaatgatttggctttgctggtgaacttagagttctacagatcggatttgcatgtgtatgagtgtgttcattttgctgcacattgggagggattaagtggtttgcctgaggtgtatgaacaacttgcaccacaaccgtgtgtgggagaaactttacattctagcctcccacgagacagtgaactgtttgtgcctgaagaggggagcagcgagaaggagagcgaggacgcgccaaaaacatctcctccgacgcctgggaaacatggtttggaacagactggggaggaaaaagtgatggtgactgttcctgacaaaaatccaccttgtccttgctgtggtacccgggtaaactctgtgttgaatctgattgaacatctgaaagtgtcacacgggaaaaggggggtttgttttcggtgtgcaaaatgtggaaaggaaaatagtaactatcacagtgttgtttgtcattttaagaaatgcaggggtccagagacggagaaagccccagctggggagtggatttgtgaggtatgcaacagagattttacaaccaaaattggcctgggacaacacaagagattggcacacccagcagtgagaaatcaggaaaggatcgttgcttcccaaccgaaagaaacatcaaatagaggtgctcacaaaaggtgctggacaaaggaggaggaagaattactaataagactggaggctcagttcgagggaaacaaaaatattaataagcttattgcagaacacataaccaccaaaacagctaagcagatcagtgacaaaaggcgattgctgtccagaaagccagcagaggagccacgtgaggagcctggaacgtgtcatcacaccaggagagcagctgcgagcctgagaacggagcctgagatgagtcatcacgcccaggcagaggacagagataatggacctgggagacgccctctgccaggcagggcagctgccggagggagaacaatggacgagataagacgccaccctgataagggcaacggacagcagagacccaccaagcaaaaatcagaagaacagctgcaggcttactataaaaagacactagaggaacgactttcagctggggcacttaacaccttcccccgagcattcaagcaggtaatggaaggccgggatataaagctagtaatcaatcagacagcgcaggactgcttcggatgcctggaatccataagccaaataagaacggcaacccgagataaaaaggacacggtgacccgggagaaacacccaaagaaaccttttcagaagtggatgaagaagagagcaatcaaaaaaggtaattatcttcggttccagcgtttattttatcttgatagagggaaactggctaaaatcattttagatgatattgaatgcttgtcttgtgacataccactcagtgaaatttattcggtttttaaaacaagatgggaaacaactggtagctttaaaagccttggggactttaaaacttacgggaaggctgacaacactgccttcagagaattaattacggctaaagaaattgagaaaaatgtgcaggaaatgagcaaaggctcggctcccggtccagacgggattactcttggggacgtcgtaaagatggatcccgagttttcccggaccatggagattttcaatttatggttaacaactggtaaaatcccggacatggtgagggggtgcagaaccgttttgattccaaaatcatcaaagccggatcgtttgaaagacattaataactggagacctatcacgatcggttccatcttgctgagactgttctccaggattgtaacagctaggctgagcaaagcgtgccccctgaacagaaggcaaagaggctttatcagagcggcgggatgctctgaaaacttaaaactcctgcaaactataatttggtcggccaaaagagaacacagaccactgggtgttgtattcgtggacatcgccaaggcttttgacaccgtaagccaccagcacatcattcatgctttgcagcaaagagaggtggatccccacatcgtcggtctggtgagcaatatgtacgagaacatcagtacgtatatcaccacaaagaggaacacacacacagacaaaatccagatccgggttggagtaaagcagggtgacccgatgtcgccccttttatttaacctggcaatggaccctctattatgcaagctggaagagagtggcaaaggataccaccgaggacagagcagcatcacagcgatggcatttgcagacgatctggttttgctgagcgactcctgggaaaatatgaatacaaatattagcatactggagaccttctgcaatctgaccggactcaaaacacaggggcaaaagtgccacggcttttacatcaagccgacaaaggactcttacaccatcaatgactgcgctgcctggactatcaacggcacacccctgaacatgatcgaccccggcgaatctgagaaatacctcggcctgcagtttgacccgtggattggaatagcaaggtccggtctctccacaaaactagatttttggcttcagcggatcgatcaagcaccacttaaacctctgcagaaaactgatattctcaaaacatacaccatccctcggctgatctacatagctgaccactcagaagtgaaaagcgcactactcgaaacccttgaccagaagatccggacagcggtcaaggaatggcttcacctacctccgtgcacctgcgatgccatcctgtactcgagcacgagagacggcggtttgggcatcaccaaattggcaggactgatccccagcgtgcaggcccgtagactgcatcggatcgcacagtcatctgacgatacgatgaaatgcttcatggaaaaagagaaaatggaacagctgcataagaaattgtggattcaagctggaggggacagagagaacataccctcgatttgggaagcaccaccgtcgagtgaaccaccaaacaacgtgagcacaaattcggaatgggaagcaccgacccagaaagataaatttccaaagccttgcaattggaggaaaaacgaattcaaaaaatggaccaaattggcatcccaaggccgcggaattgtaaattttgaaagagacaaaattagtaaccattggatccaatactacagacgcatacctcacaggaaactcctcactgcactacaactcagggccaacgtttaccccacgagagaatttctagccaggggtagacaagaccaatacatcaaggcgtgtaggcactgcgatgcggacaacgaatcctgcgcccacatcatcggcaactgcccagtgacacaggacgcccgaatcaagaggcacaattacatctgcgaactgcttctcgaggaggcgaagaagaaggactgggtagtgttcaaggaaccgcacataagggattccaacaaggaactgtacaaacctgacctgatatttgtgaaggatgcccgtgcacttgtcgtggatgtgacagtacggtatgaagcagccaaatcatcgctggaggaagccgctgcagagaaagtgagaaagtacaaacacctggaaacggaagtaagacatctcacgaatgcaaaggacgttacttttgtgggctttcccctaggagcgcgggggaaatggcaccaagataactttaaacttttgactgagcttggcctctccaaatcgaggcaagtgaaaatggcagagactttttccacagtagcgctcttttcatctgtggacattgtacatatgtttgccagtagggccagaaaatctatggttatgtgataataggctgccttctgcggggcttgccttctggccatgcccttcttctctcccttgcacctgtacctcttggtctttgaataaagcctgagtaggaaggaccggtaaaaaaaaaaaaaaaaaaaaaaaaaaaaaaacgttgactaaaaaaaaaaaaaaaaaaaaaaaaaaaaaaaaaaaaaaaaaaaaaaaaaaaaaaaaaaaaaaaaaaaaaa

SEQ ID NO: 11369 - DNA, 4703 bp, synthetic construct
  source 1..4703: mol_type = other DNA
ggtctagttacaactgggcatcgctgcagagatcgcacctcctcgtggtcccgctggtagcccttcgaagggtgactaagtcgatctctgccccaggtacggagccgttgggactcaccagtccaacgtaactcctgcctaaattcggtgaaacaaattcctcggtaaaaagccccatggcttcttgcccgaaacctggccccccggtttcagcaggggcaatgagtttggaaagtggactgaccacccactccgttctcgccatcgaacgtggtcccaattcgttggcaaattccggatcagactttgggggggggggtctggggctaccgttacgcctattgagggtatcggtcggcactcagacctcccgctccgactgggtagacctggtgtcctggagccacccaggacccacgtctaagtcccagcaggttgacctggtgtctttatttcctaaacaccgggttgacctgttatccaaaaacgaccaggtagacctggtggctcaatttttaccatctaaatttccccccaatttggcagaaaatgatttggctttgctggtgaacttagagttctacagatcggatttgcatgtgtatgagtgtgttcattttgctgcacattgggagggattaagtggtttgcctgaggtgtatgaacaacttgcaccacaaccgtgtgtgggagaaactttacattctagcctcccacgagacagtgaactgtttgtgcctgaagaggggagcagcgagaaggagagcgaggacgcgccaaaaacatctcctccgacgcctgggaaacatggtttggaacagactggggaggaaaaagtgatggtgactgttcctgacaaaaatccaccttgtccttgctgtggtacccgggtaaactctgtgttgaatctgattgaacatctgaaagtgtcacacgggaaaaggggggtttgttttcggtgtgcaaaatgtggaaaggaaaatagtaactatcacagtgttgtttgtcattttaagaaatgcaggggtccagagacggagaaagccccagctggggagtggatttgtgaggtatgcaacagagattttacaaccaaaattggcctgggacaacacaagagattggcacacccagcagtgagaaatcaggaaaggatcgttgcttcccaaccgaaagaaacatcaaatagaggtgctcacaaaaggtgctggacaaaggaggaggaagaattactaataagactggaggctcagttcgagggaaacaaaaatattaataagcttattgcagaacacataaccaccaaaacagctaagcagatcagtgacaaaaggcgattgctgtccagaaagccagcagaggagccacgtgaggagcctggaacgtgtcatcacaccaggagagcagctgcgagcctgagaacggagcctgagatgagtcatcacgcccaggcagaggacagagataatggacctgggagacgccctctgccaggcagggcagctgccggagggagaacaatggacgagataagacgccaccctgataagggcaacggacagcagagacccaccaagcaaaaatcagaagaacagctgcaggcttactataaaaagacactagaggaacgactttcagctggggcacttaacaccttcccccgagcattcaagcaggtaatggaaggccgggatataaagctagtaatcaatcagacagcgcaggactgcttcggatgcctggaatccataagccaaataagaacggcaacccgagataaaaaggacacggtgacccgggagaaacacccaaagaaaccttttcagaagtggatgaagaagagagcaatcaaaaaaggtaattatcttcggttccagcgtttattttatcttgatagagggaaactggctaaaatcattttagatgatattgaatgcttgtcttgtgacataccactcagtgaaatttattcggtttttaaaacaagatgggaaacaactggtagctttaaaagccttggggactttaaaacttacgggaaggctgacaacactgccttcagagaattaattacggctaaagaaattgagaaaaatgtgcaggaaatgagcaaaggctcggctcccggtccagacgggattactcttggggacgtcgtaaagatggatcccgagttttcccggaccatggagattttcaatttatggttaacaactggtaaaatcccggacatggtgagggggtgcagaaccgttttgattccaaaatcatcaaagccggatcgtttgaaagacattaataactggagacctatcacgatcggttccatcttgctgagactgttctccaggattgtaacagctaggctgagcaaagcgtgccccctgaacccaaggcaaagaggctttatcagagcggcgggatgctctgaaaacttaaaactcctgcaaactataatttggtcggccaaaagagaacacagaccactgggtgttgtattcgtggacatcgccaaggcttttgacaccgtaagccaccagcacatcattcatgctttgcagcaaagagaggtggatccccacatcgtcggtctggtgagcaatatgtacgagaacatcagtacgtatatcaccacaaagaggaacacacacacagacaaaatccagatccgggttggagtaaagcagggtgacccgatgtcgccccttttatttaacctggcaatggaccctctattatgcaagctggaagagagtggcaaaggataccaccgaggacagagcagcatcacagcgatggcatttgcagacgatctggttttgctgagcgactcctgggaaaatatgaatacaaatattagcatactggagaccttctgcaatctgaccggactcaaaacacaggggcaaaagtgccacggcttttacatcaagccgacaaagaagtcttacaccatcaatgactgcgctgcctggactatcaacggcacacccctgaacatgatcgaccccggcgaatctgagaaatacctcggcctgcagtttgacccgtggattggaatagcaaggtccggtctctccacaaaactagatttttggcttcagcggatcgatcaagcaccacttaaacctctgcagaaaactgatattctcaaaacatacaccatccctcggctgatctacatagctgaccactcagaagtgaaaactgcactactcgaaacccttgaccagaagatccggacagcggtcaaggaatggcttcacctacctccgtgcacctgcgatgccatcctgtactcgagcacgagagacggcggtttgggcatcaccaaattggcaggactgatccccagcgtgcaggcccgtagactgcatcggatcgcacagtcatctgacgatacgatgaaatgcttcatggaaaaagagaaaatggaacagctgcataagaaattgtggattcaagctggaggggacagagagaacataccctcgatttgggaagcaccaccgtcgagtgaaccaccaaacaacgtgagcacaaattcggaatgggaagcaccgacccagaaagataaatttccaaagccttgcaattggaggaaaaacgaattcaaaaaatggaccaaattggcatcccaaggccgcggaattgtaaattttgaaagagacaaaattagtaaccattggatccaatactacagacgcatacctcacaggaaactcctcactgcactacaactcagggccaacgtttaccccacgagagaatttctagccaggggtagacaagaccaatacatcaaggcgtgtaggcactgcgatgcggacattgaatcctgcgcccacatcatcggcaactgcccagtgacacaggacgcccgaatcaagaggcacaattacatctgcgaactgcttctcgaggaggcgaagaagaaggactgggtagtgttcaaggaaccgcacataagggattccaacaaggaactgtacaaacctgacctgatatttgtgaaggatgcccgtgcacttgtcgtggatgtgacagtacggtatgaagcagccaaatcatcgctggaggaagccgctgcagagaaagtgagaaagtacaaacacctggaaacggaagtaagacatctcacgaatgcaaaggacgttacttttgtgggctttcccctaggagcgcgggggaaatggcaccaagataactttaaacttttgactgagcttggcctctccaaatcgaggcaagtgaaaatggcagagactttttccacagtagcgctcttttcatctgtggacattgtacatatgtttgccagtagggccagaaaatctatggttatgtgataataggctgccttctgcggggcttgccttctggccatgcccttcttctctcccttgcacctgtacctcttggtctttgaataaagcctgagtaggaaggaccggtagacatgataagatacattgatgagtttggacaaaccacaactagaatgcagtgaaaaaaatgctttatttgtgaaatttgtgatgctattgctttatttgtaaccattataagctgcaataaacaagttaacaacaacaaaaaaaaaaaaaaaaaaaaaaaaaaaaaaacgttgactaaaaaaaaaaaaaaaaaaaaaaaaaaaaaaaaaaaaaaaaaaaaaaaaaaaaaaaaaaaaaaaaaaaaaa

SEQ ID NO: 11370 - DNA, 4703 bp, synthetic construct
  source 1..4703: mol_type = other DNA
ggtctagttacaactgggcatcgctgcagagatcgcacctcctcgtggtcccgctggtagcccttcgaagggtgactaagtcgatctctgccccaggtacggagccgttgggactcaccagtccaacgtaactcctgcctaaattcggtgaaacaaattcctcggtaaaaagccccatggcttcttgcccgaaacctggccccccggtttcagcaggggcaatgagtttggaaagtggactgaccacccactccgttctcgccatcgaacgtggtcccaattcgttggcaaattccggatcagactttgggggggggggtctggggctaccgttacgcctattgagggtatcggtcggcactcagacctcccgctccgactgggtagacctggtgtcctggagccacccaggacccacgtctaagtcccagcaggttgacctggtgtctttatttcctaaacaccgggttgacctgttatccaaaaacgaccaggtagacctggtggctcaatttttaccatctaaatttccccccaatttggcagaaaatgatttggctttgctggtgaacttagagttctacagatcggatttgcatgtgtatgagtgtgttcattttgctgcacattgggagggattaagtggtttgcctgaggtgtatgaacaacttgcaccacaaccgtgtgtgggagaaactttacattctagcctcccacgagacagtgaactgtttgtgcctgaagaggggagcagcgagaaggagagcgaggacgcgccaaaaacatctcctccgacgcctgggaaacatggtttggaacagactggggaggaaaaagtgatggtgactgttcctgacaaaaatccaccttgtccttgctgtggtacccgggtaaactctgtgttgaatctgattgaacatctgaaagtgtcacacgggaaaaggggggtttgttttcggtgtgcaaaatgtggaaaggaaaatagtaactatcacagtgttgtttgtcattttaagaaatgcaggggtccagagacggagaaagccccagctggggagtggatttgtgaggtatgcaacagagattttacaaccaaaattggcctgggacaacacaagagattggcacacccagcagtgagaaatcaggaaaggatcgttgcttcccaaccgaaagaaacatcaaatagaggtgctcacaaaaggtgctggacaaaggaggaggaagaattactaataagactggaggctcagttcgagggaaacaaaaatattaataagcttattgcagaacacataaccaccaaaacagctaagcagatcagtgacaaaaggcgattgctgtccagaaagccagcagaggagccacgtgaggagcctggaacgtgtcatcacaccaggagagcagctgcgagcctgagaacggagcctgagatgagtcatcacgcccaggcagaggacagagataatggacctgggagacgccctctgccaggcagggcagctgccggagggagaacaatggacgagataagacgccaccctgataagggcaacggacagcagagacccaccaagcaaaaatcagaagaacagctgcaggcttactataaaaagacactagaggaacgactttcagctggggcacttaacaccttcccccgagcattcaagcaggtaatggaaggccgggatataaagctagtaatcaatcagacagcgcaggactgcttcggatgcctggaatccataagccaaataagaacggcaacccgagataaaaaggacacggtgacccgggagaaacacccaaagaaaccttttcagaagtggatgaaggacagagcaatcaaaaaaggtaattatcttcggttccagcgtttattttatcttgatagagggaaactggctaaaatcattttagatgatattgaatgcttgtcttgtgacataccactcagtgaaatttattcggtttttaaaacaagatgggaaacaactggtagctttaaaagccttggggactttaaaacttacgggaaggctgacaacactgccttcagagaattaattacggctaaagaaattgagaaaaatgtgcaggaaatgagcaaaggctcggctcccggtccagacgggattactcttggggacgtcgtaaagatggatcccgagttttcccggaccatggagattttcaatttatggttaacaactggtaaaatcccggacatggtgagggggtgcagaaccgttttgattccaaaatcatcagacccggatcgtttgaaagacattaataactggagacctatcacgatcggttccatcttgctgagactgttctccaggattgtaacagctaggctgagcaaagcgtgccccctgaacccaaggcaaagaggctttatcagagcggcgggatgctctgaaaacttaaaactcctgcaaactataatttggtcggccaaaagagaacacagaccactgggtgttgtattcgtggacatcgccaaggcttttgacaccgtaagccaccagcacatcattcatgctttgcagcaaagagaggtggatccccacatcgtcggtctggtgagcaatatgtacgagaacatcagtacgtatatcaccacaaagaggaacacacacacagacaaaatccagatccgggttggagtaaagcagggtgacccgatgtcgccccttttatttaacctggcaatggaccctctattatgcaagctggaagagagtggcaaaggataccaccgaggacagagcagcatcacagcgatggcatttgcagacgatctggttttgctgagcgactcctgggaaaatatgaatacaaatattagcatactggagaccttctgcaatctgaccggactcaaaacacaggggcaaaagtgccacggcttttacatcaagccgacaaaggactcttacaccatcaatgactgcgctgcctggactatcaacggcacacccctgaacatgatcgaccccggcgaatctgagaaatacctcggcctgcagtttgacccgtggattggaatagcaaggtccggtctctccacaaaactagatttttggcttcagcggatcgatcaagcaccacttaaacctctgcagaaaactgatattctcaaaacatacaccatccctcggctgatctacatagctgaccactcagaagtgaaaactgcactactcgaaacccttgaccagaagatccggacagcggtcaaggaatggcttcacctacctccgtgcacctgcgatgccatcctgtactcgagcacgagagacggcggtttgggcatcaccaaattggcaggactgatccccagcgtgcaggcccgtagactgcatcggatcgcacagtcatctgacgatacgatgaaatgcttcatggaaaaagagaaaatggaacagctgcataagaaattgtggattcaagctggaggggacagagagaacataccctcgatttgggaagcaccaccgtcgagtgaaccaccaaacaacgtgagcacaaattcggaatgggaagcaccgacccagaaagataaatttccaaagccttgcaattggaggaaaaacgaattcaaaaaatggaccaaattggcatcccaaggccgcggaattgtaaattttgaaagagacaaaattagtaaccattggatccaatactacagacgcatacctcacaggaaactcctcactgcactacaactcagggccaacgtttaccccacgagagaatttctagccaggggtagacaagaccaatacatcaaggcgtgtaggcactgcgatgcggacattgaatcctgcgcccacatcatcggcaactgcccagtgacacaggacgcccgaatcaagaggcacaattacatctgcgaactgcttctcgaggaggcgaagaagaaggactgggtagtgttcaaggaaccgcacataagggattccaacaaggaactgtacaaacctgacctgatatttgtgaaggatgcccgtgcacttgtcgtggatgtgacagtacggtatgaagcagccaaatcatcgctggaggaagccgctgcagagaaagtgagaaagtacaaacacctggaaacggaagtaagacatctcacgaatgcaaaggacgttacttttgtgggctttcccctaggagcgcgggggaaatggcaccaagataactttaaacttttgactgagcttggcctctccaaatcgaggcaagtgaaaatggcagagactttttccacagtagcgctcttttcatctgtggacattgtacatatgtttgccagtagggccagaaaatctatggttatgtgataataggctgccttctgcggggcttgccttctggccatgcccttcttctctcccttgcacctgtacctcttggtctttgaataaagcctgagtaggaaggaccggtagacatgataagatacattgatgagtttggacaaaccacaactagaatgcagtgaaaaaaatgctttatttgtgaaatttgtgatgctattgctttatttgtaaccattataagctgcaataaacaagttaacaacaacaaaaaaaaaaaaaaaaaaaaaaaaaaaaaaacgttgactaaaaaaaaaaaaaaaaaaaaaaaaaaaaaaaaaaaaaaaaaaaaaaaaaaaaaaaaaaaaaaaaaaaaaa

SEQ ID NO: 11371 - DNA, 4703 bp, synthetic construct
  source 1..4703: mol_type = other DNA
ggtctagttacaactgggcatcgctgcagagatcgcacctcctcgtggtcccgctggtagcccttcgaagggtgactaagtcgatctctgccccaggtacggagccgttgggactcaccagtccaacgtaactcctgcctaaattcggtgaaacaaattcctcggtaaaaagccccatggcttcttgcccgaaacctggccccccggtttcagcaggggcaatgagtttggaaagtggactgaccacccactccgttctcgccatcgaacgtggtcccaattcgttggcaaattccggatcagactttgggggggggggtctggggctaccgttacgcctattgagggtatcggtcggcactcagacctcccgctccgactgggtagacctggtgtcctggagccacccaggacccacgtctaagtcccagcaggttgacctggtgtctttatttcctaaacaccgggttgacctgttatccaaaaacgaccaggtagacctggtggctcaatttttaccatctaaatttccccccaatttggcagaaaatgatttggctttgctggtgaacttagagttctacagatcggatttgcatgtgtatgagtgtgttcattttgctgcacattgggagggattaagtggtttgcctgaggtgtatgaacaacttgcaccacaaccgtgtgtgggagaaactttacattctagcctcccacgagacagtgaactgtttgtgcctgaagaggggagcagcgagaaggagagcgaggacgcgccaaaaacatctcctccgacgcctgggaaacatggtttggaacagactggggaggaaaaagtgatggtgactgttcctgacaaaaatccaccttgtccttgctgtggtacccgggtaaactctgtgttgaatctgattgaacatctgaaagtgtcacacgggaaaaggggggtttgttttcggtgtgcaaaatgtggaaaggaaaatagtaactatcacagtgttgtttgtcattttaagaaatgcaggggtccagagacggagaaagccccagctggggagtggatttgtgaggtatgcaacagagattttacaaccaaaattggcctgggacaacacaagagattggcacacccagcagtgagaaatcaggaaaggatcgttgcttcccaaccgaaagaaacatcaaatagaggtgctcacaaaaggtgctggacaaaggaggaggaagaattactaataagactggaggctcagttcgagggaaacaaaaatattaataagcttattgcagaacacataaccaccaaaacagctaagcagatcagtgacaaaaggcgattgctgtccagaaagccagcagaggagccacgtgaggagcctggaacgtgtcatcacaccaggagagcagctgcgagcctgagaacggagcctgagatgagtcatcacgcccaggcagaggacagagataatggacctgggagacgccctctgccaggcagggcagctgccggagggagaacaatggacgagataagacgccaccctgataagggcaacggacagcagagacccaccaagcaaaaatcagaagaacagctgcaggcttactataaaaagacactagaggaacgactttcagctggggcacttaacaccttcccccgagcattcaagcaggtaatggaaggccgggatataaagctagtaatcaatcagacagcgcaggactacttcggatgcctggaatccataagccaaataagaacggcaacccgagataaaaaggacacggtgacccgggagaaacacccaaagaaaccttttcagaagtggatgaagaagagagcaatcaaaaaaggtaattatcttcggttccagcgtttattttatcttgatagagggaaactggctaaaatcattttagatgatattgaatgcttgtcttgtgacataccactcagtgaaatttattcggtttttaaaacaagatgggaaacaactggtagctttaaaagccttggggactttaaaacttacgggaaggctgacaacactgccttcagagaattaattacggctaaagaaattgagaaaaatgtgcaggaaatgagcaaaggctcggctcccggtccagacgggattactcttggggacgtcgtaaagatggatcccgagttttcccggaccatggagattttcaatttatggttaacaactggtaaaatcccggacatggtgagggggtgcagaaccgttttgattccaaaatcatcagacccggatcgtttgaaagacattaataactggagacctatcacgatcggttccatcttgctgagactgttctccaggattgtaacagctaggctgagcaaagcgtgccccctgaacccaaggcaaagaggctttatcagagcggcgggatgctctgaaaacttaaaactcctgcaaactataatttggtcggccaaaagagaacacagaccactgggtgttgtattcgtggacatcgccaaggcttttgacaccgtaagccaccagcacatcattcatgctttgcagcaaagagaggtggatccccacatcgtcggtctggtgagcaatatgtacgagaacatcagtacgtatatcaccacaaagaggaacacacacacagacaaaatccagatccgggttggagtaaagcagggtgacccgatgtcgccccttttatttaacctggcaatggaccctctattatgcaagctggaagagagtggcaaaggataccaccgaggacagagcagcatcacagcgatggcatttgcagacgatctggttttgctgagcgactcctgggaaaatatgaatacaaatattagcatactggagaccttctgcaatctgaccggactcaaaacacaggggcaaaagtgccacggcttttacatcaagccgacaaaggactcttacaccatcaatgactgcgctgcctggactatcaacggcacacccctgaacatgatcgaccccggcgaatctgagaaatacctcggcctgcagtttgacccgtggattggaatagcaaggtccggtctctccacaaaactagatttttggcttcagcggatcgatcaagcaccacttaaacctctgcagaaaactgatattctcaaaacatacaccatccctcggctgatctacatagctgaccactcagaagtgaaaactgcactactcgaaacccttgaccagaagatccggacagcggtcaaggaatggcttcacctacctccgtgcacctgcgatgccatcctgtactcgagcacgagagacggcggtttgggcatcaccaaattggcaggactgatccccagcgtgcaggcccgtagactgcatcggatcgcacagtcatctgacgatacgatgaaatgcttcatggaaaaagagaaaatggaacagctgcataagaaattgtggattcaagctggaggggacagagagaacataccctcgatttgggaagcaccaccgtcgagtgaaccaccaaacaacgtgagcacaaattcggaatgggaagcaccgacccagaaagataaatttccaaagccttgcaattggaggaaaaacgaattcaaaaaatggaccaaattggcatcccaaggccgcggaattgtaaattttgaaagagacaaaattagtaaccattggatccaatactacagacgcatacctcacaggaaactcctcactgcactacaactcagggccaacgtttaccccacgagagaatttctagccaggggtagacaagaccaatacatcaaggcgtgtaggcactgcgatgcggacattgaatcctgcgcccacatcatcggcaactgcccagtgacacaggacgcccgaatcaagaggcacaattacatctgcgaactgcttctcgaggaggcgaagaagaaggactgggtagtgttcaaggaaccgcacataagggattccaacaaggaactgtacaaacctgacctgatatttgtgaaggatgcccgtgcacttgtcgtggatgtgacagtacggtatgaagcagccaaatcatcgctggaggaagccgctgcagagaaagtgagaaagtacaaacacctggaaacggaagtaagacatctcacgaatgcaaaggacgttacttttgtgggctttcccctaggagcgcgggggaaatggcaccaagataactttaaacttttgactgagcttggcctctccaaatcgaggcaagtgaaaatggcagagactttttccacagtagcgctcttttcatctgtggacattgtacatatgtttgccagtagggccagaaaatctatggttatgtgataataggctgccttctgcggggcttgccttctggccatgcccttcttctctcccttgcacctgtacctcttggtctttgaataaagcctgagtaggaaggaccggtagacatgataagatacattgatgagtttggacaaaccacaactagaatgcagtgaaaaaaatgctttatttgtgaaatttgtgatgctattgctttatttgtaaccattataagctgcaataaacaagttaacaacaacaaaaaaaaaaaaaaaaaaaaaaaaaaaaaaacgttgactaaaaaaaaaaaaaaaaaaaaaaaaaaaaaaaaaaaaaaaaaaaaaaaaaaaaaaaaaaaaaaaaaaaaaa

SEQ ID NO: 11372 - DNA, 4703 bp, synthetic construct
  source 1..4703: mol_type = other DNA
ggtctagttacaactgggcatcgctgcagagatcgcacctcctcgtggtcccgctggtagcccttcgaagggtgactaagtcgatctctgccccaggtacggagccgttgggactcaccagtccaacgtaactcctgcctaaattcggtgaaacaaattcctcggtaaaaagccccatggcttcttgcccgaaacctggccccccggtttcagcaggggcaatgagtttggaaagtggactgaccacccactccgttctcgccatcgaacgtggtcccaattcgttggcaaattccggatcagactttgggggggggggtctggggctaccgttacgcctattgagggtatcggtcggcactcagacctcccgctccgactgggtagacctggtgtcctggagccacccaggacccacgtctaagtcccagcaggttgacctggtgtctttatttcctaaacaccgggttgacctgttatccaaaaacgaccaggtagacctggtggctcaatttttaccatctaaatttccccccaatttggcagaaaatgatttggctttgctggtgaacttagagttctacagatcggatttgcatgtgtatgagtgtgttcattttgctgcacattgggagggattaagtggtttgcctgaggtgtatgaacaacttgcaccacaaccgtgtgtgggagaaactttacattctagcctcccacgagacagtgaactgtttgtgcctgaagaggggagcagcgagaaggagagcgaggacgcgccaaaaacatctcctccgacgcctgggaaacatggtttggaacagactggggaggaaaaagtgatggtgactgttcctgacaaaaatccaccttgtccttgctgtggtacccgggtaaactctgtgttgaatctgattgaacatctgaaagtgtcacacgggaaaaggggggtttgttttcggtgtgcaaaatgtggaaaggaaaatagtaactatcacagtgttgtttgtcattttaagaaatgcaggggtccagagacggagaaagccccagctggggagtggatttgtgaggtatgcaacagagattttacaaccaaaattggcctgggacaacacaagagattggcacacccagcagtgagaaatcaggaaaggatcgttgcttcccaaccgaaagaaacatcaaatagaggtgctcacaaaaggtgctggacaaaggaggaggaagaattactaataagactggaggctcagttcgagggaaacaaaaatattaataagcttattgcagaacacataaccaccaaaacagctaagcagatcagtgacaaaaggcgattgctgtccagaaagccagcagaggagccacgtgaggagcctggaacgtgtcatcacaccaggagagcagctgcgagcctgagaacggagcctgagatgagtcatcacgcccaggcagaggacagagataatggacctgggagacgccctctgccaggcagggcagctgccggagggagaacaatggacgagataagacgccaccctgataagggcaacggacagcagagacccaccaagcaaaaatcagaagaacagctgcaggcttactataaaaagacactagaggaacgactttcagctggggcacttaacaccttcccccgagcattcaagcaggtaatggaaggccgggatataaagctagtaatcaatcagacagcgcaggactgcttcggatgcctggaatccataagccaaataagaacggcaacccgagataaaaaggacacggtgacccgggagaaacacccaaagaaaccttttcagaagtggatgaaggacagagcaatcaaaaaaggtaattatcttcggttccagcgtttattttatcttgatagagggaaactggctaaaatcattttagatgatattgaatgcttgtcttgtgacataccactcagtgaaatttattcggtttttaaaacaagatgggaaacaactggtagctttaaaagccttggggactttaaaacttacgggaaggctgacaacactgccttcagagaattaattacggctaaagaaattgagaaaaatgtgcaggaaatgagcaaaggctcggctcccggtccagacgggattactcttggggacgtcgtaaagatggatcccgagttttcccggaccatggagattttcaatttatggttaacaactggtaaaatcccggacatggtgagggggtgcagaaccgttttgattccaaaatcatcaaagccggatcgtttgaaagacattaataactggagacctatcacgatcggttccatcttgctgagactgttctccaggattgtaacagctaggctgagcaaagcgtgccccctgaacccaaggcaaagaggctttatcagagcggcgggatgctctgaaaacttaaaactcctgcaaactataatttggtcggccaaaagagaacacagaccactgggtgttgtattcgtggacatcgccaaggcttttgacaccgtaagccaccagcacatcattcatgctttgcagcaaagagaggtggatccccacatcgtcggtctggtgagcaatatgtacgagaacatcagtacgtatatcaccacaaagaggaacacacacacagacaaaatccagatccgggttggagtaaagcagggtgacccgatgtcgccccttttatttaacctggcaatggaccctctattatgcaagctggaagagagtggcaaaggataccaccgaggacagagcagcatcacagcgatggcatttgcagacgatctggttttgctgagcgactcctgggaaaatatgaatacaaatattagcatactggagaccttctgcaatctgaccggactcaaaacacaggggcaaaagtgccacggcttttacatcaagccgacaaaggactcttacaccatcaatgactgcgctgcctggactatcaacggcacacccctgaacatgatcgaccccggcgaatctgagaaatacctcggcctgcagtttgacccgtggattggaatagcaaggtccggtctctccacaaaactagatttttggcttcagcggatcgatcaagcaccacttaaacctctgcagaaaactgatattctcaaaacatacaccatccctcggctgatctacatagctgaccactcagaagtgaaaactgcactactcgaaacccttgaccagaagatccggacagcggtcaaggaatggcttcacctacctccgtgcacctgcgatgccatcctgtactcgagcacgagagacggcggtttgggcatcaccaaattggcaggactgatccccagcgtgcaggcccgtagactgcatcggatcgcacagtcatctgacgatacgatgaaatgcttcatggaaaaagagaaaatggaacagctgcataagaaattgtggattcaagctggaggggacagagagaacataccctcgatttgggaagcaccaccgtcgagtgaaccaccaaacaacgtgagcacaaattcggaatgggaagcaccgacccagaaagataaatttccaaagccttgcaattggaggaaaaacgaattcaaaaaatggaccaaattggcatcccaaggccgcggaattgtaaattttgaaagagacaaaattagtaaccattggatccaatactacagacgcatacctcacaggaaactcctcactgcactacaactcagggccaacgtttaccccacgagagaatttctagccaggggtagacaagaccaatacatcaaggcgtgtaggcactgcgatgcggacattgaatcctgcgcccacatcatcggcaactgcccagtgacacaggacgcccgaatcaagaggcacaataagatctgcgaactgcttctcgaggaggcgaagaagaaggactgggtagtgttcaaggaaccgcacataagggattccaacaaggaactgtacaaacctgacctgatatttgtgaaggatgcccgtgcacttgtcgtggatgtgacagtacggtatgaagcagccaaatcatcgctggaggaagccgctgcagagaaagtgagaaagtacaaacacctggaaacggaagtaagacatctcacgaatgcaaaggacgttacttttgtgggctttcccctaggagcgcgggggaaatggcaccaagataactttaaacttttgactgagcttggcctctccaaatcgaggcaagtgaaaatggcagagactttttccacagtagcgctcttttcatctgtggacattgtacatatgtttgccagtagggccagaaaatctatggttatgtgataataggctgccttctgcggggcttgccttctggccatgcccttcttctctcccttgcacctgtacctcttggtctttgaataaagcctgagtaggaaggaccggtagacatgataagatacattgatgagtttggacaaaccacaactagaatgcagtgaaaaaaatgctttatttgtgaaatttgtgatgctattgctttatttgtaaccattataagctgcaataaacaagttaacaacaacaaaaaaaaaaaaaaaaaaaaaaaaaaaaaaacgttgactaaaaaaaaaaaaaaaaaaaaaaaaaaaaaaaaaaaaaaaaaaaaaaaaaaaaaaaaaaaaaaaaaaaaaa

SEQ ID NO: 11373 - DNA, 4603 bp, synthetic construct; identical to SEQ ID NO: 10231
  source 1..4603: mol_type = other DNA

SEQ ID NO: 11374 - DNA, 4703 bp, synthetic construct
  source 1..4703: mol_type = other DNA
ggtctagttacaactgggcatcgctgcagagatcgcacctcctcgtggtcccgctggtagcccttcgaagggtgactaagtcgatctctgccccaggtacggagccgttgggactcaccagtccaacgtaactcctgcctaaattcggtgaaacaaattcctcggtaaaaagccccatggcttcttgcccgaaacctggccccccggtttcagcaggggcaatgagtttggaaagtggactgaccacccactccgttctcgccatcgaacgtggtcccaattcgttggcaaattccggatcagactttgggggggggggtctggggctaccgttacgcctattgagggtatcggtcggcactcagacctcccgctccgactgggtagacctggtgtcctggagccacccaggacccacgtctaagtcccagcaggttgacctggtgtctttatttcctaaacaccgggttgacctgttatccaaaaacgaccaggtagacctggtggctcaatttttaccatctaaatttccccccaatttggcagaaaatgatttggctttgctggtgaacttagagttctacagatcggatttgcatgtgtatgagtgtgttcattttgctgcacattgggagggattaagtggtttgcctgaggtgtatgaacaacttgcaccacaaccgtgtgtgggagaaactttacattctagcctcccacgagacagtgaactgtttgtgcctgaagaggggagcagcgagaaggagagcgaggacgcgccaaaaacatctcctccgacgcctgggaaacatggtttggaacagactggggaggaaaaagtgatggtgactgttcctgacaaaaatccaccttgtccttgctgtggtacccgggtaaactctgtgttgaatctgattgaacatctgaaagtgtcacacgggaaaaggggggtttgttttcggtgtgcaaaatgtggaaaggaaaatagtaactatcacagtgttgtttgtcattttccaaaatgcaggggtccagagacggagaaagccccagctggggagtggatttgtgaggtatgcaacagagattttacaaccaaaattggcctgggacaacacaagagattggcacacccagcagtgagaaatcaggaaaggatcgttgcttcccaaccgaaagaaacatcaaatagaggtgctcacaaaaggtgctggacaaaggaggaggaagaattactaataagactggaggctcagttcgagggaaacaaaaatattaataagcttattgcagaacacataaccaccaaaacagctaagcagatcagtgacaaaaggcgattgctgtccagaaagccagcagaggagccacgtgaggagcctggaacgtgtcatcacaccaggagagcagctgcgagcctgagaacggagcctgagatgagtcatcacgcccaggcagaggacagagataatggacctgggagacgccctctgccaggcagggcagctgccggagggagaacaatggacgagataagacgccaccctgataagggcaacggacagcagagacccaccaagcaaaaatcagaagaacagctgcaggcttactataaaaagacactagaggaacgactttcagctggggcacttaacaccttcccccgagcattcaagcaggtaatggaaggccgggatataaagctagtaatcaatcagacagcgcaggactgcttcggatgcctggaatccataagccaaataagaacggcaacccgagataaaaaggacacggtgacccgggagaaacacccaaagaaaccttttcagaagtggatgaaggacagagcaatcaaaaaaggtaattatcttcggttccagcgtttattttatcttgatagagggaaactggctaaaatcattttagatgatattgaatgcttgtcttgtgacataccactcagtgaaatttattcggtttttaaaacaagatgggaaacaactggtagctttaaaagccttggggactttaaaacttacgggaaggctgacaacactgccttcagagaattaattacggctaaagaaattgagaaaaatgtgcaggaaatgagcaaaggctcggctcccggtccagacgggattactcttggggacgtcgtaaagatggatcccgagttttcccggaccatggagattttcaatttatggttaacaactggtaaaatcccggacatggtgagggggtgcagaaccgttttgattccaaaatcatcaaagccggatcgtttgaaagacattaataactggagacctatcacgatcggttccatcttgctgagactgttctccaggattgtaacagctaggctgagcaaagcgtgccccctgaacccaaggcaaagaggctttatcagagcggcgggatgctctgaaaacttaaaactcctgcaaactataatttggtcggccaaaagagaacacagaccactgggtgttgtattcgtggacatcgccaaggcttttgacaccgtaagccaccagcacatcattcatgctttgcagcaaagagaggtggatccccacatcgtcggtctggtgagcaatatgtacgagaacatcagtacgtatatcaccacaaagaggaacacacacacagacaaaatccagatccgggttggagtaaagcagggtgacccgatgtcgccccttttatttaacctggcaatggaccctctattatgcaagctggaagagagtggcaaaggataccaccgaggacagagcagcatcacagcgatggcatttgcagacgatctggttttgctgagcgactcctgggaaaatatgaatacaaatattagcatactggagaccttctgcaatctgaccggactcaaaacacaggggcaaaagtgccacggcttttacatcaagccgacaaaggactcttacaccatcaatgactgcgctgcctggactatcaacggcacacccctgaacatgatcgaccccggcgaatctgagaaatacctcggcctgcagtttgacccgtggattggaatagcaaggtccggtctctccacaaaactagatttttggcttcagcggatcgatcaagcaccacttaaacctctgcagaaaactgatattctcaaaacatacaccatccctcggctgatctacatagctgaccactcagaagtgaaaactgcactactcgaaacccttgaccagaagatccggacagcggtcaaggaatggcttcacctacctccgtgcacctgcgatgccatcctgtactcgagcacgagagacggcggtttgggcatcaccaaattggcaggactgatccccagcgtgcaggcccgtagactgcatcggatcgcacagtcatctgacgatacgatgaaatgcttcatggaaaaagagaaaatggaacagctgcataagaaattgtggattcaagctggaggggacagagagaacataccctcgatttgggaagcaccaccgtcgagtgaaccaccaaacaacgtgagcacaaattcggaatgggaagcaccgacccagaaagataaatttccaaagccttgcaattggaggaaaaacgaattcaaaaaatggaccaaattggcatcccaaggccgcggaattgtaaattttgaaagagacaaaattagtaaccattggatccaatactacagacgcatacctcacaggaaactcctcactgcactacaactcagggccaacgtttaccccacgagagaatttctagccaggggtagacaagaccaatacatcaaggcgtgtaggcactgcgatgcggacattgaatcctgcgcccacatcatcggcaactgcccagtgacacaggacgcccgaatcaagaggcacaattacatctgcgaactgcttctcgaggaggcgaagaagaaggactgggtagtgttcaaggaaccgcacataagggattccaacaaggaactgtacaaacctgacctgatatttgtgaaggatgcccgtgcacttgtcgtggatgtgacagtacggtatgaagcagccaaatcatcgctggaggaagccgctgcagagaaagtgagaaagtacaaacacctggaaacggaagtaagacatctcacgaatgcaaaggacgttacttttgtgggctttcccctaggagcgcgggggaaatggcaccaagataactttaaacttttgactgagcttggcctctccaaatcgaggcaagtgaaaatggcagagactttttccacagtagcgctcttttcatctgtggacattgtacatatgtttgccagtagggccagaaaatctatggttatgtgataataggctgccttctgcggggcttgccttctggccatgcccttcttctctcccttgcacctgtacctcttggtctttgaataaagcctgagtaggaaggaccggtagacatgataagatacattgatgagtttggacaaaccacaactagaatgcagtgaaaaaaatgctttatttgtgaaatttgtgatgctattgctttatttgtaaccattataagctgcaataaacaagttaacaacaacaaaaaaaaaaaaaaaaaaaaaaaaaaaaaaacgttgactaaaaaaaaaaaaaaaaaaaaaaaaaaaaaaaaaaaaaaaaaaaaaaaaaaaaaaaaaaaaaaaaaaaaaa

SEQ ID NO: 11375 - DNA, 4564 bp, synthetic construct
  source 1..4564: mol_type = other DNA
ggtctagttacaactgggcatcgctgcagagatcgcacctcctcgtggtcccgctggtagcccttcgaagggtgactaagtcgatctctgccccaggtacggagccgttgggactcaccagtccaacgtaactcctgcctaaattcggtgaaacaaattcctcggtaaaaagccccatggcttcttgcccgaaacctggccccccggtttcagcaggggcaatgagtttggaaagtggactgaccacccactccgttctcgccatcgaacgtggtcccaattcgttggcaaattccggatcagactttgggggggggggtctggggctaccgttacgcctattgagggtatcggtcggcactcagacctcccgctccgactgggtagacctggtgtcctggagccacccaggacccacgtctaagtcccagcaggttgacctggtgtctttatttcctaaacaccgggttgacctgttatccaaaaacgaccaggtagacctggtggctcaatttttaccatctaaatttccccccaatttggcagaaaatgatttggctttgctggtgaacttagagttctacagatcggatttgcatgtgtatgagtgtgttcattttgctgcacattgggagggattaagtggtttgcctgaggtgtatgaacaacttgcaccacaaccgtgtgtgggagaaactttacattctagcctcccacgagacagtgaactgtttgtgcctgaagaggggagcagcgagaaggagagcgaggacgcgccaaaaacatctcctccgacgcctgggaaacatggtttggaacagactggggaggaaaaagtgatggtgactgttcctgacaaaaatccaccttgtccttgctgtggtacccgggtaaactctgtgttgaatctgattgaacatctgaaagtgtcacacgggaaaaggggggtttgttttcggtgtgcaaaatgtggaaaggaaaatagtaactatcacagtgttgtttgtcattttccaaaatgcaggggtccagagacggagaaagccccagctggggagtggatttgtgaggtatgcaacagagattttacaaccaaaattggcctgggacaacacaagagattggcacacccagcagtgagaaatcaggaaaggatcgttgcttcccaaccgaaagaaacatcaaatagaggtgctcacaaaaggtgctggacaaaggaggaggaagaattactaataagactggaggctcagttcgagggaaacaaaaatattaataagcttattgcagaacacataaccaccaaaacagctaagcagatcagtgacaaaaggcgattgctgtccagaaagccagcagaggagccacgtgaggagcctggaacgtgtcatcacaccaggagagcagctgcgagcctgagaacggagcctgagatgagtcatcacgcccaggcagaggacagagataatggacctgggagacgccctctgccaggcagggcagctgccggagggagaacaatggacgagataagacgccaccctgataagggcaacggacagcagagacccaccaagcaaaaatcagaagaacagctgcaggcttactataaaaagacactagaggaacgactttcagctggggcacttaacaccttcccccgagcattcaagcaggtaatggaaggccgggatataaagctagtaatcaatcagacagcgcaggactgcttcggatgcctggaatccataagccaaataagaacggcaacccgagataaaaaggacacggtgacccgggagaaacacccaaagaaaccttttcagaagtggatgaagaagagagcaatcaaaaaaggtaattatcttcggttccagcgtttattttatcttgatagagggaaactggctaaaatcattttagatgatattgaatgcttgtcttgtgacataccactcagtgaaatttattcggtttttaaaacaagatgggaaacaactggtagctttaaaagccttggggactttaaaacttacgggaaggctgacaacactgccttcagagaattaattacggctaaagaaattgagaaaaatgtgcaggaaatgagcaaaggctcggctcccggtccagacgggattactcttggggacgtcgtaaagatggatcccgagttttcccggaccatggagattttcaatttatggttaacaactggtaaaatcccggacatggtgagggggtgcagaaccgttttgattccaaaatcatcaaagccggatcgtttgaaagacattaataactggagacctatcacgatcggttccatcttgctgagactgttctccaggattgtaacagctaggctgagcaaagcgtgccccctgaacccaaggcaaagaggctttatcagagcggcgggatgctctgaaaacttaaaactcctgcaaactataatttggtcggccaaaagagaacacagaccactgggtgttgtattcgtggacatcgccaaggcttttgacaccgtaagccaccagcacatcattcatgctttgcagcaaagagaggtggatccccacatcgtcggtctggtgagcaatatgtacgagaacatcagtacgtatatcaccacaaagaggaacacacacacagacaaaatccagatccgggttggagtaaagcagggtgacccgatgtcgccccttttatttaacctggcaatggaccctctattatgcaagctggaagagagtggcaaaggataccaccgaggacagagcagcatcacagcgatggcatttgcagacgatctggttttgctgagcgactcctgggaaaatatgaatacaaatattagcatactggagaccttctgcaatctgaccggactcaaaacacaggggcaaaagtgccacggcttttacatcaagccgacaaaggactcttacaccatcaatgactgcgctgcctggactatcaacggcacacccctgaacatgatcgaccccggcgaatctgagaaatacctcggcctgcagtttgacccgtggattggaatagcaaggtccggtctctccacaaaactagatttttggcttcagcggatcgatcaagcaccacttaaacctctgcagaaaactgatattctcaaaacatacaccatccctcggctgatctacatagctgaccactcagaagtgaaaactgcactactcgaaacccttgaccagaagatccggacagcggtcaaggaatggcttcacctacctccgtgcacctgcgatgccatcctgtactcgagcacgagagacggcggtttgggcatcaccaaattggcaggactgatccccagcgtgcaggcccgtagactgcatcggatcgcacagtcatctgacgatacgatgaaatgcttcatggaaaaagagaaaatggaacagctgcataagaaattgtggattcaagctggaggggacagagagaacataccctcgatttgggaagcaccaccgtcgagtgaaccaccaaacaacgtgagcacaaattcggaatgggaagcaccgacccagaaagataaatttccaaagccttgcaattggaggaaaaacgaattcaaaaaatggaccaaattggcatcccaaggccgcggaattgtaaattttgaaagagacaaaattagtaaccattggatccaatactacagacgcatacctcacaggaaactcctcactgcactacaactcagggccaacgtttaccccacgagagaatttctagccaggggtagacaagaccaatacatcaaggcgtgtaggcactgcgatgcggacattgaatcctgcgcccacatcatcggcaactgcccagtgacacaggacgcccgaatcaagaggcacaattacatctgcgaactgcttctcgaggaggcgaagaagaaggactgggtagtgttcaaggaaccgcacataagggattccaacaaggaactgtacaaacctgacctgatatttgtgaaggatgcccgtgcacttgtcgtggatgtgacagtacggtatgaagcagccaaatcatcgctggaggaagccgctgcagagaaagtgagaaagtacaaacacctggaaacggaagtaagacatctcacgaatgcaaaggacgttacttttgtgggctttcccctaggagcgcgggggaaatggcaccaagataactttaaacttttgactgagcttggcctctccaaatcgaggcaagtgaaaatggcagagactttttccacagtagcgctcttttcatctgtggacattgtacatatgtttgccagtagggccagaaaatctatggttatgtgataataggctgccttctgcggggcttgccttctggccatgcccttcttctctcccttgcacctgtacctcttggtctttgaataaagcctgagtaggaaggaccggtaaaaaaaaaaaaaaaaaaaaaaaaaaaaaaacgttgactaaaaaaaaaaaaaaaaaaaaaaaaaaaaaaaaaaaaaaaaaaaaaaaaaaaaaaaaaaaaaaaaaaaaaa

SEQ ID NO: 11376 - DNA, 4460 bp, synthetic construct
  source 1..4460: mol_type = other DNA
gaaataagagagaaaagaagagtaagaagaaatataagagaattcgccaccatggctccaaagaagaagcggaaagtctcttgcccgaaacctggccccccggtttcagcaggggcaatgagtttggaaagtggactgaccacccactccgttctcgccatcgaacgtggtcccaattcgttggcaaattccggatcagactttgggggggggggtctggggctaccgttacgcctattgagggtatcggtcggcactcagacctcccgctccgactgggtagacctggtgtcctggagccacccaggacccacgtctaagtcccagcaggttgacctggtgtctttatttcctaaacaccgggttgacctgttatccaaaaacgaccaggtagacctggtggctcaatttttaccatctaaatttccccccaatttggcagaaaatgatttggctttgctggtgaacttagagttctacagatcggatttgcatgtgtatgagtgtgttcataaggctgcacattgggagggattaagtggtttgcctgaggtgtatgaacaacttgcaccacaaccgtgtgtgggagaaactttacattctagcctcccacgagacagtgaactgtttgtgcctgaagaggggagcagcgagaaggagagcgaggacgcgccaaaaacatctcctccgacgcctgggaaacatggtttggaacagactggggaggaaaaagtgatggtgactgttcctgacaaaaatccaccttgtccttgctgtggtacccgggtaaactctgtgttgaatctgattgaacatctgaaagtgtcacacgggaaaaggggggtttgttttcggtgtgcaaaatgtggaaaggaaaatagtaactatcacagtgttgtttgtcattttaagaaatgcaggggtccagagacggagaaagccccagctggggagtggatttgtgaggtatgcaacagagattttacaaccaaaattggcctgggacaacacaagagattggcacacccagcagtgagaaatcaggaaaggatcgttgcttcccaaccgaaagaaacatcaaatagaggtgctcacaaaaggtgctggacaaaggaggaggaagaattactaataagactggaggctcagttcgagggaaacaaaaatattaataagcttattgcagaacacataaccaccaaaacagctaagcagatcagtgacaaaaggcgattgctgtccagaaagccagcagaggagccacgtgaggagcctggaacgtgtcatcacaccaggagagcagctgcgagcctgagaacggagcctgagatgagtcatcacgcccaggcagaggacagagataatggacctgggagacgccctctgccaggcagggcagctgccggagggagaacaatggacgagataagacgccaccctgataagggcaacggacagcagagacccaccaagcaaaaatcagaagaacagctgcaggcttactataaaaagacactagaggaacgactttcagctggggcacttaacaccttcccccgagcattcaagcaggtaatggaaggccgggatataaagctagtaatcaatcagacagcgcaggactgcttcggatgcctggaatccataagccaaataagaacggcaacccgagataaaaaggacacggtgacccgggagaaacacccaaagaaaccttttcagaagtggatgaagaagagagcaatcaaaaaaggtaattatcttcggttccagcgtttattttatcttgatagagggaaactggctaaaatcattttagatgatattgaatgcttgtcttgtgacataccactcagtgaaatttattcggtttttaaaacaagatgggaaacaactggtagctttaaaagccttggggactttaaaacttacgggaaggctgacaacactgccttcagagaattaattacggctaaagaaattgagaaaaatgtgcaggaaatgagcaaaggctcggctcccggtccagacgggattactcttggggacgtcgtaaagatggatcccgagttttcccggaccatggagattttcaatttatggttaacaactggtaaaatcccggacatggtgagggggtgcagaaccgttttgattccaaaatcatcaaagccggatcgtttgaaagacattaataactggagacctatcacgatcggttccatcttgctgagactgttctccaggattgtaacagctaggctgagcaaagcgtgccccctgaacccaaggcaaagaggctttatcagagcggcgggatgctctgaaaacttaaaactcctgcaaactataatttggtcggccaaaagagaacacagaccactgggtgttgtattcgtggacatcgccaaggcttttgacaccgtaagccaccagcacatcattcatgctttgcagcaaagagaggtggatccccacatcgtcggtctggtgagcaatatgtacgagaacatcagtacgtatatcaccacaaagaggaacacacacacagacaaaatccagatccgggttggagtaaagcagggtgacccgatgtcgccccttttatttaacctggcaatggaccctctattatgcaagctggaagagagtggcaaaggataccaccgaggacagagcagcatcacagcgatggcatttgcagacgatctggttttgctgagcgactcctgggaaaatatgaatacaaatattagcatactggagaccttctgcaatctgaccggactcaaaacacaggggcaaaagtgccacggcttttacatcaagccgacaaaggactcttacaccatcaatgactgcgctgcctggactatcaacggcacacccctgaacatgatcgaccccggcgaatctgagaaatacctcggcctgcagtttgacccgtggattggaatagcaaggtccggtctctccacaaaactagatttttggcttcagcggatcgatcaagcaccacttaaacctctgcagaaaactgatattctcaaaacatacaccatccctcggctgatctacatagctgaccactcagaagtgaaaagcgcactactcgaaacccttgaccagaagatccggacagcggtcaaggaatggcttcacctacctccgtgcacctgcgatgccatcctgtactcgagcacgagagacggcggtttgggcatcaccaaattggcaggactgatccccagcgtgcaggcccgtagactgcatcggatcgcacagtcatctgacgatacgatgaaatgcttcatggaaaaagagaaaatggaacagctgcataagaaattgtggattcaagctggaggggacagagagaacataccctcgatttgggaagcaccaccgtcgagtgaaccaccaaacaacgtgagcacaaattcggaatgggaagcaccgacccagaaagataaatttccaaagccttgcaattggaggaaaaacgaattcaaaaaatggaccaaattggcatcccaaggccgcggaattgtaaattttgaaagagacaaaattagtaaccattggatccaatactacagacgcatacctcacaggaaactcctcactgcactacaactcagggccaacgtttaccccacgagagaatttctagccaggggtagacaagaccaatacatcaaggcgtgtaggcactgcgatgcggacaacgaatcctgcgcccacatcatcggcaactgcccagtgacacaggacgcccgaatcaagaggcacaattacatctgcgaactgcttctcgaggaggcgaagaagaaggactgggtagtgttcaaggaaccgcacataagggattccaacaaggaactgtacaaacctgacctgatatttgtgaaggatgggcgtgcacttgtcgtggatgtgacagtacggtatgaagcagccaaatcatcgctggaggaagccgctgcagagaaagtgagaaagtacaaacacctggaaacggaagtaagacatctcacgaatgcaaaggacgttacttttgtgggctttcccctaggagcgcgggggaaatggcaccaagataactttaaacttttgactgagcttggcctctccaaatcgaggcaagtgaaaatggcagagactttttccacagtagcgctcttttcatctgtggacattgtacatatgtttgccagtagggccagaaaatctatggttatgtgataataggctgccttctgcggggcttgccttctggccatgcccttcttctctcccttgcacctgtacctcttggtctttgaataaagcctgagtaggaaggaccggtaaaaaaaaaaaaaaaaaaaaaaaaaaaaaaacgttgactaaaaaaaaaaaaaaaaaaaaaaaaaaaaaaaaaaaaaaaaaaaaaaaaaaaaaaaaaaaaaaaaaaaaaa

SEQ ID NO: 11377 - DNA, 4603 bp, synthetic construct; identical to SEQ ID NO: 10234
  source 1..4603: mol_type = other DNA

SEQ ID NO: 11378 - DNA, 4439 bp, synthetic construct
  source 1..4439: mol_type = other DNA
gaaataagagagaaaagaagagtaagaagaaatataagagaattcgccaccatggcttcttgcccgaaacctggccccccggtttcagcaggggcaatgagtttggaaagtggactgaccacccactccgttctcgccatcgaacgtggtcccaattcgttggcaaattccggatcagactttgggggggggggtctggggctaccgttacgcctattgagggtatcggtcggcactcagacctcccgctccgactgggtagacctggtgtcctggagccacccaggacccacgtctaagtcccagcaggttgacctggtgtctttatttcctaaacaccgggttgacctgttatccaaaaacgaccaggtagacctggtggctcaatttttaccatctaaatttccccccaatttggcagaaaatgatttggctttgctggtgaacttagagttctacagatcggatttgcatgtgtatgagtgtgttcataaggctgcacattgggagggattaagtggtttgcctgaggtgtatgaacaacttgcaccacaaccgtgtgtgggagaaactttacattctagcctcccacgagacagtgaactgtttgtgcctgaagaggggagcagcgagaaggagagcgaggacgcgccaaaaacatctcctccgacgcctgggaaacatggtttggaacagactggggaggaaaaagtgatggtgactgttcctgacaaaaatccaccttgtccttgctgtggtacccgggtaaactctgtgttgaatctgattgaacatctgaaagtgtcacacgggaaaaggggggtttgttttcggtgtgcaaaatgtggaaaggaaaatagtaactatcacagtgttgtttgtcattttaagaaatgcaggggtccagagacggagaaagccccagctggggagtggatttgtgaggtatgcaacagagattttacaaccaaaattggcctgggacaacacaagagattggcacacccagcagtgagaaatcaggaaaggatcgttgcttcccaaccgaaagaaacatcaaatagaggtgctcacaaaaggtgctggacaaaggaggaggaagaattactaataagactggaggctcagttcgagggaaacaaaaatattaataagcttattgcagaacacataaccaccaaaacagctaagcagatcagtgacaaaaggcgattgctgtccagaaagccagcagaggagccacgtgaggagcctggaacgtgtcatcacaccaggagagcagctgcgagcctgagaacggagcctgagatgagtcatcacgcccaggcagaggacagagataatggacctgggagacgccctctgccaggcagggcagctgccggagggagaacaatggacgagataagacgccaccctgataagggcaacggacagcagagacccaccaagcaaaaatcagaagaacagctgcaggcttactataaaaagacactagaggaacgactttcagctggggcacttaacaccttcccccgagcattcaagcaggtaatggaaggccgggatataaagctagtaatcaatcagacagcgcaggactgcttcggatgcctggaatccataagccaaataagaacggcaacccgagataaaaaggacacggtgacccgggagaaacacccaaagaaaccttttcagaagtggatgaagaagagagcaatcaaaaaaggtaattatcttcggttccagcgtttattttatcttgatagagggaaactggctaaaatcattttagatgatattgaatgcttgtcttgtgacataccactcagtgaaatttattcggtttttaaaacaagatgggaaacaactggtagctttaaaagccttggggactttaaaacttacgggaaggctgacaacactgccttcagagaattaattacggctaaagaaattgagaaaaatgtgcaggaaatgagcaaaggctcggctcccggtccagacgggattactcttggggacgtcgtaaagatggatcccgagttttcccggaccatggagattttcaatttatggttaacaactggtaaaatcccggacatggtgagggggtgcagaaccgttttgattccaaaatcatcaaagccggatcgtttgaaagacattaataactggagacctatcacgatcggttccatcttgctgagactgttctccaggattgtaacagctaggctgagcaaagcgtgccccctgaacccaaggcaaagaggctttatcagagcggcgggatgctctgaaaacttaaaactcctgcaaactataatttggtcggccaaaagagaacacagaccactgggtgttgtattcgtggacatcgccaaggcttttgacaccgtaagccaccagcacatcattcatgctttgcagcaaagagaggtggatccccacatcgtcggtctggtgagcaatatgtacgagaacatcagtacgtatatcaccacaaagaggaacacacacacagacaaaatccagatccgggttggagtaaagcagggtgacccgatgtcgccccttttatttaacctggcaatggaccctctattatgcaagctggaagagagtggcaaaggataccaccgaggacagagcagcatcacagcgatggcatttgcagacgatctggttttgctgagcgactcctgggaaaatatgaatacaaatattagcatactggagaccttctgcaatctgaccggactcaaaacacaggggcaaaagtgccacggcttttacatcaagccgacaaaggactcttacaccatcaatgactgcgctgcctggactatcaacggcacacccctgaacatgatcgaccccggcgaatctgagaaatacctcggcctgcagtttgacccgtggattggaatagcaaggtccggtctctccacaaaactagatttttggcttcagcggatcgatcaagcaccacttaaacctctgcagaaaactgatattctcaaaacatacaccatccctcggctgatctacatagctgaccactcagaagtgaaaagcgcactactcgaaacccttgaccagaagatccggacagcggtcaaggaatggcttcacctacctccgtgcacctgcgatgccatcctgtactcgagcacgagagacggcggtttgggcatcaccaaattggcaggactgatccccagcgtgcaggcccgtagactgcatcggatcgcacagtcatctgacgatacgatgaaatgcttcatggaaaaagagaaaatggaacagctgcataagaaattgtggattcaagctggaggggacagagagaacataccctcgatttgggaagcaccaccgtcgagtgaaccaccaaacaacgtgagcacaaattcggaatgggaagcaccgacccagaaagataaatttccaaagccttgcaattggaggaaaaacgaattcaaaaaatggaccaaattggcatcccaaggccgcggaattgtaaattttgaaagagacaaaattagtaaccattggatccaatactacagacgcatacctcacaggaaactcctcactgcactacaactcagggccaacgtttaccccacgagagaatttctagccaggggtagacaagaccaatacatcaaggcgtgtaggcactgcgatgcggacaacgaatcctgcgcccacatcatcggcaactgcccagtgacacaggacgcccgaatcaagaggcacaattacatctgcgaactgcttctcgaggaggcgaagaagaaggactgggtagtgttcaaggaaccgcacataagggattccaacaaggaactgtacaaacctgacctgatatttgtgaaggatgggcgtgcacttgtcgtggatgtgacagtacggtatgaagcagccaaatcatcgctggaggaagccgctgcagagaaagtgagaaagtacaaacacctggaaacggaagtaagacatctcacgaatgcaaaggacgttacttttgtgggctttcccctaggagcgcgggggaaatggcaccaagataactttaaacttttgactgagcttggcctctccaaatcgaggcaagtgaaaatggcagagactttttccacagtagcgctcttttcatctgtggacattgtacatatgtttgccagtagggccagaaaatctatggttatgtgataataggctgccttctgcggggcttgccttctggccatgcccttcttctctcccttgcacctgtacctcttggtctttgaataaagcctgagtaggaaggaccggtaaaaaaaaaaaaaaaaaaaaaaaaaaaaaaacgttgactaaaaaaaaaaaaaaaaaaaaaaaaaaaaaaaaaaaaaaaaaaaaaaaaaaaaaaaaaaaaaaaaaaaaaa

SEQ ID NO: 11379 - DNA, 5083 bp, synthetic construct; identical to SEQ ID NO: 10258
  source 1..5083: mol_type = other DNA

SEQ ID NO: 11380 - DNA, 4564 bp, synthetic construct
  source 1..4564: mol_type = other DNA
ggtctagttacaactgggcatcgctgcagagatcgcacctcctcgtggtcccgctggtagcccttcgaagggtgactaagtcgatctctgccccaggtacggagccgttgggactcaccagtccaacgtaactcctgcctaaattcggtgaaacaaattcctcggtaaaaagccccatggcttcttgcccgaaacctggccccccggtttcagcaggggcaatgagtttggaaagtggactgaccacccactccgttctcgccatcgaacgtggtcccaattcgttggcaaattccggatcagactttgggggggggggtctggggctaccgttacgcctattgagggtatcggtcggcactcagacctcccgctccgactgggtagacctggtgtcctggagccacccaggacccacgtctaagtcccagcaggttgacctggtgtctttatttcctaaacaccgggttgacctgttatccaaaaacgaccaggtagacctggtggctcaatttttaccatctaaatttccccccaatttggcagaaaatgatttggctttgctggtgaacttagagttctacagatcggatttgcatgtgtatgagtgtgttcataaggctgcacattgggagggattaagtggtttgcctgaggtgtatgaacaacttgcaccacaaccgtgtgtgggagaaactttacattctagcctcccacgagacagtgaactgtttgtgcctgaagaggggagcagcgagaaggagagcgaggacgcgccaaaaacatctcctccgacgcctgggaaacatggtttggaacagactggggaggaaaaagtgatggtgactgttcctgacaaaaatccaccttgtccttgctgtggtacccgggtaaactctgtgttgaatctgattgaacatctgaaagtgtcacacgggaaaaggggggtttgttttcggtgtgcaaaatgtggaaaggaaaatagtaactatcacagtgttgtttgtcattttaagaaatgcaggggtccagagacggagaaagccccagctggggagtggatttgtgaggtatgcaacagagattttacaaccaaaattggcctgggacaacacaagagattggcacacccagcagtgagaaatcaggaaaggatcgttgcttcccaaccgaaagaaacatcaaatagaggtgctcacaaaaggtgctggacaaaggaggaggaagaattactaataagactggaggctcagttcgagggaaacaaaaatattaataagcttattgcagaacacataaccaccaaaacagctaagcagatcagtgacaaaaggcgattgctgtccagaaagccagcagaggagccacgtgaggagcctggaacgtgtcatcacaccaggagagcagctgcgagcctgagaacggagcctgagatgagtcatcacgcccaggcagaggacagagataatggacctgggagacgccctctgccaggcagggcagctgccggagggagaacaatggacgagataagacgccaccctgataagggcaacggacagcagagacccaccaagcaaaaatcagaagaacagctgcaggcttactataaaaagacactagaggaacgactttcagctggggcacttaacaccttcccccgagcattcaagcaggtaatggaaggccgggatataaagctagtaatcaatcagacagcgcaggactgcttcggatgcctggaatccataagccaaataagaacggcaacccgagataaaaaggacacggtgacccgggagaaacacccaaagaaaccttttcagaagtggatgaagaagagagcaatcaaaaaaggtaattatcttcggttccagcgtttattttatcttgatagagggaaactggctaaaatcattttagatgatattgaatgcttgtcttgtgacataccactcagtgaaatttattcggtttttaaaacaagatgggaaacaactggtagctttaaaagccttggggactttaaaacttacgggaaggctgacaacactgccttcagagaattaattacggctaaagaaattgagaaaaatgtgcaggaaatgagcaaaggctcggctcccggtccagacgggattactcttggggacgtcgtaaagatggatcccgagttttcccggaccatggagattttcaatttatggttaacaactggtaaaatcccggacatggtgagggggtgcagaaccgttttgattccaaaatcatcaaagccggatcgtttgaaagacattaataactggagacctatcacgatcggttccatcttgctgagactgttctccaggattgtaacagctaggctgagcaaagcgtgccccctgaacccaaggcaaagaggctttatcagagcggcgggatgctctgaaaacttaaaactcctgcaaactataatttggtcggccaaaagagaacacagaccactgggtgttgtattcgtggacatcgccaaggcttttgacaccgtaagccaccagcacatcattcatgctttgcagcaaagagaggtggatccccacatcgtcggtctggtgagcaatatgtacgagaacatcagtacgtatatcaccacaaagaggaacacacacacagacaaaatccagatccgggttggagtaaagcagggtgacccgatgtcgccccttttatttaacctggcaatggaccctctattatgcaagctggaagagagtggcaaaggataccaccgaggacagagcagcatcacagcgatggcatttgcagacgatctggttttgctgagcgactcctgggaaaatatgaatacaaatattagcatactggagaccttctgcaatctgaccggactcaaaacacaggggcaaaagtgccacggcttttacatcaagccgacaaaggactcttacaccatcaatgactgcgctgcctggactatcaacggcacacccctgaacatgatcgaccccggcgaatctgagaaatacctcggcctgcagtttgacccgtggattggaatagcaaggtccggtctctccacaaaactagatttttggcttcagcggatcgatcaagcaccacttaaacctctgcagaaaactgatattctcaaaacatacaccatccctcggctgatctacatagctgaccactcagaagtgaaaactgcactactcgaaacccttgaccagaagatccggacagcggtcaaggaatggcttcacctacctccgtgcacctgcgatgccatcctgtactcgagcacgagagacggcggtttgggcatcaccaaattggcaggactgatccccagcgtgcaggcccgtagactgcatcggatcgcacagtcatctgacgatacgatgaaatgcttcatggaaaaagagaaaatggaacagctgcataagaaattgtggattcaagctggaggggacagagagaacataccctcgatttgggaagcaccaccgtcgagtgaaccaccaaacaacgtgagcacaaattcggaatgggaagcaccgacccagaaagataaatttccaaagccttgcaattggaggaaaaacgaattcaaaaaatggaccaaattggcatcccaaggccgcggaattgtaaattttgaaagagacaaaattagtaaccattggatccaatactacagacgcatacctcacaggaaactcctcactgcactacaactcagggccaacgtttaccccacgagagaatttctagccaggggtagacaagaccaatacatcaaggcgtgtaggcactgcgatgcggacattgaatcctgcgcccacatcatcggcaactgcccagtgacacaggacgcccgaatcaagaggcacaattacatctgcgaactgcttctcgaggaggcgaagaagaaggactgggtagtgttcaaggaaccgcacataagggattccaacaaggaactgtacaaacctgacctgatatttgtgaaggatgcccgtgcacttgtcgtggatgtgacagtacggtatgaagcagccaaatcatcgctggaggaagccgctgcagagaaagtgagaaagtacaaacacctggaaacggaagtaagacatctcacgaatgcaaaggacgttacttttgtgggctttcccctaggagcgcgggggaaatggcaccaagataactttaaacttttgactgagcttggcctctccaaatcgaggcaagtgaaaatggcagagactttttccacagtagcgctcttttcatctgtggacattgtacatatgtttgccagtagggccagaaaatctatggttatgtgataataggctgccttctgcggggcttgccttctggccatgcccttcttctctcccttgcacctgtacctcttggtctttgaataaagcctgagtaggaaggaccggtaaaaaaaaaaaaaaaaaaaaaaaaaaaaaaacgttgactaaaaaaaaaaaaaaaaaaaaaaaaaaaaaaaaaaaaaaaaaaaaaaaaaaaaaaaaaaaaaaaaaaaaaa

SEQ ID NO: 11381 - DNA, 4564 bp, synthetic construct
  source 1..4564: mol_type = other DNA
ggtctagttacaactgggcatcgctgcagagatcgcacctcctcgtggtcccgctggtagcccttcgaagggtgactaagtcgatctctgccccaggtacggagccgttgggactcaccagtccaacgtaactcctgcctaaattcggtgaaacaaattcctcggtaaaaagccccatggcttcttgcccgaaacctggccccccggtttcagcaggggcaatgagtttggaaagtggactgaccacccactccgttctcgccatcgaacgtggtcccaattcgttggcaaattccggatcagactttgggggggggggtctggggctaccgttacgcctattgagggtatcggtcggcactcagacctcccgctccgactgggtagacctggtgtcctggagccacccaggacccacgtctaagtcccagcaggttgacctggtgtctttatttcctaaacaccgggttgacctgttatccaaaaacgaccaggtagacctggtggctcaatttttaccatctaaatttccccccaatttggcagaaaatgatttggctttgctggtgaacttagagttctacagatcggatttgcatgtgtatgagtgtgttcataaggctgcacattgggagggattaagtggtttgcctgaggtgtatgaacaacttgcaccacaaccgtgtgtgggagaaactttacattctagcctcccacgagacagtgaactgtttgtgcctgaagaggggagcagcgagaaggagagcgaggacgcgccaaaaacatctcctccgacgcctgggaaacatggtttggaacagactggggaggaaaaagtgatggtgactgttcctgacaaaaatccaccttgtccttgctgtggtacccgggtaaactctgtgttgaatctgattgaacatctgaaagtgtcacacgggaaaaggggggtttgttttcggtgtgcaaaatgtggaaaggaaaatagtaactatcacagtgttgtttgtcattttaagaaatgcaggggtccagagacggagaaagccccagctggggagtggatttgtgaggtatgcaacagagattttacaaccaaaattggcctgggacaacacaagagattggcacacccagcagtgagaaatcaggaaaggatcgttgcttcccaaccgaaagaaacatcaaatagaggtgctcacaaaaggtgctggacaaaggaggaggaagaattactaataagactggaggctcagttcgagggaaacaaaaatattaataagcttattgcagaacacataaccaccaaaacagctaagcagatcagtgacaaaaggcgattgctgtccagaaagccagcagaggagccacgtgaggagcctggaacgtgtcatcacaccaggagagcagctgcgagcctgagaacggagcctgagatgagtcatcacgcccaggcagaggacagagataatggacctgggagacgccctctgccaggcagggcagctgccggagggagaacaatggacgagataagacgccaccctgataagggcaacggacagcagagacccaccaagcaaaaatcagaagaacagctgcaggcttactataaaaagacactagaggaacgactttcagctggggcacttaacaccttcccccgagcattcaagcaggtaatggaaggccgggatataaagctagtaatcaatcagacagcgcaggactgcttcggatgcctggaatccataagccaaataagaacggcaacccgagataaaaaggacacggtgacccgggagaaacacccaaagaaaccttttcagaagtggatgaagaagagagcaatcaaaaaaggtaattatcttcggttccagcgtttattttatcttgatagagggaaactggctaaaatcattttagatgatattgaatgcttgtcttgtgacataccactcagtgaaatttattcggtttttaaaacaagatgggaaacaactggtagctttaaaagccttggggactttaaaacttacgggaaggctgacaacactgccttcagagaattaattacggctaaagaaattgagaaaaatgtgcaggaaatgagcaaaggctcggctcccggtccagacgggattactcttggggacgtcgtaaagatggatcccgagggctcccggaccatggagattttcaatttatggttaacaactggtaaaatcccggacatggtgagggggtgcagaaccgttttgattccaaaatcatcagacccggatcgtttgaaagacattaataactggagacctatcacgatcggttccatcttgctgagactgttctccaggattgtaacagctaggctgagcaaagcgtgccccctgaacccaaggcaaagaggctttatcagagcggcgggatgctctgaaaacttaaaactcctgcaaactataatttggtcggccaaaagagaacacagaccactgggtgttgtattcgtggacatcgccaaggcttttgacaccgtaagccaccagcacatcattcatgctttgcagcaaagagaggtggatccccacatcgtcggtctggtgagcaatatgtacgagaacatcagtacgtatatcaccacaaagaggaacacacacacagacaaaatccagatccgggttggagtaaagcagggtgacccgatgtcgccccttttatttaacctggcaatggaccctctattatgcaagctggaagagagtggcaaaggataccaccgaggacagagcagcatcacagcgatggcatttgcagacgatctggttttgctgagcgactcctgggaaaatatgaatacaaatattagcatactggagaccttctgcaatctgaccggactcaaaacacaggggcaaaagtgccacggcttttacatcaagccgacaaaggactcttacaccatcaatgactgcgctgcctggactatcaacggcacacccctgaacatgatcgaccccggcgaatctgagaaatacctcggcctgcagtttgacccgtggattggaatagcaaggtccggtctctccacaaaactagatttttggcttcagcggatcgatcaagcaccacttaaacctctgcagaaaactgatattctcaaaacatacaccatccctcggctgatctacatagctgaccactcagaagtgaaaactgcactactcgaaacccttgaccagaagatccggacagcggtcaaggaatggcttcacctacctccgtgcacctgcgatgccatcctgtactcgagcacgagagacggcggtttgggcatcaccaaattggcaggactgatccccagcgtgcaggcccgtagactgcatcggatcgcacagtcatctgacgatacgatgaaatgcttcatggaaaaagagaaaatggaacagctgcataagaaattgtggattcaagctggaggggacagagagaacataccctcgatttgggaagcaccaccgtcgagtgaaccaccaaacaacgtgagcacaaattcggaatgggaagcaccgacccagaaagataaatttccaaagccttgcaattggaggaaaaacgaattcaaaaaatggaccaaattggcatcccaaggccgcggaattgtaaattttgaaagagacaaaattagtaaccattggatccaatactacagacgcatacctcacaggaaactcctcactgcactacaactcagggccaacgtttaccccacgagagaatttctagccaggggtagacaagaccaatacatcaaggcgtgtaggcactgcgatgcggacattgaatcctgcgcccacatcatcggcaactgcccagtgacacaggacgcccgaatcaagaggcacaattacatctgcgaactgcttctcgaggaggcgaagaagaaggactgggtagtgttcaaggaaccgcacataagggattccaacaaggaactgtacaaacctgacctgatatttgtgaaggatgcccgtgcacttgtcgtggatgtgacagtacggtatgaagcagccaaatcatcgctggaggaagccgctgcagagaaagtgagaaagtacaaacacctggaaacggaagtaagacatctcacgaatgcaaaggacgttacttttgtgggctttcccctaggagcgcgggggaaatggcaccaagataactttaaacttttgactgagcttggcctctccaaatcgaggcaagtgaaaatggcagagactttttccacagtagcgctcttttcatctgtggacattgtacatatgtttgccagtagggccagaaaatctatggttatgtgataataggctgccttctgcggggcttgccttctggccatgcccttcttctctcccttgcacctgtacctcttggtctttgaataaagcctgagtaggaaggaccggtaaaaaaaaaaaaaaaaaaaaaaaaaaaaaaacgttgactaaaaaaaaaaaaaaaaaaaaaaaaaaaaaaaaaaaaaaaaaaaaaaaaaaaaaaaaaaaaaaaaaaaaaa

SEQ ID NO: 11382 - DNA, 4439 bp, synthetic construct
  source 1..4439: mol_type = other DNA
gaaataagagagaaaagaagagtaagaagaaatataagagaattcgccaccatggcttcttgcccgaaacctggccccccggtttcagcaggggcaatgagtttggaaagtggactgaccacccactccgttctcgccatcgaacgtggtcccaattcgttggcaaattccggatcagactttgggggggggggtctggggctaccgttacgcctattgagggtatcggtcggcactcagacctcccgctccgactgggtagacctggtgtcctggagccacccaggacccacgtctaagtcccagcaggttgacctggtgtctttatttcctaaacaccgggttgacctgttatccaaaaacgaccaggtagacctggtggctcaatttttaccatctaaatttccccccaatttggcagaaaatgatttggctttgctggtgaacttagagttctacagatcggatttgcatgtgtatgagggcgttcattttgctgcacattgggagggattaagtggtttgcctgaggtgtatgaacaacttgcaccacaaccgtgtgtgggagaaactttacattctagcctcccacgagacagtgaactgtttgtgcctgaagaggggagcagcgagaaggagagcgaggacgcgccaaaaacatctcctccgacgcctgggaaacatggtttggaacagactggggaggaaaaagtgatggtgactgttcctgacaaaaatccaccttgtccttgctgtggtacccgggtaaactctgtgttgaatctgattgaacatctgaaagtgtcacacgggaaaaggggggtttgttttcggtgtgcaaaatgtggaaaggaaaatagtaactatcacagtgttgtttgtcattttaagaaatgcaggggtccagagacggagaaagccccagctggggagtggatttgtgaggtatgcaacagagattttacaaccaaaattggcctgggacaacacaagagattggcacacccagcagtgagaaatcaggaaaggatcgttgcttcccaaccgaaagaaacatcaaatagaggtgctcacaaaaggtgctggacaaaggaggaggaagaattactaataagactggaggctcagttcgagggaaacaaaaatattaataagcttattgcagaacacataaccaccaaaacagctaagcagatcagtgacaaaaggcgattgctgtccagaaagccagcagaggagccacgtgaggagcctggaacgtgtcatcacaccaggagagcagctgcgagcctgagaacggagcctgagatgagtcatcacgcccaggcagaggacagagataatggacctgggagacgccctctgccaggcagggcagctgccggagggagaacaatggacgagataagacgccaccctgataagggcaacggacagcagagacccaccaagcaaaaatcagaagaacagctgcaggcttactataaaaagacactagaggaacgactttcagctggggcacttaacaccttcccccgagcattcaagcaggtaatggaaggccgggatataaagctagtaatcaatcagacagcgcaggactgcttcggatgcctggaatccataagccaaataagaacggcaacccgagataaaaaggacacggtgacccgggagaaacacccaaagaaaccttttcagaagtggatgaagaagagagcaatcaaaaaaggtaattatcttcggttccagcgtttattttatcttgatagagggaaactggctaaaatcattttagatgatattgaatgcttgtcttgtgacataccactcagtgaaatttattcggtttttaaaacaagatgggaaacaactggtagctttaaaagccttggggactttaaaacttacgggaaggctgacaacactgccttcagagaattaattacggctaaagaaattctgaaaaatgtgcaggaaatgagcaaaggctcggctcccggtccagacgggattactcttggggacgtcgtaaagatggatcccgagggctcccggaccatggagattttcaatttatggttaacaactggtaaaatcccggacatggtgagggggtgcagaaccgttttgattccaaaatcatcaaagccggatcgtttgaaagacattaataactggagacctatcacgatcggttccatcttgctgagactgttctccaggattgtaacagctaggctgagcaaagcgtgccccctgaacccaaggcaaagaggctttatcagagcggcgggatgctctgaaaacttaaaactcctgcaaactataatttggtcggccaaaagagaacacagaccactgggtgttgtattcgtggacatcgccaaggcttttgacaccgtaagccaccagcacatcattcatgctttgcagcaaagagaggtggatccccacatcgtcggtctggtgagcaatatgtacgagaacatcagtacgtatatcaccacaaagaggaacacacacacagacaaaatccagatccgggttggagtaaagcagggtgacccgatgtcgccccttttatttaacctggcaatggaccctctattatgcaagctggaagagagtggcaaaggataccaccgaggacagagcagcatcacagcgatggcatttgcagacgatctggttttgctgagcgactcctgggaaaatatgaatacaaatattagcatactggagaccttctgcaatctgaccggactcaaaacacaggggcaaaagtgccacggcttttacatcaagccgacaaaggactcttacaccatcaatgactgcgctgcctggactatcaacggcacacccctgaacatgatcgaccccggcgaatctgagaaatacctcggcctgcagtttgacccgtggattggaatagcaaggtccggtctctccacaaaactagatttttggcttcagcggatcgatcaagcaccacttaaacctctgcagaaaactgatattctcaaaacatacaccatccctcggctgatctacatagctgaccactcagaagtgaaaagcgcactactcgaaacccttgaccagaagatccggacagcggtcaaggaatggcttcacctacctccgtgcacctgcgatgccatcctgtactcgagcacgagagacggcggtttgggcatcaccaaattggcaggactgatccccagcgtgcaggcccgtagactgcatcggatcgcacagtcatctgacgatacgatgaaatgcttcatggaaaaagagaaaatggaacagctgcataagaaattgtggattcaagctggaggggacagagagaacataccctcgatttgggaagcaccaccgtcgagtgaaccaccaaacaacgtgagcacaaattcggaatgggaagcaccgacccagaaagataaatttccaaagccttgcaattggaggaaaaacgaattcaaaaaatggaccaaattggcatcccaaggccgcggaattgtaaattttgaaagagacaaaattagtaaccattggatccaatactacagacgcatacctcacaggaaactcctcactgcactacaactcagggccaacgtttaccccacgagagaatttctagccaggggtagacaagaccaatacatcaaggcgtgtaggcactgcgatgcggacaacgaatcctgcgcccacatcatcggcaactgcccagtgacacaggacgcccgaatcaagaggcacaataagatctgcgaactgcttctcgaggaggcgaagaagaaggactgggtagtgttcaaggaaccgcacataagggattccaacaaggaactgtacaaacctgacctgatatttgtgaaggatgcccgtgcacttgtcgtggatgtgacagtacggtatgaagcagccaaatcatcgctggaggaagccgctgcagagaaagtgagaaagtacaaacacctggaaacggaagtaagacatctcacgaatgcaaaggacgttacttttgtgggctttcccctaggagcgcgggggaaatggcaccaagataactttaaacttttgactgagcttggcctctccaaatcgaggcaagtgaaaatggcagagactttttccacagtagcgctcttttcatctgtggacattgtacatatgtttgccagtagggccagaaaatctatggttatgtgataataggctgccttctgcggggcttgccttctggccatgcccttcttctctcccttgcacctgtacctcttggtctttgaataaagcctgagtaggaaggaccggtaaaaaaaaaaaaaaaaaaaaaaaaaaaaaaacgttgactaaaaaaaaaaaaaaaaaaaaaaaaaaaaaaaaaaaaaaaaaaaaaaaaaaaaaaaaaaaaaaaaaaaaaa

SEQ ID NO: 11383 - DNA, 4703 bp, synthetic construct
  source 1..4703: mol_type = other DNA
ggtctagttacaactgggcatcgctgcagagatcgcacctcctcgtggtcccgctggtagcccttcgaagggtgactaagtcgatctctgccccaggtacggagccgttgggactcaccagtccaacgtaactcctgcctaaattcggtgaaacaaattcctcggtaaaaagccccatggcttcttgcccgaaacctggccccccggtttcagcaggggcaatgagtttggaaagtggactgaccacccactccgttctcgccatcgaacgtggtcccaattcgttggcaaattccggatcagactttgggggggggggtctggggctaccgttacgcctattgagggtatcggtcggcactcagacctcccgctccgactgggtagacctggtgtcctggagccacccaggacccacgtctaagtcccagcaggttgacctggtgtctttatttcctaaacaccgggttgacctgttatccaaaaacgaccaggtagacctggtggctcaatttttaccatctaaatttccccccaatttggcagaaaatgatttggctttgctggtgaacttagagttctacagatcggatttgcatgtgtatgagtgtgttcattttgctgcacattgggagggattaagtggtttgcctgaggtgtatgaacaacttgcaccacaaccgtgtgtgggagaaactttacattctagcctcccacgagacagtgaactgtttgtgcctgaagaggggagcagcgagaaggagagcgaggacgcgccaaaaacatctcctccgacgcctgggaaacatggtttggaacagactggggaggaaaaagtgatggtgactgttcctgacaaaaatccaccttgtccttgctgtggtacccgggtaaactctgtgttgaatctgattgaacatctgaaagtgtcacacgggaaaaggggggtttgttttcggtgtgcaaaatgtggaaaggaaaatagtaactatcacagtgttgtttgtcattttaagaaatgcaggggtccagagacggagaaagccccagctggggagtggatttgtgaggtatgcaacagagattttacaaccaaaattggcctgggacaacacaagagattggcacacccagcagtgagaaatcaggaaaggatcgttgcttcccaaccgaaagaaacatcaaatagaggtgctcacaaaaggtgctggacaaaggaggaggaagaattactaataagactggaggctcagttcgagggaaacaaaaatattaataagcttattgcagaacacataaccaccaaaacagctaagcagatcagtgacaaaaggcgattgctgtccagaaagccagcagaggagccacgtgaggagcctggaacgtgtcatcacaccaggagagcagctgcgagcctgagaacggagcctgagatgagtcatcacgcccaggcagaggacagagataatggacctgggagacgccctctgccaggcagggcagctgccggagggagaacaatggacgagataagacgccaccctgataagggcaacggacagcagagacccaccaagcaaaaatcagaagaacagctgcaggcttactataaaaagacactagaggaacgactttcagctggggcacttaacaccttcccccgagcattcaagcaggtaatggaaggccgggatataaagctagtaatcaatcagacagcgcaggactacttcggatgcctggaatccataagccaaataagaacggcaacccgagataaaaaggacacggtgacccgggagaaacacccaaagaaaccttttcagaagtggatgaagaagagagcaatcaaaaaaggtaattatcttcggttccagcgtttattttatcttgatagagggaaactggctaaaatcattttagatgatattgaatgcttgtcttgtgacataccactcagtgaaatttattcggtttttaaaacaagatgggaaacaactggtagctttaaaagccttggggactttaaaacttacgggaaggctgacaacactgccttcagagaattaattacggctaaagaaattgagaaaaatgtgcaggaaatgagcaaaggctcggctcccggtccagacgggattactcttggggacgtcgtaaagatggatcccgagttttcccggaccatggagattttcaatttatggttaacaactggtaaaatcccggacatggtgagggggtgcagaaccgttttgattccaaaatcatcagacccggatcgtttgaaagacattaataactggagacctatcacgatcggttccatcttgctgagactgttctccaggattgtaacagctaggctgagcaaagcgtgccccctgaacccaaggcaaagaggctttatcagagcggcgggatgctctgaaaacttaaaactcctgcaaactataatttggtcggccaaaagagaacacagaccactgggtgttgtattcgtggacatcgccaaggcttttgacaccgtaagccaccagcacatcattcatgctttgcagcaaagagaggtggatccccacatcgtcggtctggtgagcaatatgtacgagaacatcagtacgtatatcaccacaaagaggaacacacacacagacaaaatccagatccgggttggagtaaagcagggtgacccgatgtcgccccttttatttaacctggcaatggaccctctattatgcaagctggaagagagtggcaaaggataccaccgaggacagagcagcatcacagcgatggcatttgcagacgatctggttttgctgagcgactcctgggaaaatatgaatacaaatattagcatactggagaccttctgcaatctgaccggactcaaaacacaggggcaaaagtgccacggcttttacatcaagccgacaaagaagtcttacaccatcaatgactgcgctgcctggactatcaacggcacacccctgaacatgatcgaccccggcgaatctgagaaatacctcggcctgcagtttgacccgtggattggaatagcaaggtccggtctctccacaaaactagatttttggcttcagcggatcgatcaagcaccacttaaacctctgcagaaaactgatattctcaaaacatacaccatccctcggctgatctacatagctgaccactcagaagtgaaaactgcactactcgaaacccttgaccagaagatccggacagcggtcaaggaatggcttcacctacctccgtgcacctgcgatgccatcctgtactcgagcacgagagacggcggtttgggcatcaccaaattggcaggactgatccccagcgtgcaggcccgtagactgcatcggatcgcacagtcatctgacgatacgatgaaatgcttcatggaaaaagagaaaatggaacagctgcataagaaattgtggattcaagctggaggggacagagagaacataccctcgatttgggaagcaccaccgtcgagtgaaccaccaaacaacgtgagcacaaattcggaatgggaagcaccgacccagaaagataaatttccaaagccttgcaattggaggaaaaacgaattcaaaaaatggaccaaattggcatcccaaggccgcggaattgtaaattttgaaagagacaaaattagtaaccattggatccaatactacagacgcatacctcacaggaaactcctcactgcactacaactcagggccaacgtttaccccacgagagaatttctagccaggggtagacaagaccaatacatcaaggcgtgtaggcactgcgatgcggacattgaatcctgcgcccacatcatcggcaactgcccagtgacacaggacgcccgaatcaagaggcacaattacatctgcgaactgcttctcgaggaggcgaagaagaaggactgggtagtgttcaaggaaccgcacataagggattccaacaaggaactgtacaaacctgacctgatatttgtgaaggatgcccgtgcacttgtcgtggatgtgacagtacggtatgaagcagccaaatcatcgctggaggaagccgctgcagagaaagtgagaaagtacaaacacctggaaacggaagtaagacatctcacgaatgcaaaggacgttacttttgtgggctttcccctaggagcgcgggggaaatggcaccaagataactttaaacttttgactgagcttggcctctccaaatcgaggcaagtgaaaatggcagagactttttccacagtagcgctcttttcatctgtggacattgtacatatgtttgccagtagggccagaaaatctatggttatgtgataataggctgccttctgcggggcttgccttctggccatgcccttcttctctcccttgcacctgtacctcttggtctttgaataaagcctgagtaggaaggaccggtagacatgataagatacattgatgagtttggacaaaccacaactagaatgcagtgaaaaaaatgctttatttgtgaaatttgtgatgctattgctttatttgtaaccattataagctgcaataaacaagttaacaacaacaaaaaaaaaaaaaaaaaaaaaaaaaaaaaaacgttgactaaaaaaaaaaaaaaaaaaaaaaaaaaaaaaaaaaaaaaaaaaaaaaaaaaaaaaaaaaaaaaaaaaaaaa

SEQ ID NO: 11384 - DNA, 4703 bp, synthetic construct
  source 1..4703: mol_type = other DNA
ggtctagttacaactgggcatcgctgcagagatcgcacctcctcgtggtcccgctggtagcccttcgaagggtgactaagtcgatctctgccccaggtacggagccgttgggactcaccagtccaacgtaactcctgcctaaattcggtgaaacaaattcctcggtaaaaagccccatggcttcttgcccgaaacctggccccccggtttcagcaggggcaatgagtttggaaagtggactgaccacccactccgttctcgccatcgaacgtggtcccaattcgttggcaaattccggatcagactttgggggggggggtctggggctaccgttacgcctattgagggtatcggtcggcactcagacctcccgctccgactgggtagacctggtgtcctggagccacccaggacccacgtctaagtcccagcaggttgacctggtgtctttatttcctaaacaccgggttgacctgttatccaaaaacgaccaggtagacctggtggctcaatttttaccatctaaatttccccccaatttggcagaaaatgatttggctttgctggtgaacttagagttctacagatcggatttgcatgtgtatgagtgtgttcattttgctgcacattgggagggattaagtggtttgcctgaggtgtatgaacaacttgcaccacaaccgtgtgtgggagaaactttacattctagcctcccacgagacagtgaactgtttgtgcctgaagaggggagcagcgagaaggagagcgaggacgcgccaaaaacatctcctccgacgcctgggaaacatggtagggaacagactggggaggaaaaagtgatggtgactgttcctgacaaaaatccaccttgtccttgctgtggtacccgggtaaactctgtgttgaatctgattgaacatctgaaagtgtcacacgggaaaaggggggtttgttttcggtgtgcaaaatgtggaaaggaaaatagtaactatcacagtgttgtttgtcattttaagaaatgcaggggtccagagacggagaaagccccagctggggagtggatttgtgaggtatgcaacagagattttacaaccaaaattggcctgggacaacacaagagattggcacacccagcagtgagaaatcaggaaaggatcgttgcttcccaaccgaaagaaacatcaaatagaggtgctcacaaaaggtgctggacaaaggaggaggaagaattactaataagactggaggctcagttcgagggaaacaaaaatattaataagcttattgcagaacacataaccaccaaaacagctaagcagatcagtgacaaaaggcgattgctgtccagaaagccagcagaggagccacgtgaggagcctggaacgtgtcatcacaccaggagagcagctgcgagcctgagaacggagcctgagatgagtcatcacgcccaggcagaggacagagataatggacctgggagacgccctctgccaggcagggcagctgccggagggagaacaatggacgagataagacgccaccctgataagggcaacggacagcagagacccaccaagcaaaaatcagaagaacagctgcaggcttactataaaaagacactagaggaacgactttcagctggggcacttaacaccttcccccgagcattcaagcaggtaatggaaggccgggatataaagctagtaatcaatcagacagcgcaggactacttcggatgcctggaatccataagccaaataagaacggcaacccgagataaaaaggacacggtgacccgggagaaacacccaaagaaaccttttcagaagtggatgaagaagagagcaatcaaaaaaggtaattatcttcggttccagcgtttattttatcttgatagagggaaactggctaaaatcattttagatgatattgaatgcttgtcttgtgacataccactcagtgaaatttattcggtttttaaaacaagatgggaaacaactggtagctttaaaagccttggggactttaaaacttacgggaaggctgacaacactgccttcagagaattaattacggctaaagaaattgagaaaaatgtgcaggaaatgagcaaaggctcggctcccggtccagacgggattactcttggggacgtcgtaaagatggatcccgagttttcccggaccatggagattttcaatttatggttaacaactggtaaaatcccggacatggtgagggggtgcagaaccgttttgattccaaaatcatcagacccggatcgtttgaaagacattaataactggagacctatcacgatcggttccatcttgctgagactgttctccaggattgtaacagctaggctgagcaaagcgtgccccctgaacccaaggcaaagaggctttatcagagcggcgggatgctctgaaaacttaaaactcctgcaaactataatttggtcggccaaaagagaacacagaccactgggtgttgtattcgtggacatcgccaaggcttttgacaccgtaagccaccagcacatcattcatgctttgcagcaaagagaggtggatccccacatcgtcggtctggtgagcaatatgtacgagaacatcagtacgtatatcaccacaaagaggaacacacacacagacaaaatccagatccgggttggagtaaagcagggtgacccgatgtcgccccttttatttaacctggcaatggaccctctattatgcaagctggaagagagtggcaaaggataccaccgaggacagagcagcatcacagcgatggcatttgcagacgatctggttttgctgagcgactcctgggaaaatatgaatacaaatattagcatactggagaccttctgcaatctgaccggactcaaaacacaggggcaaaagtgccacggcttttacatcaagccgacaaaggactcttacaccatcaatgactgcgctgcctggactatcaacggcacacccctgaacatgatcgaccccggcgaatctgagaaatacctcggcctgcagtttgacccgtggattggaatagcaaggtccggtctctccacaaaactagatttttggcttcagcggatcgatcaagcaccacttaaacctctgcagaaaactgatattctcaaaacatacaccatccctcggctgatctacatagctgaccactcagaagtgaaaactgcactactcgaaacccttgaccagaagatccggacagcggtcaaggaatggcttcacctacctccgtgcacctgcgatgccatcctgtactcgagcacgagagacggcggtttgggcatcaccaaattggcaggactgatccccagcgtgcaggcccgtagactgcatcggatcgcacagtcatctgacgatacgatgaaatgcttcatggaaaaagagaaaatggaacagctgcataagaaattgtggattcaagctggaggggacagagagaacataccctcgatttgggaagcaccaccgtcgagtgaaccaccaaacaacgtgagcacaaattcggaatgggaagcaccgacccagaaagataaatttccaaagccttgcaattggaggaaaaacgaattcaaaaaatggaccaaattggcatcccaaggccgcggaattgtaaattttgaaagagacaaaattagtaaccattggatccaatactacagacgcatacctcacaggaaactcctcactgcactacaactcagggccaacgtttaccccacgagagaatttctagccaggggtagacaagaccaatacatcaaggcgtgtaggcactgcgatgcggacattgaatcctgcgcccacatcatcggcaactgcccagtgacacaggacgcccgaatcaagaggcacaattacatctgcgaactgcttctcgaggaggcgaagaagaaggactgggtagtgttcaaggaaccgcacataagggattccaacaaggaactgtacaaacctgacctgatatttgtgaaggatgcccgtgcacttgtcgtggatgtgacagtacggtatgaagcagccaaatcatcgctggaggaagccgctgcagagaaagtgagaaagtacaaacacctggaaacggaagtaagacatctcacgaatgcaaaggacgttacttttgtgggctttcccctaggagcgcgggggaaatggcaccaagataactttaaacttttgactgagcttggcctctccaaatcgaggcaagtgaaaatggcagagactttttccacagtagcgctcttttcatctgtggacattgtacatatgtttgccagtagggccagaaaatctatggttatgtgataataggctgccttctgcggggcttgccttctggccatgcccttcttctctcccttgcacctgtacctcttggtctttgaataaagcctgagtaggaaggaccggtagacatgataagatacattgatgagtttggacaaaccacaactagaatgcagtgaaaaaaatgctttatttgtgaaatttgtgatgctattgctttatttgtaaccattataagctgcaataaacaagttaacaacaacaaaaaaaaaaaaaaaaaaaaaaaaaaaaaaacgttgactaaaaaaaaaaaaaaaaaaaaaaaaaaaaaaaaaaaaaaaaaaaaaaaaaaaaaaaaaaaaaaaaaaaaaa

SEQ ID NO: 11385 - DNA, 4703 bp, synthetic construct
  source 1..4703: mol_type = other DNA
ggtctagttacaactgggcatcgctgcagagatcgcacctcctcgtggtcccgctggtagcccttcgaagggtgactaagtcgatctctgccccaggtacggagccgttgggactcaccagtccaacgtaactcctgcctaaattcggtgaaacaaattcctcggtaaaaagccccatggcttcttgcccgaaacctggccccccggtttcagcaggggcaatgagtttggaaagtggactgaccacccactccgttctcgccatcgaacgtggtcccaattcgttggcaaattccggatcagactttgggggggggggtctggggctaccgttacgcctattgagggtatcggtcggcactcagacctcccgctccgactgggtagacctggtgtcctggagccacccaggacccacgtctaagtcccagcaggttgacctggtgtctttatttcctaaacaccgggttgacctgttatccaaaaacgaccaggtagacctggtggctcaatttttaccatctaaatttccccccaatttggcagaaaatgatttggctttgctggtgaacttagagttctacagatcggatttgcatgtgtatgagtgtgttcattttgctgcacattgggagggattaagtggtttgcctgaggtgtatgaacaacttgcaccacaaccgtgtgtgggagaaactttacattctagcctcccacgagacagtgaactgtttgtgcctgaagaggggagcagcgagaaggagagcgaggacgcgccaaaaacatctcctccgacgcctgggaaacatggtttggaacagactggggaggaaaaagtgatggtgactgttcctgacaaaaatccaccttgtccttgctgtggtacccgggtaaactctgtgttgaatctgattgaacatctgaaagtgtcacacgggaaaaggggggtttgttttcggtgtgcaaaatgtggaaaggaaaatagtaactatcacagtgttgtttgtcattttaagaaatgcaggggtccagagacggagaaagccccagctggggagtggatttgtgaggtatgcaacagagattttacaaccaaaattggcctgggacaacacaagagattggcacacccagcagtgagaaatcaggaaaggatcgttgcttcccaaccgaaagaaacatcaaatagaggtgctcacaaaaggtgctggacaaaggaggagagggaattactaataagactggaggctcagttcgagggaaacaaaaatattaataagcttattgcagaacacataaccaccaaaacagctaagcagatcagtgacaaaaggcgattgctgtccagaaagccagcagaggagccacgtgaggagcctggaacgtgtcatcacaccaggagagcagctgcgagcctgagaacggagcctgagatgagtcatcacgcccaggcagaggacagagataatggacctgggagacgccctctgccaggcagggcagctgccggagggagaacaatggacgagataagacgccaccctgataagggcaacggacagcagagacccaccaagcaaaaatcagaagaacagctgcaggcttactataaaaagacactagaggaacgactttcagctggggcacttaacaccttcccccgagcattcaagcaggtaatggaaggccgggatataaagctagtaatcaatcagacagcgcaggactacttcggatgcctggaatccataagccaaataagaacggcaacccgagataaaaaggacacggtgacccgggagaaacacccaaagaaaccttttcagaagtggatgaagaagagagcaatcaaaaaaggtaattatcttcggttccagcgtttattttatcttgatagagggaaactggctaaaatcattttagatgatattgaatgcttgtcttgtgacataccactcagtgaaatttattcggtttttaaaacaagatgggaaacaactggtagctttaaaagccttggggactttaaaacttacgggaaggctgacaacactgccttcagagaattaattacggctaaagaaattgagaaaaatgtgcaggaaatgagcaaaggctcggctcccggtccagacgggattactcttggggacgtcgtaaagatggatcccgagttttcccggaccatggagattttcaatttatggttaacaactggtaaaatcccggacatggtgagggggtgcagaaccgttttgattccaaaatcatcagacccggatcgtttgaaagacattaataactggagacctatcacgatcggttccatcttgctgagactgttctccaggattgtaacagctaggctgagcaaagcgtgccccctgaacccaaggcaaagaggctttatcagagcggcgggatgctctgaaaacttaaaactcctgcaaactataatttggtcggccaaaagagaacacagaccactgggtgttgtattcgtggacatcgccaaggcttttgacaccgtaagccaccagcacatcattcatgctttgcagcaaagagaggtggatccccacatcgtcggtctggtgagcaatatgtacgagaacatcagtacgtatatcaccacaaagaggaacacacacacagacaaaatccagatccgggttggagtaaagcagggtgacccgatgtcgccccttttatttaacctggcaatggaccctctattatgcaagctggaagagagtggcaaaggataccaccgaggacagagcagcatcacagcgatggcatttgcagacgatctggttttgctgagcgactcctgggaaaatatgaatacaaatattagcatactggagaccttctgcaatctgaccggactcaaaacacaggggcaaaagtgccacggcttttacatcaagccgacaaaggactcttacaccatcaatgactgcgctgcctggactatcaacggcacacccctgaacatgatcgaccccggcgaatctgagaaatacctcggcctgcagtttgacccgtggattggaatagcaaggtccggtctctccacaaaactagatttttggcttcagcggatcgatcaagcaccacttaaacctctgcagaaaactgatattctcaaaacatacaccatccctcggctgatctacatagctgaccactcagaagtgaaaactgcactactcgaaacccttgaccagaagatccggacagcggtcaaggaatggcttcacctacctccgtgcacctgcgatgccatcctgtactcgagcacgagagacggcggtttgggcatcaccaaattggcaggactgatccccagcgtgcaggcccgtagactgcatcggatcgcacagtcatctgacgatacgatgaaatgcttcatggaaaaagagaaaatggaacagctgcataagaaattgtggattcaagctggaggggacagagagaacataccctcgatttgggaagcaccaccgtcgagtgaaccaccaaacaacgtgagcacaaattcggaatgggaagcaccgacccagaaagataaatttccaaagccttgcaattggaggaaaaacgaattcaaaaaatggaccaaattggcatcccaaggccgcggaattgtaaattttgaaagagacaaaattagtaaccattggatccaatactacagacgcatacctcacaggaaactcctcactgcactacaactcagggccaacgtttaccccacgagagaatttctagccaggggtagacaagaccaatacatcaaggcgtgtaggcactgcgatgcggacattgaatcctgcgcccacatcatcggcaactgcccagtgacacaggacgcccgaatcaagaggcacaattacatctgcgaactgcttctcgaggaggcgaagaagaaggactgggtagtgttcaaggaaccgcacataagggattccaacaaggaactgtacaaacctgacctgatatttgtgaaggatgcccgtgcacttgtcgtggatgtgacagtacggtatgaagcagccaaatcatcgctggaggaagccgctgcagagaaagtgagaaagtacaaacacctggaaacggaagtaagacatctcacgaatgcaaaggacgttacttttgtgggctttcccctaggagcgcgggggaaatggcaccaagataactttaaacttttgactgagcttggcctctccaaatcgaggcaagtgaaaatggcagagactttttccacagtagcgctcttttcatctgtggacattgtacatatgtttgccagtagggccagaaaatctatggttatgtgataataggctgccttctgcggggcttgccttctggccatgcccttcttctctcccttgcacctgtacctcttggtctttgaataaagcctgagtaggaaggaccggtagacatgataagatacattgatgagtttggacaaaccacaactagaatgcagtgaaaaaaatgctttatttgtgaaatttgtgatgctattgctttatttgtaaccattataagctgcaataaacaagttaacaacaacaaaaaaaaaaaaaaaaaaaaaaaaaaaaaaacgttgactaaaaaaaaaaaaaaaaaaaaaaaaaaaaaaaaaaaaaaaaaaaaaaaaaaaaaaaaaaaaaaaaaaaaaa

SEQ ID NO: 11386 - DNA, 4564 bp, synthetic construct
  source 1..4564: mol_type = other DNA
ggtctagttacaactgggcatcgctgcagagatcgcacctcctcgtggtcccgctggtagcccttcgaagggtgactaagtcgatctctgccccaggtacggagccgttgggactcaccagtccaacgtaactcctgcctaaattcggtgaaacaaattcctcggtaaaaagccccatggcttcttgcccgaaacctggccccccggtttcagcaggggcaatgagtttggaaagtggactgaccacccactccgttctcgccatcgaacgtggtcccaattcgttggcaaattccggatcagactttgggggggggggtctggggctaccgttacgcctattgagggtatcggtcggcactcagacctcccgctccgactgggtagacctggtgtcctggagccacccaggacccacgtctaagtcccagcaggttgacctggtgtctttatttcctaaacaccgggttgacctgttatccaaaaacgaccaggtagacctggtggctcaatttttaccatctaaatttccccccaatttggcagaaaatgatttggctttgctggtgaacttagagttctacagatcggatttgcatgtgtatgagggcgttcattttgctgcacattgggagggattaagtggtttgcctgaggtgtatgaacaacttgcaccacaaccgtgtgtgggagaaactttacattctagcctcccacgagacagtgaactgtttgtgcctgaagaggggagcagcgagaaggagagcgaggacgcgccaaaaacatctcctccgacgcctgggaaacatggtttgaggcagactggggaggaaaaagtgatggtgactgttcctgacaaaaatccaccttgtccttgctgtggtacccgggtaaactctgtgttgaatctgattgaacatctgaaagtgtcacacgggaaaaggagggtttgttttcggtgtgcaaaatgtggaaaggaaaatagtaactatcacagtgttgtttgtcattttccaaaatgcaggggtccagagacggagaaagccccagctggggagtggatttgtgaggtatgcaacagagattttacaaccaaaattggcctgggacaacacaagagattggcacacccagcagtgagaaatcaggaaaggatcgttgcttcccaaccgaaagaaacatcaaatagaggtgctcacaaaaggtgctggacaaaggaggaggaagaattactaataagactggaggctcagttcgagggaaacaaaaatattaataagcttattgcagaacacataaccaccaaaacagctaagcagatcagtgacaaaaggcgattgctgtccagaaagccagcagaggagccacgtgaggagcctggaacgtgtcatcacaccaggagagcagctgcgagcctgagaacggagcctgagatgagtcatcacgcccaggcagaggacagagataatggacctgggagacgccctctgccaggcagggcagctgccggagggagaacaatggacgagataagacgccaccctgataagggcaacggacagcagagacccaccaagcaaaaatcagaagaacagctgcaggcttactataaaaagacactagaggaacgactttcagctggggcacttaacaccttcccccgagcattcaagcaggtaatggaaggccgggatataaagctagtaatcaatcagacagcgcaggactgcttcggatgcctggaatccataagccaaataagaacggcaacccgagataaaaaggacacggtgacccgggagaaacacccaaagaaaccttttcagaagtggatgaagaagagagcaatcaaaaaaggtaattatcttcggttccagcgtttattttatcttgatagagggaaactggctaaaatcattttagatgatattgaatgcttgtcttgtgacataccactcagtgaaatttattcggtttttaaaacaagatgggaaacaactggtagctttaaaagccttggggactttaaaacttacgggaaggctgacaacactgccttcagagaattaattacggctaaagaaattgagaaaaatgtgcaggaaatgagcaaaggctcggctcccggtccagacgggattactcttggggacgtcgtaaagatggatcccgagttttcccggaccatggagattttcaatttatggttaacaactggtaaaatcccggacatggtgagggggtgcagaaccgttttgattccaaaatcatcaaagccggatcgtttgaaagacattaataactggagacctatcacgatcggttccatcttgctgagactgttctccaggattgtaacagctaggctgagcaaagcgtgccccctgaacccaaggcaaagaggctttatcagagcggcgggatgctctgaaaacttaaaactcctgcaaactataatttggtcggccaaaagagaacacagaccactgggtgttgtattcgtggacatcgccaaggcttttgacaccgtaagccaccagcacatcattcatgctttgcagcaaagagaggtggatccccacatcgtcggtctggtgagcaatatgtacgagaacatcagtacgtatatcaccacaaagaggaacacacacacagacaaaatccagatccgggttggagtaaagcagggtgacccgatgtcgccccttttatttaacctggcaatggaccctctattatgcaagctggaagagagtggcaaaggataccaccgaggacagagcagcatcacagcgatggcatttgcagacgatctggttttgctgagcgactcctgggaaaatatgaatacaaatattagcatactggagaccttctgcaatctgaccggactcaaaacacaggggcaaaagtgccacggcttttacatcaagccgacaaaggactcttacaccatcaatgactgcgctgcctggactatcaacggcacacccctgaacatgatcgaccccggcgaatctgagaaatacctcggcctgcagtttgacccgtggattggaatagcaaggtccggtctctccacaaaactagatttttggcttcagcggatcgatcaagcaccacttaaacctctgcagaaaactgatattctcaaaacatacaccatccctcggctgatctacatagctgaccactcagaagtgaaaactgcactactcgaaacccttgaccagaagatccggacagcggtcaaggaatggcttcacctacctccgtgcacctgcgatgccatcctgtactcgagcacgagagacggcggtttgggcatcaccaaattggcaggactgatccccagcgtgcaggcccgtagactgcatcggatcgcacagtcatctgacgatacgatgaaatgcttcatggaaaaagagaaaatggaacagctgcataagaaattgtggattcaagctggaggggacagagagaacataccctcgatttgggaagcaccaccgtcgagtgaaccaccaaacaacgtgagcacaaattcggaatgggaagcaccgacccagaaagataaatttccaaagccttgcaattggaggaaaaacgaattcaaaaaatggaccaaattggcatcccaaggccgcggaattgtaaattttgaaagagacaaaattagtaaccattggatccaatactacagacgcatacctcacaggaaactcctcactgcactacaactcagggccaacgtttaccccacgagagaatttctagccaggggtagacaagaccaatacatcaaggcgtgtaggcactgcgatgcggacattgaatcctgcgcccacatcatcggcaactgcccagtgacacaggacgcccgaatcaagaggcacaattacatctgcgaactgcttctcgaggaggcgaagaagaaggactgggtagtgttcaaggaaccgcacataagggattccaacaaggaactgtacaaacctgacctgatatttgtgaaggatgcccgtgcacttgtcgtggatgtgacagtacggtatgaagcagccaaatcatcgctggaggaagccgctgcagagaaagtgagaaagtacaaacacctggaaacggaagtaagacatctcacgaatgcaaaggacgttacttttgtgggctttcccctaggagcgcgggggaaatggcaccaagataactttaaacttttgactgagcttggcctctccaaatcgaggcaagtgaaaatggcagagactttttccacagtagcgctcttttcatctgtggacattgtacatatgtttgccagtagggccagaaaatctatggttatgtgataataggctgccttctgcggggcttgccttctggccatgcccttcttctctcccttgcacctgtacctcttggtctttgaataaagcctgagtaggaaggaccggtaaaaaaaaaaaaaaaaaaaaaaaaaaaaaaacgttgactaaaaaaaaaaaaaaaaaaaaaaaaaaaaaaaaaaaaaaaaaaaaaaaaaaaaaaaaaaaaaaaaaaaaaa

SEQ ID NO: 11387 - DNA, 4703 bp, synthetic construct
  source 1..4703: mol_type = other DNA
ggtctagttacaactgggcatcgctgcagagatcgcacctcctcgtggtcccgctggtagcccttcgaagggtgactaagtcgatctctgccccaggtacggagccgttgggactcaccagtccaacgtaactcctgcctaaattcggtgaaacaaattcctcggtaaaaagccccatggcttcttgcccgaaacctggccccccggtttcagcaggggcaatgagtttggaaagtggactgaccacccactccgttctcgccatcgaacgtggtcccaattcgttggcaaattccggatcagactttgggggggggggtctggggctaccgttacgcctattgagggtatcggtcggcactcagacctcccgctccgactgggtagacctggtgtcctggagccacccaggacccacgtctaagtcccagcaggttgacctggtgtctttatttcctaaacaccgggttgacctgttatccaaaaacgaccaggtagacctggtggctcaatttttaccatctaaatttccccccaatttggcagaaaatgatttggctttgctggtgaacttagagttctacagatcggatttgcatgtgtatgagtgtgttcattttgctgcacattgggagggattaagtggtttgcctgaggtgtatgaacaacttgcaccacaaccgtgtgtgggagaaactttacattctagcctcccacgagacagtgaactgtttgtgcctgaagaggggagcagcgagaaggagagcgaggacgcgccaaaaacatctcctccgacgcctgggaaacatggtttggaacagactggggaggaaaaagtgatggtgactgttcctgacaaaaatccaccttgtccttgctgtggtacccgggtaaactctgtgttgaatctgattgaacatctgaaagtgtcacacgggaaaaggggggtttgttttcggtgtgcaaaatgtggaaaggaaaatagtaactatcacagtgttgtttgtcattttaagaaatgcaggggtccagagacggagaaagccccagctggggagtggatttgtgaggtatgcaacagagattttacaaccaaaattggcctgggacaacacaagagattggcacacccagcagtgagaaatcaggaaaggatcgttgcttcccaaccgaaagaaacatcaaatagaggtgctcacaaaaggtgctggacaaaggaggaggaagaattactaataagactggaggctcagttcgagggaaacaaaaatattaataagcttattgcagaacacataaccaccaaaacagctaagcagatcagtgacaaaaggcgattgctgtccagaaagccagcagaggagccacgtgaggagcctggaacgtgtcatcacaccaggagagcagctgcgagcctgagaacggagcctgagatgagtcatcacgcccaggcagaggacagagataatggacctgggagacgccctctgccaggcagggcagctgccggagggagaacaatggacgagataagacgccaccctgataagggcaacggacagcagagacccaccaagcaaaaatcagaagaacagctgcaggcttactataaaaagacactagaggaacgactttcagctggggcacttaacaccttcccccgagcattcaagcaggtaatggaaggccgggatataaagctagtaatcaatcagacagcgcaggactacttcggatgcctggaatccataagccaaataagaacggcaacccgagataaaaaggacacggtgacccgggagaaacacccaaagaaaccttttcagaagtggatgaagaagagagcaatcaaaaaaggtaattatcttcggttccagcgtttattttatcttgatagagggaaactggctaaaatcattttagatgatattgaatgcttgtcttgtgacataccactcagtgaaatttattcggtttttaaaacaagatgggaaacaactggtagctttaaaagccttggggactttaaaacttacgggaaggctgacaacactgccttcagagaattaattacggctaaagaaattgagaaaaatgtgcaggaaatgagcaaaggctcggctcccggtccagacgggattactcttggggacgtcgtaaagatggatcccgagttttcccggaccatggagattttcaatttatggttaacaactggtaaaatcccggacatggtgagggggtgcagaaccgttttgattccaaaatcatcagacccggatcgtttgaaagacattaataactggagacctatcacgatcggttccatcttgctgagactgttctccaggattgtaacagctaggctgagcaaagcgtgccccctgaacccaaggcaaagaggctttatcagagcggcgggatgctctgaaaacttaaaactcctgcaaactataatttggtcggccaaaagagaacacagaccactgggtgttgtattcgtggacatcgccaaggcttttgacaccgtaagccaccagcacatcattcatgctttgcagcaaagagaggtggatccccacatcgtcggtctggtgagcaatatgtacgagaacatcagtacgtatatcaccacaaagaggaacacacacacagacaaaatccagatccgggttggagtaaagcagggtgacccgatgtcgccccttttatttaacctggcaatggaccctctattatgcaagctggaagagagtggcaaaggataccaccgaggacagagcagcatcacagcgatggcatttgcagacgatctggttttgctgagcgactcctgggaaaatatgaatacaaatattagcatactggagaccttctgcaatctgaccggactcaaaacacaggggcaaaagtgccacggcttttacatcaagccgacaaagaagtcttacaccatcaatgactgcgctgcctggactatcaacggcacacccctgaacatgatcgaccccggcgaatctgagaaatacctcggcctgcagtttgacccgtggattggaatagcaaggtccggtctctccacaaaactagatttttggcttcagcggatcgatcaagcaccacttaaacctctgcagaaaactgatattctcaaaacatacaccatccctcggctgatctacatagctgaccactcagaagtgaaaactgcactactcgaaacccttgaccagaagatccggacagcggtcaaggaatggcttcacctacctccgtgcacctgcgatgccatcctgtactcgagcacgagagacggcggtttgggcatcaccaaattggcaggactgatccccagcgtgcaggcccgtagactgcatcggatcgcacagtcatctgacgatacgatgaaatgcttcatggaaaaagagaaaatggaacagctgcataagaaattgtggattcaagctggaggggacagagagaacataccctcgatttgggaagcaccaccgtcgagtgaaccaccaaacaacgtgagcacaaattcggaatgggaagcaccgacccagaaagataaatttccaaagccttgcaattggaggaaaaacgaattcaaaaaatggaccaaattggcatcccaaggccgcggaattgtaaattttgaaagagacaaaattagtaaccattggatccaatactacagacgcatacctcacaggaaactcctcactgcactacaactcagggccaacgtttaccccacgagagaatttctagccaggggtagacaagaccaatacatcaaggcgtgtaggcactgcgatgcggacaacgaatcctgcgcccacatcatcggcaactgcccagtgacacaggacgcccgaatcaagaggcacaattacatctgcgaactgcttctcgaggaggcgaagaagaaggactgggtagtgttcaaggaaccgcacataagggattccaacaaggaactgtacaaacctgacctgatatttgtgaaggatgcccgtgcacttgtcgtggatgtgacagtacggtatgaagcagccaaatcatcgctggaggaagccgctgcagagaaagtgagaaagtacaaacacctggaaacggaagtaagacatctcacgaatgcaaaggacgttacttttgtgggctttcccctaggagcgcgggggaaatggcaccaagataactttaaacttttgactgagcttggcctctccaaatcgaggcaagtgaaaatggcagagactttttccacagtagcgctcttttcatctgtggacattgtacatatgtttgccagtagggccagaaaatctatggttatgtgataataggctgccttctgcggggcttgccttctggccatgcccttcttctctcccttgcacctgtacctcttggtctttgaataaagcctgagtaggaaggaccggtagacatgataagatacattgatgagtttggacaaaccacaactagaatgcagtgaaaaaaatgctttatttgtgaaatttgtgatgctattgctttatttgtaaccattataagctgcaataaacaagttaacaacaacaaaaaaaaaaaaaaaaaaaaaaaaaaaaaaacgttgactaaaaaaaaaaaaaaaaaaaaaaaaaaaaaaaaaaaaaaaaaaaaaaaaaaaaaaaaaaaaaaaaaaaaaa

SEQ ID NO: 11388 - DNA, 4919 bp, synthetic construct
  source 1..4919: mol_type = other DNA
gaaataagagagaaaagaagagtaagaagaaatataagagaattcgccaccatggcccctaagaaaaagcggaaggtgaatatcagcggctctagctgcggcagccccaacagcgccgacaccagcagcgacttcaaggacctgtggaccaagctgaaggaatgccacgaccgggaagtgcagggactccaggtgaaggtcaccaaactcaagcaagaaagaatcctggacgcccagagactggaagaattcttcaccaagaaccagcagctgagagagcagcagaaagtgctgcacgagacaatcaaggttctggaagatagactgcgggccggcctgtgcgacagatgcgccgtgaccgaggaacacatgcgcaaaaagcagcaggagttcgagaacattagacagcaaaatctgaaattgatcacagagctgatgaacgagagaaacacactgcaggaggagaacaagaagctgagcgagcagctgcaacagaagatcgagaatgatcagcaacaccaggccgctgagctggaatgtgaagaggacgtgatccccgacagcccaatcacagctttcagcttttctggcgtgaacagactgaggcggaaggaaaacccccacgtgcggtacatcgagcagacccataccaagctggaacacagcgtgtgtgccaacgagatgagaaaggtgtccaagtcctccacccatccccagcacaaccctaacgaaaatgagatcctggtggctgatacctacgaccagtctcagagccctatggccaaggcccacggcaccagctcttatacccctgataagagctccttcaacctggccaccgtggtggccgagacactgggcctgggcgtgcaggaggaaagcgagacacagggcccaatgagccctctgggagatgagctgtaccactgcctggaaggcaaccacaagaaacagccttttgagtccggctccgagactcctggaacaagcgagagcgctacacctgagggcagctatgaacaacttgcaccacaaccgtgtgtgggagaaactttacattctagcctcccacgagacagtgaactgtttgtgcctgaagaggggagcagcgagaaggagagcgaggacgcgccaaaaacatctcctccgacgcctgggaaacatggtttggaacagactggggaggaaaaagtgatggtgactgttcctgacaaaaatccaccttgtccttgctgtggtacccgggtaaactctgtgttgaatctgattgaacatctgaaagtgtcacacgggaaaaggggggtttgttttcggtgtgcaaaatgtggaaaggaaaatagtaactatcacagtgttgtttgtcattttaagaaatgcaggggtccagagacggagaaagccccagctggggagtggatttgtgaggtatgcaacagagattttacaaccaaaattggcctgggacaacacaagagattggcacacccagcagtgagaaatcaggaaaggatcgttgcttcccaaccgaaagaaacatcaaatagaggtgctcacaaaaggtgctggacaaaggaggaggaagaattactaataagactggaggctcagttcgagggaaacaaaaatattaataagcttattgcagaacacataaccaccaaaacagctaagcagatcagtgacaaaaggcgattgctgtccagaaagccagcagaggagccacgtgaggagcctggaacgtgtcatcacaccaggagagcagctgcgagcctgagaacggagcctgagatgagtcatcacgcccaggcagaggacagagataatggacctgggagacgccctctgccaggcagggcagctgccggagggagaacaatggacgagataagacgccaccctgataagggcaacggacagcagagacccaccaagcaaaaatcagaagaacagctgcaggcttactataaaaagacactagaggaacgactttcagctggggcacttaacaccttcccccgagcattcaagcaggtaatggaaggccgggatataaagctagtaatcaatcagacagcgcaggactgcttcggatgcctggaatccataagccaaataagaacggcaacccgagataaaaaggacacggtgacccgggagaaacacccaaagaaaccttttcagaagtggatgaagaagagagcaatcaaaaaaggtaattatcttcggttccagcgtttattttatcttgatagagggaaactggctaaaatcattttagatgatattgaatgcttgtcttgtgacataccactcagtgaaatttattcggtttttaaaacaagatgggaaacaactggtagctttaaaagccttggggactttaaaacttacgggaaggctgacaacactgccttcagagaattaattacggctaaagaaattgagaaaaatgtgcaggaaatgagcaaaggctcggctcccggtccagacgggattactcttggggacgtcgtaaagatggatcccgagttttcccggaccatggagattttcaatttatggttaacaactggtaaaatcccggacatggtgagggggtgcagaaccgttttgattccaaaatcatcaaagccggatcgtttgaaagacattaataactggagacctatcacgatcggttccatcttgctgagactgttctccaggattgtaacagctaggctgagcaaagcgtgccccctgaacagaaggcaaagaggctttatcagagcggcgggatgctctgaaaacttaaaactcctgcaaactataatttggtcggccaaaagagaacacagaccactgggtgttgtattcgtggacatcgccaaggcttttgacaccgtaagccaccagcacatcattcatgctttgcagcaaagagaggtggatccccacatcgtcggtctggtgagcaatatgtacgagaacatcagtacgtatatcaccacaaagaggaacacacacacagacaaaatccagatccgggttggagtaaagcagggtgacccgatgtcgccccttttatttaacctggcaatggaccctctattatgcaagctggaagagagtggcaaaggataccaccgaggacagagcagcatcacagcgatggcatttgcagacgatctggttttgctgagcgactcctgggaaaatatgaatacaaatattagcatactggagaccttctgcaatctgaccggactcaaaacacaggggcaaaagtgccacggcttttacatcaagccgacaaaggactcttacaccatcaatgactgcgctgcctggactatcaacggcacacccctgaacatgatcgaccccggcgaatctgagaaatacctcggcctgcagtttgacccgtggattggaatagcaaggtccggtctctccacaaaactagatttttggcttcagcggatcgatcaagcaccacttaaacctctgcagaaaactgatattctcaaaacatacaccatccctcggctgatctacatagctgaccactcagaagtgaaaagcgcactactcgaaacccttgaccagaagatccggacagcggtcaaggaatggcttcacctacctccgtgcacctgcgatgccatcctgtactcgagcacgagagacggcggtttgggcatcaccaaattggcaggactgatccccagcgtgcaggcccgtagactgcatcggatcgcacagtcatctgacgatacgatgaaatgcttcatggaaaaagagaaaatggaacagctgcataagaaattgtggattcaagctggaggggacagagagaacataccctcgatttgggaagcaccaccgtcgagtgaaccaccaaacaacgtgagcacaaattcggaatgggaagcaccgacccagaaagataaatttccaaagccttgcaattggaggaaaaacgaattcaaaaaatggaccaaattggcatcccaaggccgcggaattgtaaattttgaaagagacaaaattagtaaccattggatccaatactacagacgcatacctcacaggaaactcctcactgcactacaactcagggccaacgtttaccccacgagagaatttctagccaggggtagacaagaccaatacatcaaggcgtgtaggcactgcgatgcggacaacgaatcctgcgcccacatcatcggcaactgcccagtgacacaggacgcccgaatcaagaggcacaattacatctgcgaactgcttctcgaggaggcgaagaagaaggactgggtagtgttcaaggaaccgcacataagggattccaacaaggaactgtacaaacctgacctgatatttgtgaaggatgggcgtgcacttgtcgtggatgtgacagtacggtatgaagcagccaaatcatcgctggaggaagccgctgcagagaaagtgagaaagtacaaacacctggaaacggaagtaagacatctcacgaatgcaaaggacgttacttttgtgggctttcccctaggagcgcgggggaaatggcaccaagataactttaaacttttgactgagcttggcctctccaaatcgaggcaagtgaaaatggcagagactttttccacagtagcgctcttttcatctgtggacattgtacatatgtttgccagtagggccagaaaatctatggttatgtgataataggctgccttctgcggggcttgccttctggccatgcccttcttctctcccttgcacctgtacctcttggtctttgaataaagcctgagtaggaaggaccggtaaaaaaaaaaaaaaaaaaaaaaaaaaaaaaacgttgactaaaaaaaaaaaaaaaaaaaaaaaaaaaaaaaaaaaaaaaaaaaaaaaaaaaaaaaaaaaaaaaaaaaaaa

SEQ ID NO: 11389 - DNA, 4493 bp, synthetic construct
  source 1..4493: mol_type = other DNA
gaaataagagagaaaagaagagtaagaagaaatataagagaattcgccaccatggctaaacggacagccgacggaagcgagttcgagtcaccaaagaagaagcggaaagtctcttgcccgaaacctggccccccggtttcagcaggggcaatgagtttggaaagtggactgaccacccactccgttctcgccatcgaacgtggtcccaattcgttggcaaattccggatcagactttgggggggggggtctggggctaccgttacgcctattgagggtatcggtcggcactcagacctcccgctccgactgggtagacctggtgtcctggagccacccaggacccacgtctaagtcccagcaggttgacctggtgtctttatttcctaaacaccgggttgacctgttatccaaaaacgaccaggtagacctggtggctcaatttttaccatctaaatttccccccaatttggcagaaaatgatttggctttgctggtgaacttagagttctacagatcggatttgcatgtgtatgagtgtgttcataaggctgcacattgggagggattaagtggtttgcctgaggtgtatgaacaacttgcaccacaaccgtgtgtgggagaaactttacattctagcctcccacgagacagtgaactgtttgtgcctgaagaggggagcagcgagaaggagagcgaggacgcgccaaaaacatctcctccgacgcctgggaaacatggtttggaacagactggggaggaaaaagtgatggtgactgttcctgacaaaaatccaccttgtccttgctgtggtacccgggtaaactctgtgttgaatctgattgaacatctgaaagtgtcacacgggaaaaggggggtttgttttcggtgtgcaaaatgtggaaaggaaaatagtaactatcacagtgttgtttgtcattttaagaaatgcaggggtccagagacggagaaagccccagctggggagtggatttgtgaggtatgcaacagagattttacaaccaaaattggcctgggacaacacaagagattggcacacccagcagtgagaaatcaggaaaggatcgttgcttcccaaccgaaagaaacatcaaatagaggtgctcacaaaaggtgctggacaaaggaggaggaagaattactaataagactggaggctcagttcgagggaaacaaaaatattaataagcttattgcagaacacataaccaccaaaacagctaagcagatcagtgacaaaaggcgattgctgtccagaaagccagcagaggagccacgtgaggagcctggaacgtgtcatcacaccaggagagcagctgcgagcctgagaacggagcctgagatgagtcatcacgcccaggcagaggacagagataatggacctgggagacgccctctgccaggcagggcagctgccggagggagaacaatggacgagataagacgccaccctgataagggcaacggacagcagagacccaccaagcaaaaatcagaagaacagctgcaggcttactataaaaagacactagaggaacgactttcagctggggcacttaacaccttcccccgagcattcaagcaggtaatggaaggccgggatataaagctagtaatcaatcagacagcgcaggactgcttcggatgcctggaatccataagccaaataagaacggcaacccgagataaaaaggacacggtgacccgggagaaacacccaaagaaaccttttcagaagtggatgaagaagagagcaatcaaaaaaggtaattatcttcggttccagcgtttattttatcttgatagagggaaactggctaaaatcattttagatgatattgaatgcttgtcttgtgacataccactcagtgaaatttattcggtttttaaaacaagatgggaaacaactggtagctttaaaagccttggggactttaaaacttacgggaaggctgacaacactgccttcagagaattaattacggctaaagaaattgagaaaaatgtgcaggaaatgagcaaaggctcggctcccggtccagacgggattactcttggggacgtcgtaaagatggatcccgagttttcccggaccatggagattttcaatttatggttaacaactggtaaaatcccggacatggtgagggggtgcagaaccgttttgattccaaaatcatcaaagccggatcgtttgaaagacattaataactggagacctatcacgatcggttccatcttgctgagactgttctccaggattgtaacagctaggctgagcaaagcgtgccccctgaacccaaggcaaagaggctttatcagagcggcgggatgctctgaaaacttaaaactcctgcaaactataatttggtcggccaaaagagaacacagaccactgggtgttgtattcgtggacatcgccaaggcttttgacaccgtaagccaccagcacatcattcatgctttgcagcaaagagaggtggatccccacatcgtcggtctggtgagcaatatgtacgagaacatcagtacgtatatcaccacaaagaggaacacacacacagacaaaatccagatccgggttggagtaaagcagggtgacccgatgtcgccccttttatttaacctggcaatggaccctctattatgcaagctggaagagagtggcaaaggataccaccgaggacagagcagcatcacagcgatggcatttgcagacgatctggttttgctgagcgactcctgggaaaatatgaatacaaatattagcatactggagaccttctgcaatctgaccggactcaaaacacaggggcaaaagtgccacggcttttacatcaagccgacaaaggactcttacaccatcaatgactgcgctgcctggactatcaacggcacacccctgaacatgatcgaccccggcgaatctgagaaatacctcggcctgcagtttgacccgtggattggaatagcaaggtccggtctctccacaaaactagatttttggcttcagcggatcgatcaagcaccacttaaacctctgcagaaaactgatattctcaaaacatacaccatccctcggctgatctacatagctgaccactcagaagtgaaaagcgcactactcgaaacccttgaccagaagatccggacagcggtcaaggaatggcttcacctacctccgtgcacctgcgatgccatcctgtactcgagcacgagagacggcggtttgggcatcaccaaattggcaggactgatccccagcgtgcaggcccgtagactgcatcggatcgcacagtcatctgacgatacgatgaaatgcttcatggaaaaagagaaaatggaacagctgcataagaaattgtggattcaagctggaggggacagagagaacataccctcgatttgggaagcaccaccgtcgagtgaaccaccaaacaacgtgagcacaaattcggaatgggaagcaccgacccagaaagataaatttccaaagccttgcaattggaggaaaaacgaattcaaaaaatggaccaaattggcatcccaaggccgcggaattgtaaattttgaaagagacaaaattagtaaccattggatccaatactacagacgcatacctcacaggaaactcctcactgcactacaactcagggccaacgtttaccccacgagagaatttctagccaggggtagacaagaccaatacatcaaggcgtgtaggcactgcgatgcggacaacgaatcctgcgcccacatcatcggcaactgcccagtgacacaggacgcccgaatcaagaggcacaattacatctgcgaactgcttctcgaggaggcgaagaagaaggactgggtagtgttcaaggaaccgcacataagggattccaacaaggaactgtacaaacctgacctgatatttgtgaaggatgggcgtgcacttgtcgtggatgtgacagtacggtatgaagcagccaaatcatcgctggaggaagccgctgcagagaaagtgagaaagtacaaacacctggaaacggaagtaagacatctcacgaatgcaaaggacgttacttttgtgggctttcccctaggagcgcgggggaaatggcaccaagataactttaaacttttgactgagcttggcctctccaaatcgaggcaagtgaaaatggcagagactttttccacagtagcgctcttttcatctgtggacattgtacatatgtttgccagtagggccagaaaatctatggttatgtgataataggctgccttctgcggggcttgccttctggccatgcccttcttctctcccttgcacctgtacctcttggtctttgaataaagcctgagtaggaaggaccggtaaaaaaaaaaaaaaaaaaaaaaaaaaaaaaacgttgactaaaaaaaaaaaaaaaaaaaaaaaaaaaaaaaaaaaaaaaaaaaaaaaaaaaaaaaaaaaaaaaaaaaaaa

SEQ ID NO: 11390 - DNA, 4603 bp, synthetic construct
  source 1..4603: mol_type = other DNA
ggtctagttacaactgggcatcgctgcagagatcgcacctcctcgtggtcccgctggtagcccttcgaagggtgactaagtcgatctctgccccaggtacggagccgttgggactcaccagtccaacgtaactcctgcctaaattcggtgaaacaaattcctcggtaaaaagccccatggcttcttgcccgaaacctggccccccggtttcagcaggggcaatgagtttggaaagtggactgaccacccactccgttctcgccatcgaacgtggtcccaattcgttggcaaattccggatcagactttgggggggggggtctggggctaccgttacgcctattgagggtatcggtcggcactcagacctcccgctccgactgggtagacctggtgtcctggagccacccaggacccacgtctaagtcccagcaggttgacctggtgtctttatttcctaaacaccgggttgacctgttatccaaaaacgaccaggtagacctggtggctcaatttttaccatctaaatttccccccaatttggcagaaaatgatttggctttgctggtgaacttagagttctacagatcggatttgcatgtgtatgagtgtgttcattttgctgcacattgggagggattaagtggtttgcctgaggtgtatgaacaacttgcaccacaaccgtgtgtgggagaaactttacattctagcctcccacgagacagtgaactgtttgtgcctgaagaggggagcagcgagaaggagagcgaggacgcgccaaaaacatctcctccgacgcctgggaaacatggtttggaacagactggggaggaaaaagtgatggtgactgttcctgacaaaaatccaccttgtccttgctgtggtacccgggtaaactctgtgttgaatctgattgaacatctgaaagtgtcacacgggaaaaggggggtttgttttcggtgtgcaaaatgtggaaaggaaaatagtaactatcacagtgttgtttgtcattttccaaaatgcaggggtccagagacggagaaagccccagctggggagtggatttgtgaggtatgcaacagagattttacaaccaaaattggcctgggacaacacaagagattggcacacccagcagtgagaaatcaggaaaggatcgttgcttcccaaccgaaagaaacatcaaatagaggtgctcacaaaaggtgctggacaaaggaggaggaagaattactaataagactggaggctcagttcgagggaaacaaaaatattaataagcttattgcagaacacataaccaccaaaacagctaagcagatcagtgacaaaaggcgattgctgtccagaaagccagcagaggagccacgtgaggagcctggaacgtgtcatcacaccaggagagcagctgcgagcctgagaacggagcctgagatgagtcatcacgcccaggcagaggacagagataatggacctgggagacgccctctgccaggcagggcagctgccggagggagaacaatggacgagataagacgccaccctgataagggcaacggacagcagagacccaccaagcaaaaatcagaagaacagctgcaggcttactataaaaagacactagaggaacgactttcagctggggcacttaacaccttcccccgagcattcaagcaggtaatggaaggccgggatataaagctagtaatcaatcagacagcgcaggactgcttcggatgcctggaatccataagccaaataagaacggcaacccgagataaaaaggacacggtgacccgggagaaacacccaaagaaaccttttcagaagtggatgaaggacagagcaatcaaaaaaggtaattatcttcggttccagcgtttattttatcttgatagagggaaactggctaaaatcattttagatgatattgaatgcttgtcttgtgacataccactcagtgaaatttattcggtttttaaaacaagatgggaaacaactggtagctttaaaagccttggggactttaaaacttacgggaaggctgacaacactgccttcagagaattaattacggctaaagaaattgagaaaaatgtgcaggaaatgagcaaaggctcggctcccggtccagacgggattactcttggggacgtcgtaaagatggatcccgagttttcccggaccatggagattttcaatttatggttaacaactggtaaaatcccggacatggtgagggggtgcagaaccgttttgattccaaaatcatcaaagccggatcgtttgaaagacattaataactggagacctatcacgatcggttccatcttgctgagactgttctccaggattgtaacagctaggctgagcaaagcgtgccccctgaacccaaggcaaagaggctttatcagagcggcgggatgctctgaaaacttaaaactcctgcaaactataatttggtcggccaaaagagaacacagaccactgggtgttgtattcgtggacatcgccaaggcttttgacaccgtaagccaccagcacatcattcatgctttgcagcaaagagaggtggatccccacatcgtcggtctggtgagcaatatgtacgagaacatcagtacgtatatcaccacaaagaggaacacacacacagacaaaatccagatccgggttggagtaaagcagggtgacccgatgtcgccccttttatttaacctggcaatggaccctctattatgcaagctggaagagagtggcaaaggataccaccgaggacagagcagcatcacagcgatggcatttgcagacgatctggttttgctgagcgactcctgggaaaatatgaatacaaatattagcatactggagaccttctgcaatctgaccggactcaaaacacaggggcaaaagtgccacggcttttacatcaagccgacaaaggactcttacaccatcaatgactgcgctgcctggactatcaacggcacacccctgaacatgatcgaccccggcgaatctgagaaatacctcggcctgcagtttgacccgtggattggaatagcaaggtccggtctctccacaaaactagatttttggcttcagcggatcgatcaagcaccacttaaacctctgcagaaaactgatattctcaaaacatacaccatccctcggctgatctacatagctgaccactcagaagtgaaaactgcactactcgaaacccttgaccagaagatccggacagcggtcaaggaatggcttcacctacctccgtgcacctgcgatgccatcctgtactcgagcacgagagacggcggtttgggcatcaccaaattggcaggactgatccccagcgtgcaggcccgtagactgcatcggatcgcacagtcatctgacgatacgatgaaatgcttcatggaaaaagagaaaatggaacagctgcataagaaattgtggattcaagctggaggggacagagagaacataccctcgatttgggaagcaccaccgtcgagtgaaccaccaaacaacgtgagcacaaattcggaatgggaagcaccgacccagaaagataaatttccaaagccttgcaattggaggaaaaacgaattcaaaaaatggaccaaattggcatcccaaggccgcggaattgtaaattttgaaagagacaaaattagtaaccattggatccaatactacagacgcatacctcacaggaaactcctcactgcactacaactcagggccaacgtttaccccacgagagaatttctagccaggggtagacaagaccaatacatcaaggcgtgtaggcactgcgatgcggacattgaatcctgcgcccacatcatcggcaactgcccagtgacacaggacgcccgaatcaagaggcacaattacatctgcgaactgcttctcgaggaggcgaagaagaaggactgggtagtgttcaaggaaccgcacataagggattccaacaaggaactgtacaaacctgacctgatatttgtgaaggatgcccgtgcacttgtcgtggatgtgacagtacggtatgaagcagccaaatcatcgctggaggaagccgctgcagaggcagtgagaaagtacaaacacctggaaacggaagtaagacatctcacgaatgcaaaggacgttacttttgtgggctttcccctaggagcgcgggggaaatggcaccaagataactttaaacttttgactgagcttggcctctccaaatcgaggcaagtgaaaatggcagagactttttccacagtagcgctcttttcatctgtggacattgtacatatgtttgccagtagggccagaaaatctatggttatgtaaaccggtagacatgataagatacattgatgagtttggacaaaccacaactagaatgcagtgaaaaaaatgctttatttgtgaaatttgtgatgctattgctttatttgtaaccattataagctgcaataaacaagttaacaacaacaaaaaaaaaaaaaaaaaaaaaaaaaaaaaaacgttgactaaaaaaaaaaaaaaaaaaaaaaaaaaaaaaaaaaaaaaaaaaaaaaaaaaaaaaaaaaaaaaaaaaaaaa

SEQ ID NO: 11391 - DNA, 4919 bp, synthetic construct
  source 1..4919: mol_type = other DNA
gaaataagagagaaaagaagagtaagaagaaatataagagaattcgccaccatggcccctaagaaaaagcggaaggtgaatatcagcggctctagctgcggcagccccaacagcgccgacaccagcagcgacttcaaggacctgtggaccaagctgaaggaatgccacgaccgggaagtgcagggactccaggtgaaggtcaccaaactcaagcaagaaagaatcctggacgcccagagactggaagaattcttcaccaagaaccagcagctgagagagcagcagaaagtgctgcacgagacaatcaaggttctggaagatagactgcgggccggcctgtgcgacagatgcgccgtgaccgaggaacacatgcgcaaaaagcagcaggagttcgagaacattagacagcaaaatctgaaattgatcacagagctgatgaacgagagaaacacactgcaggaggagaacaagaagctgagcgagcagctgcaacagaagatcgagaatgatcagcaacaccaggccgctgagctggaatgtgaagaggacgtgatccccgacagcccaatcacagctttcagcttttctggcgtgaacagactgaggcggaaggaaaacccccacgtgcggtacatcgagcagacccataccaagctggaacacagcgtgtgtgccaacgagatgagaaaggtgtccaagtcctccacccatccccagcacaaccctaacgaaaatgagatcctggtggctgatacctacgaccagtctcagagccctatggccaaggcccacggcaccagctcttatacccctgataagagctccttcaacctggccaccgtggtggccgagacactgggcctgggcgtgcaggaggaaagcgagacacagggcccaatgagccctctgggagatgagctgtaccactgcctggaaggcaaccacaagaaacagccttttgagtccggctccgagactcctggaacaagcgagagcgctacacctgagggcagctatgaacaacttgcaccacaaccgtgtgtgggagaaactttacattctagcctcccacgagacagtgaactgtttgtgcctgaagaggggagcagcgagaaggagagcgaggacgcgccaaaaacatctcctccgacgcctgggaaacatggtttggaacagactggggaggaaaaagtgatggtgactgttcctgacaaaaatccaccttgtccttgctgtggtacccgggtaaactctgtgttgaatctgattgaacatctgaaagtgtcacacgggaaaaggggggtttgttttcggtgtgcaaaatgtggaaaggaaaatagtaactatcacagtgttgtttgtcattttaagaaatgcaggggtccagagacggagaaagccccagctggggagtggatttgtgaggtatgcaacagagattttacaaccaaaattggcctgggacaacacaagagattggcacacccagcagtgagaaatcaggaaaggatcgttgcttcccaaccgaaagaaacatcaaatagaggtgctcacaaaaggtgctggacaaaggaggaggaagaattactaataagactggaggctcagttcgagggaaacaaaaatattaataagcttattgcagaacacataaccaccaaaacagctaagcagatcagtgacaaaaggcgattgctgtccagaaagccagcagaggagccacgtgaggagcctggaacgtgtcatcacaccaggagagcagctgcgagcctgagaacggagcctgagatgagtcatcacgcccaggcagaggacagagataatggacctgggagacgccctctgccaggcagggcagctgccggagggagaacaatggacgagataagacgccaccctgataagggcaacggacagcagagacccaccaagcaaaaatcagaagaacagctgcaggcttactataaaaagacactagaggaacgactttcagctggggcacttaacaccttcccccgagcattcaagcaggtaatggaaggccgggatataaagctagtaatcaatcagacagcgcaggactgcttcggatgcctggaatccataagccaaataagaacggcaacccgagataaaaaggacacggtgacccgggagaaacacccaaagaaaccttttcagaagtggatgaagaagagagcaatcaaaaaaggtaattatcttcggttccagcgtttattttatcttgatagagggaaactggctaaaatcattttagatgatattgaatgcttgtcttgtgacataccactcagtgaaatttattcggtttttaaaacaagatgggaaacaactggtagctttaaaagccttggggactttaaaacttacgggaaggctgacaacactgccttcagagaattaattacggctaaagaaattgagaaaaatgtgcaggaaatgagcaaaggctcggctcccggtccagacgggattactcttggggacgtcgtaaagatggatcccgagttttcccggaccatggagattttcaatttatggttaacaactggtaaaatcccggacatggtgagggggtgcagaaccgttttgattccaaaatcatcaaagccggatcgtttgaaagacattaataactggagacctatcacgatcggttccatcttgctgagactgttctccaggattgtaacagctaggctgagcaaagcgtgccccctgaacccaaggcaaagaggctttatcagagcggcgggatgctctgaaaacttaaaactcctgcaaactataatttggtcggccaaaagagaacacagaccactgggtgttgtattcgtggacatcgccaaggcttttgacaccgtaagccaccagcacatcattcatgctttgcagcaaagagaggtggatccccacatcgtcggtctggtgagcaatatgtacgagaacatcagtacgtatatcaccacaaagaggaacacacacacagacaaaatccagatccgggttggagtaaagcagggtgacccgatgtcgccccttttatttaacctggcaatggaccctctattatgcaagctggaagagagtggcaaaggataccaccgaggacagagcagcatcacagcgatggcatttgcagacgatctggttttgctgagcgactcctgggaaaatatgaatacaaatattagcatactggagaccttctgcaatctgaccggactcaaaacacaggggcaaaagtgccacggcttttacatcaagccgacaaaggactcttacaccatcaatgactgcgctgcctggactatcaacggcacacccctgaacatgatcgaccccggcgaatctgagaaatacctcggcctgcagtttgacccgtggattggaatagcaaggtccggtctctccacaaaactagatttttggcttcagcggatcgatcaagcaccacttaaacctctgcagaaaactgatattctcaaaacatacaccatccctcggctgatctacatagctgaccactcagaagtgaaaagcgcactactcgaaacccttgaccagaagatccggacagcggtcaaggaatggcttcacctacctccgtgcacctgcgatgccatcctgtactcgagcacgagagacggcggtttgggcatcaccaaattggcaggactgatccccagcgtgcaggcccgtagactgcatcggatcgcacagtcatctgacgatacgatgaaatgcttcatggaaaaagagaaaatggaacagctgcataagaaattgtggattcaagctggaggggacagagagaacataccctcgatttgggaagcaccaccgtcgagtgaaccaccaaacaacgtgagcacaaattcggaatgggaagcaccgacccagaaagataaatttccaaagccttgcaattggaggaaaaacgaattcaaaaaatggaccaaattggcatcccaaggccgcggaattgtaaattttgaaagagacaaaattagtaaccattggatccaatactacagacgcatacctcacaggaaactcctcactgcactacaactcagggccaacgtttaccccacgagagaatttctagccaggggtagacaagaccaatacatcaaggcgtgtaggcactgcgatgcggacaacgaatcctgcgcccacatcatcggcaactgcccagtgacacaggacgcccgaatcaagaggcacaattacatctgcgaactgcttctcgaggaggcgaagaagaaggactgggtagtgttcaaggaaccgcacataagggattccaacaaggaactgtacaaacctgacctgatatttgtgaaggatgggcgtgcacttgtcgtggatgtgacagtacggtatgaagcagccaaatcatcgctggaggaagccgctgcagagaaagtgagaaagtacaaacacctggaaacggaagtaagacatctcacgaatgcaaaggacgttacttttgtgggctttcccctaggagcgcgggggaaatggcaccaagataactttaaacttttgactgagcttggcctctccaaatcgaggcaagtgaaaatggcagagactttttccacagtagcgctcttttcatctgtggacattgtacatatgtttgccagtagggccagaaaatctatggttatgtgataataggctgccttctgcggggcttgccttctggccatgcccttcttctctcccttgcacctgtacctcttggtctttgaataaagcctgagtaggaaggaccggtaaaaaaaaaaaaaaaaaaaaaaaaaaaaaaacgttgactaaaaaaaaaaaaaaaaaaaaaaaaaaaaaaaaaaaaaaaaaaaaaaaaaaaaaaaaaaaaaaaaaaaaaa

SEQ ID NO: 11392 - DNA, 4703 bp, synthetic construct
  source 1..4703: mol_type = other DNA
ggtctagttacaactgggcatcgctgcagagatcgcacctcctcgtggtcccgctggtagcccttcgaagggtgactaagtcgatctctgccccaggtacggagccgttgggactcaccagtccaacgtaactcctgcctaaattcggtgaaacaaattcctcggtaaaaagccccatggcttcttgcccgaaacctggccccccggtttcagcaggggcaatgagtttggaaagtggactgaccacccactccgttctcgccatcgaacgtggtcccaattcgttggcaaattccggatcagactttgggggggggggtctggggctaccgttacgcctattgagggtatcggtcggcactcagacctcccgctccgactgggtagacctggtgtcctggagccacccaggacccacgtctaagtcccagcaggttgacctggtgtctttatttcctaaacaccgggttgacctgttatccaaaaacgaccaggtagacctggtggctcaatttttaccatctaaatttccccccaatttggcagaaaatgatttggctttgctggtgaacttagagttctacagatcggatttgcatgtgtatgagtgtgttcattttgctgcacattgggagggattaagtggtttgcctgaggtgtatgaacaacttgcaccacaaccgtgtgtgggagaaactttacattctagcctcccacgagacagtgaactgtttgtgcctgaagaggggagcagcgagaaggagagcgaggacgcgccaaaaacatctcctccgacgcctgggaaacatggtttggaacagactggggaggaaaaagtgatggtgactgttcctgacaaaaatccaccttgtccttgctgtggtacccgggtaaactctgtgttgaatctgattgaacatctgaaagtgtcacacgggaaaaggggggtttgttttcggtgtgcaaaatgtggaaaggaaaatagtaactatcacagtgttgtttgtcattttaagaaatgcaggggtccagagacggagaaagccccagctggggagtggatttgtgaggtatgcaacagagattttacaaccaaaattggcctgggacaacacaagagattggcacacccagcagtgagaaatcaggaaaggatcgttgcttcccaaccgaaagaaacatcaaatagaggtgctcacaaaaggtgctggacaaaggaggaggaagaattactaataagactggaggctcagttcgagggaaacaaaaatattaataagcttattgcagaacacataaccaccaaaacagctaagcagatcagtgacaaaaggcgattgctgtccagaaagccagcagaggagccacgtgaggagcctggaacgtgtcatcacaccaggagagcagctgcgagcctgagaacggagcctgagatgagtcatcacgcccaggcagaggacagagataatggacctgggagacgccctctgccaggcagggcagctgccggagggagaacaatggacgagataagacgccaccctgataagggcaacggacagcagagacccaccaagcaaaaatcagaagaacagctgcaggcttactataaaaagacactagaggaacgactttcagctggggcacttaacaccttcccccgagcattcaagcaggtaatggaaggccgggatataaagctagtaatcaatcagacagcgcaggactgcttcggatgcctggaatccataagccaaataagaacggcaacccgagataaaaaggacacggtgacccgggagaaacacccaaagaaaccttttcagaagtggatgaagaagagagcaatcaaaaaaggtaattatcttcggttccagcgtttattttatcttgatagagggaaactggctaaaatcattttagatgatattgaatgcttgtcttgtgacataccactcagtgaaatttattcggtttttaaaacaagatgggaaacaactggtagctttaaaagccttggggactttaaaacttacgggaaggctgacaacactgccttcagagaattaattacggctaaagaaattgagaaaaatgtgcaggaaatgagcaaaggctcggctcccggtccagacgggattactcttggggacgtcgtaaagatggatcccgagttttcccggaccatggagattttcaatttatggttaacaactggtaaaatcccggacatggtgagggggtgcagaaccgttttgattccaaaatcaacccagccggatcgtttgaaagacattaataactggagacctatcacgatcggttccatcttgctgagactgttctccaggattatcacagctaggatgaccaaagcgtgccccctgaacccaaggcaaagaggctttatcagagcggcgggatgctctgaaaacttaaaactcctgcaaactataattaggtcggccaaaagcgaacacagaccactgggtgttgtattcgtggacatcgccaaggcttttgacaccgtaagccaccagcacatcctgcatgtgttgcagcaaagaggcgtggatccccacatcatcggtctggtgagcaatatgtacaaggacatcagtacgttcgtgaccacaaagaaggacacacacacagacaaaatccagatccgggttggagtaaagcagggtgacccgctgtcgccccttttatttaacctggcaatggaccctctattatgcaagctggaagagagtggcaacggattccaccgaggaggccacaccatcacagcgatggcatttgcagacgatctggttttgctgagcgactcctgggaaaatatggagaagaatattgagatactggaggccttctgcgacctgaccggactcaaaacacaggggcaaaagtgccacggcttttacatcaagccgacaaaggactcttacaccgtgaataactgcgctgcctggactatctacggcacacccctgaacatgatcaaccccggcgactctgagaaatacctcggcctgcagtttgacccgtggattggaatagcaaggtccggtctctccacaaaactagatttttggcttcagcggatcgatcaagcaccacttaaacctctgcagaaaactgatattctcaaaacatacaccatccctcggctgatctacatagctgaccactcagaagtgaaaactgcactactcgaaacccttgaccagaagatccggacagcggtcaaggaatggcttcacctacctccgtgcacctgcgatgccatcctgtactcgagcacgagagacggcggtttgggcatcaccaaattggcaggactgatccccagcgtgcaggcccgtagactgcatcggatcgcacagtcatctgacgatacgatgaaatgcttcatggaaaaagagaaaatggaacagctgcataagaaattgtggattcaagctggaggggacagagagaacataccctcgatttgggaagcaccaccgtcgagtgaaccaccaaacaacgtgagcacaaattcggaatgggaagcaccgacccagaaagataaatttccaaagccttgcaattggaggaaaaacgaattcaaaaaatggaccaaattggcatcccaaggccgcggaattgtaaattttgaaagagacaaaattagtaaccattggatccaatactacagacgcatacctcacaggaaactcctcactgcactacaactcagggccaacgtttaccccacgagagaatttctagccaggggtagacaagaccaatacatcaaggcgtgtaggcactgcgatgcggacattgaatcctgcgcccacatcatcggcaactgcccagtgacacaggacgcccgaatcaagaggcacaattacatctgcgaactgcttctcgaggaggcgaagaagaaggactgggtagtgttcaaggaaccgcacataagggattccaacaaggaactgtacaaacctgacctgatatttgtgaaggatgcccgtgcacttgtcgtggatgtgacagtacggtatgaagcagccaaatcatcgctggaggaagccgctgcagagaaagtgagaaagtacaaacacctggaaacggaagtaagacatctcacgaatgcaaaggacgttacttttgtgggctttcccctaggagcgcgggggaaatggcaccaagataactttaaacttttgactgagcttggcctctccaaatcgaggcaagtgaaaatggcagagactttttccacagtagcgctcttttcatctgtggacattgtacatatgtttgccagtagggccagaaaatctatggttatgtgataataggctgccttctgcggggcttgccttctggccatgcccttcttctctcccttgcacctgtacctcttggtctttgaataaagcctgagtaggaaggaccggtagacatgataagatacattgatgagtttggacaaaccacaactagaatgcagtgaaaaaaatgctttatttgtgaaatttgtgatgctattgctttatttgtaaccattataagctgcaataaacaagttaacaacaacaaaaaaaaaaaaaaaaaaaaaaaaaaaaaaacgttgactaaaaaaaaaaaaaaaaaaaaaaaaaaaaaaaaaaaaaaaaaaaaaaaaaaaaaaaaaaaaaaaaaaaaaa

SEQ ID NO: 11393 - DNA, 4499 bp, synthetic construct
  source 1..4499: mol_type = other DNA
ggtctagttacaactgggcatcgctgcagagatcgcacctcctcgtggtcccgctggtagcccttcgaagggtgactaagtcgatctctgccccaggtacggagccgttgggactcaccagtccaacgtaactcctgcctaaattcggtgaaacaaattcctcggtaaaaagccccatgcctaagagaaaggtgtccagcgccgagggcgctgccaaggaagagcctaaacggagaagcgccagactgagcgccaagccccccgccaaggtggaagccaagcctaagaaggccgccgctaaggacaagagcagcgataagaaagtccagaccaagggcaagcggggcgccaaaggcaaacaggccgaggtggccaaccaggagacaaaggaagatctgcctgctgagaacggcgaaaccaagaccgaggaatctccagcttctgacgaggccggagagaaggaggccaaaagcgacagcggctctgagacacctggaacaagcgagagcgccaccccggaatccctgtttgtgcctgaagaggggagcagcgagaaggagagcgaggacgcgccaaaaacatctcctccgacgcctgggaaacatggtttggaacagactggggaggaaaaagtgatggtgactgttcctgacaaaaatccaccttgtccttgctgtggtacccgggtaaactctgtgttgaatctgattgaacatctgaaagtgtcacacgggaaaaggggggtttgttttcggtgtgcaaaatgtggaaaggaaaatagtaactatcacagtgttgtttgtcattttaagaaatgcaggggtccagagacggagaaagccccagctggggagtggatttgtgaggtatgcaacagagattttacaaccaaaattggcctgggacaacacaagagattggcacacccagcagtgagaaatcaggaaaggatcgttgcttcccaaccgaaagaaacatcaaatagaggtgctcacaaaaggtgctggacaaaggaggaggaagaattactaataagactggaggctcagttcgagggaaacaaaaatattaataagcttattgcagaacacataaccaccaaaacagctaagcagatcagtgacaaaaggcgattgctgtccagaaagccagcagaggagccacgtgaggagcctggaacgtgtcatcacaccaggagagcagctgcgagcctgagaacggagcctgagatgagtcatcacgcccaggcagaggacagagataatggacctgggagacgccctctgccaggcagggcagctgccggagggagaacaatggacgagataagacgccaccctgataagggcaacggacagcagagacccaccaagcaaaaatcagaagaacagctgcaggcttactataaaaagacactagaggaacgactttcagctggggcacttaacaccttcccccgagcattcaagcaggtaatggaaggccgggatataaagctagtaatcaatcagacagcgcaggactgcttcggatgcctggaatccataagccaaataagaacggcaacccgagataaaaaggacacggtgacccgggagaaacacccaaagaaaccttttcagaagtggatgaagaagagagcaatcaaaaaaggtaattatcttcggttccagcgtttattttatcttgatagagggaaactggctaaaatcattttagatgatattgaatgcttgtcttgtgacataccactcagtgaaatttattcggtttttaaaacaagatgggaaacaactggtagctttaaaagccttggggactttaaaacttacgggaaggctgacaacactgccttcagagaattaattacggctaaagaaattgagaaaaatgtgcaggaaatgagcaaaggctcggctcccggtccagacgggattactcttggggacgtcgtaaagatggatcccgagttttcccggaccatggagattttcaatttatggttaacaactggtaaaatcccggacatggtgagggggtgcagaaccgttttgattccaaaatcaacccagccggatcgtttgaaagacattaataactggagacctatcacgatcggttccatcttgctgagactgttctccaggattatcacagctaggatgaccaaagcgtgccccctgaacccaaggcaaagaggctttatcagagcggcgggatgctctgaaaacttaaaactcctgcaaactataattaggtcggccaaaagcgaacacagaccactgggtgttgtattcgtggacatcgccaaggcttttgacaccgtaagccaccagcacatcctgcatgtgttgcagcaaagaggcgtggatccccacatcatcggtctggtgagcaatatgtacaaggacatcagtacgttcgtgaccacaaagaaggacacacacacagacaaaatccagatccgggttggagtaaagcagggtgacccgctgtcgccccttttatttaacctggcaatggaccctctattatgcaagctggaagagagtggcaacggattccaccgaggaggccacaccatcacagcgatggcatttgcagacgatctggttttgctgagcgactcctgggaaaatatggagaagaatattgagatactggaggccttctgcgacctgaccggactcaaaacacaggggcaaaagtgccacggcttttacatcaagccgacaaaggactcttacaccgtgaataactgcgctgcctggactatctacggcacacccctgaacatgatcaaccccggcgactctgagaaatacctcggcctgcagtttgacccgtggattggaatagcaaggtccggtctctccacaaaactagatttttggcttcagcggatcgatcaagcaccacttaaacctctgcagaaaactgatattctcaaaacatacaccatccctcggctgatctacatagctgaccactcagaagtgaaaactgcactactcgaaacccttgaccagaagatccggacagcggtcaaggaatggcttcacctacctccgtgcacctgcgatgccatcctgtactcgagcacgagagacggcggtttgggcatcaccaaattggcaggactgatccccagcgtgcaggcccgtagactgcatcggatcgcacagtcatctgacgatacgatgaaatgcttcatggaaaaagagaaaatggaacagctgcataagaaattgtggattcaagctggaggggacagagagaacataccctcgatttgggaagcaccaccgtcgagtgaaccaccaaacaacgtgagcacaaattcggaatgggaagcaccgacccagaaagataaatttccaaagccttgcaattggaggaaaaacgaattcaaaaaatggaccaaattggcatcccaaggccgcggaattgtaaattttgaaagagacaaaattagtaaccattggatccaatactacagacgcatacctcacaggaaactcctcactgcactacaactcagggccaacgtttaccccacgagagaatttctagccaggggtagacaagaccaatacatcaaggcgtgtaggcactgcgatgcggacattgaatcctgcgcccacatcatcggcaactgcccagtgacacaggacgcccgaatcaagaggcacaattacatctgcgaactgcttctcgaggaggcgaagaagaaggactgggtagtgttcaaggaaccgcacataagggattccaacaaggaactgtacaaacctgacctgatatttgtgaaggatgcccgtgcacttgtcgtggatgtgacagtacggtatgaagcagccaaatcatcgctggaggaagccgctgcagagaaagtgagaaagtacaaacacctggaaacggaagtaagacatctcacgaatgcaaaggacgttacttttgtgggctttcccctaggagcgcgggggaaatggcaccaagataactttaaacttttgactgagcttggcctctccaaatcgaggcaagtgaaaatggcagagactttttccacagtagcgctcttttcatctgtggacattgtacatatgtttgccagtagggccagaaaatctatggttatgtgataataggctgccttctgcggggcttgccttctggccatgcccttcttctctcccttgcacctgtacctcttggtctttgaataaagcctgagtaggaaggaccggtagacatgataagatacattgatgagtttggacaaaccacaactagaatgcagtgaaaaaaatgctttatttgtgaaatttgtgatgctattgctttatttgtaaccattataagctgcaataaacaagttaacaacaacaaaaaaaaaaaaaaaaaaaaaaaaaaaaaaacgttgactaaaaaaaaaaaaaaaaaaaaaaaaaaaaaaaaaaaaaaaaaaaaaaaaaaaaaaaaaaaaaaaaaaaaaa

SEQ ID NO: 11394 - DNA, 6035 bp, synthetic construct
  source 1..6035: mol_type = other DNA
ggtctagttacaactgggcatcgctgcagagatcgcacctcctcgtggtcccgctggtagcccttcgaagggtgactaagtcgatctctgccccaggtacggagccgttgggactcaccagtccaacgtaactcctgcctaaattcggtgaaacaaattcctcggtaaaaagccccatggcccctaagaaaaagcggaaggtgaatatcagcggctctagctgcggcagccccaacagcgccgacaccagcagcgacttcaaggacctgtggaccaagctgaaggaatgccacgaccgggaagtgcagggactccaggtgaaggtcaccaaactcaagcaagaaagaatcctggacgcccagagactggaagaattcttcaccaagaaccagcagctgagagagcagcagaaagtgctgcacgagacaatcaaggttctggaagatagactgcgggccggcctgtgcgacagatgcgccgtgaccgaggaacacatgcgcaaaaagcagcaggagttcgagaacattagacagcaaaatctgaaattgatcacagagctgatgaacgagagaaacacactgcaggaggagaacaagaagctgagcgagcagctgcaacagaagatcgagaatgatcagcaacaccaggccgctgagctggaatgtgaagaggacgtgatccccgacagcccaatcacagctttcagcttttctggcgtgaacagactgaggcggaaggaaaacccccacgtgcggtacatcgagcagacccataccaagctggaacacagcgtgtgtgccaacgagatgagaaaggtgtccaagtcctccacccatccccagcacaaccctaacgaaaatgagatcctggtggctgatacctacgaccagtctcagagccctatggccaaggcccacggcaccagctcttatacccctgataagagctccttcaacctggccaccgtggtggccgagacactgggcctgggcgtgcaggaggaaagcgagacacagggcccaatgagccctctgggagatgagctgtaccactgcctggaaggcaaccacaagaaacagccttttgagtccggctccgagactcctggaacaagcgagagcgctacacctgagggcagccctaagagaaaggtgtccagcgccgagggcgctgccaaggaagagcctaaacggagaagcgccagactgagcgccaagccccccgccaaggtggaagccaagcctaagaaggccgccgctaaggacaagagcagcgataagaaagtccagaccaagggcaagcggggcgccaaaggcaaacaggccgaggtggccaaccaggagacaaaggaagatctgcctgctgagaacggcgaaaccaagaccgaggaatctccagcttctgacgaggccggagagaaggaggccaaaagcgacagcggctctgagacacctggaacaagcgagagcgccaccccggaatccgcttcttgcccgaaacctggccccccggtttcagcaggggcaatgagtttggaaagtggactgaccacccactccgttctcgccatcgaacgtggtcccaattcgttggcaaattccggatcagactttgggggggggggtctggggctaccgttacgcctattgagggtatcggtcggcactcagacctcccgctccgactgggtagacctggtgtcctggagccacccaggacccacgtctaagtcccagcaggttgacctggtgtctttatttcctaaacaccgggttgacctgttatccaaaaacgaccaggtagacctggtggctcaatttttaccatctaaatttccccccaatttggcagaaaatgatttggctttgctggtgaacttagagttctacagatcggatttgcatgtgtatgagtgtgttcattttgctgcacattgggagggattaagtggtttgcctgaggtgtatgaacaacttgcaccacaaccgtgtgtgggagaaactttacattctagcctcccacgagacagtgaactgtttgtgcctgaagaggggagcagcgagaaggagagcgaggacgcgccaaaaacatctcctccgacgcctgggaaacatggtttggaacagactggggaggaaaaagtgatggtgactgttcctgacaaaaatccaccttgtccttgctgtggtacccgggtaaactctgtgttgaatctgattgaacatctgaaagtgtcacacgggaaaaggggggtttgttttcggtgtgcaaaatgtggaaaggaaaatagtaactatcacagtgttgtttgtcattttaagaaatgcaggggtccagagacggagaaagccccagctggggagtggatttgtgaggtatgcaacagagattttacaaccaaaattggcctgggacaacacaagagattggcacacccagcagtgagaaatcaggaaaggatcgttgcttcccaaccgaaagaaacatcaaatagaggtgctcacaaaaggtgctggacaaaggaggaggaagaattactaataagactggaggctcagttcgagggaaacaaaaatattaataagcttattgcagaacacataaccaccaaaacagctaagcagatcagtgacaaaaggcgattgctgtccagaaagccagcagaggagccacgtgaggagcctggaacgtgtcatcacaccaggagagcagctgcgagcctgagaacggagcctgagatgagtcatcacgcccaggcagaggacagagataatggacctgggagacgccctctgccaggcagggcagctgccggagggagaacaatggacgagataagacgccaccctgataagggcaacggacagcagagacccaccaagcaaaaatcagaagaacagctgcaggcttactataaaaagacactagaggaacgactttcagctggggcacttaacaccttcccccgagcattcaagcaggtaatggaaggccgggatataaagctagtaatcaatcagacagcgcaggactgcttcggatgcctggaatccataagccaaataagaacggcaacccgagataaaaaggacacggtgacccgggagaaacacccaaagaaaccttttcagaagtggatgaagaagagagcaatcaaaaaaggtaattatcttcggttccagcgtttattttatcttgatagagggaaactggctaaaatcattttagatgatattgaatgcttgtcttgtgacataccactcagtgaaatttattcggtttttaaaacaagatgggaaacaactggtagctttaaaagccttggggactttaaaacttacgggaaggctgacaacactgccttcagagaattaattacggctaaagaaattgagaaaaatgtgcaggaaatgagcaaaggctcggctcccggtccagacgggattactcttggggacgtcgtaaagatggatcccgagttttcccggaccatggagattttcaatttatggttaacaactggtaaaatcccggacatggtgagggggtgcagaaccgttttgattccaaaatcatcaaagccggatcgtttgaaagacattaataactggagacctatcacgatcggttccatcttgctgagactgttctccaggattgtaacagctaggctgagcaaagcgtgccccctgaacccaaggcaaagaggctttatcagagcggcgggatgctctgaaaacttaaaactcctgcaaactataatttggtcggccaaaagagaacacagaccactgggtgttgtattcgtggacatcgccaaggcttttgacaccgtaagccaccagcacatcattcatgctttgcagcaaagagaggtggatccccacatcgtcggtctggtgagcaatatgtacgagaacatcagtacgtatatcaccacaaagaggaacacacacacagacaaaatccagatccgggttggagtaaagcagggtgacccgatgtcgccccttttatttaacctggcaatggaccctctattatgcaagctggaagagagtggcaaaggataccaccgaggacagagcagcatcacagcgatggcatttgcagacgatctggttttgctgagcgactcctgggaaaatatgaatacaaatattagcatactggagaccttctgcaatctgaccggactcaaaacacaggggcaaaagtgccacggcttttacatcaagccgacaaaggactcttacaccatcaatgactgcgctgcctggactatcaacggcacacccctgaacatgatcgaccccggcgaatctgagaaatacctcggcctgcagtttgacccgtggattggaatagcaaggtccggtctctccacaaaactagatttttggcttcagcggatcgatcaagcaccacttaaacctctgcagaaaactgatattctcaaaacatacaccatccctcggctgatctacatagctgaccactcagaagtgaaaagcgcactactcgaaacccttgaccagaagatccggacagcggtcaaggaatggcttcacctacctccgtgcacctgcgatgccatcctgtactcgagcacgagagacggcggtttgggcatcaccaaattggcaggactgatccccagcgtgcaggcccgtagactgcatcggatcgcacagtcatctgacgatacgatgaaatgcttcatggaaaaagagaaaatggaacagctgcataagaaattgtggattcaagctggaggggacagagagaacataccctcgatttgggaagcaccaccgtcgagtgaaccaccaaacaacgtgagcacaaattcggaatgggaagcaccgacccagaaagataaatttccaaagccttgcaattggaggaaaaacgaattcaaaaaatggaccaaattggcatcccaaggccgcggaattgtaaattttgaaagagacaaaattagtaaccattggatccaatactacagacgcatacctcacaggaaactcctcactgcactacaactcagggccaacgtttaccccacgagagaatttctagccaggggtagacaagaccaatacatcaaggcgtgtaggcactgcgatgcggacaacgaatcctgcgcccacatcatcggcaactgcccagtgacacaggacgcccgaatcaagaggcacaattacatctgcgaactgcttctcgaggaggcgaagaagaaggactgggtagtgttcaaggaaccgcacataagggattccaacaaggaactgtacaaacctgacctgatatttgtgaaggatgcccgtgcacttgtcgtggatgtgacagtacggtatgaagcagccaaatcatcgctggaggaagccgctgcagagaaagtgagaaagtacaaacacctggaaacggaagtaagacatctcacgaatgcaaaggacgttacttttgtgggctttcccctaggagcgcgggggaaatggcaccaagataactttaaacttttgactgagcttggcctctccaaatcgaggcaagtgaaaatggcagagactttttccacagtagcgctcttttcatctgtggacattgtacatatgtttgccagtagggccagaaaatctatggttatgaggaagaagaggaggcagaggaggaggtgataataggctgccttctgcggggcttgccttctggccatgcccttcttctctcccttgcacctgtacctcttggtctttgaataaagcctgagtaggaaggaccggtagacatgataagatacattgatgagtttggacaaaccacaactagaatgcagtgaaaaaaatgctttatttgtgaaatttgtgatgctattgctttatttgtaaccattataagctgcaataaacaagttaacaacaacaaaaaaaaaaaaaaaaaaaaaaaaaaaaaaacgttgactaaaaaaaaaaaaaaaaaaaaaaaaaaaaaaaaaaaaaaaaaaaaaaaaaaaaaaaaaaaaaaaaaaaaaa

SEQ ID NO: 11395 - DNA, 4439 bp, synthetic construct
  source 1..4439: mol_type = other DNA
gaaataagagagaaaagaagagtaagaagaaatataagagaattcgccaccatggcttcttgcccgaaacctggccccccggtttcagcaggggcaatgagtttggaaagtggactgaccacccactccgttctcgccatcgaacgtggtcccaattcgttggcaaattccggatcagactttgggggggggggtctggggctaccgttacgcctattgagggtatcggtcggcactcagacctcccgctccgactgggtagacctggtgtcctggagccacccaggacccacgtctaagtcccagcaggttgacctggtgtctttatttcctaaacaccgggttgacctgttatccaaaaacgaccaggtagacctggtggctcaatttttaccatctaaatttccccccaatttggcagaaaatgatttggctttgctggtgaacttagagttctacagatcggatttgcatgtgtatgagggcgttcataaggctgcacattgggagggattaagtggtttgcctgaggtgtatgaacaacttgcaccacaaccgtgtgtgggagaaactttacattctagcctcccacgagacagtgaactgtttgtgcctgaagaggggagcagcgagaaggagagcgaggacgcgccaaaaacatctcctccgacgcctgggaaacatggtttggaacagactggggaggaaaaagtgatggtgactgttcctgacaaaaatccaccttgtccttgctgtggtacccgggtaaactctgtgttgaatctgattgaacatctgaaagtgtcacacgggaaaaggggggtttgttttcggtgtgcaaaatgtggaaaggaaaatagtaactatcacagtgttgtttgtcattttaagaaatgcaggggtccagagacggagaaagccccagctggggagtggatttgtgaggtatgcaacagagattttacaaccaaaattggcctgggacaacacaagagattggcacacccagcagtgagaaatcaggaaaggatcgttgcttcccaaccgaaagaaacatcaaatagaggtgctcacaaaaggtgctggacaaaggaggaggaagaattactaataagactggaggctcagttcgagggaaacaaaaatattaataagcttattgcagaacacataaccaccaaaacagctaagcagatcagtgacaaaaggcgattgctgtccagaaagccagcagaggagccacgtatggagcctggaacgtgtcatcacaccaggagagcagctgcgagcctgagaacggagcctgagatgagtcatcacgcccaggcagaggacagagataatggacctgggagacgccctctgccaggcagggcagctgccggagggagaacaatggacgagataagacgccaccctgataagggcaacggacagcagagacccaccaagcaaaaatcagaagaacagctgcaggcttactataaaaagacactagaggaacgactttcagctggggcacttaacaccttcccccgagcattcaagcaggtaatggaaggccgggatataaagctagtaatcaatcagacagcgcaggactgcttcggatgcctggaatccataagccaaataagaacggcaacccgagataaaaaggacacggtgacccgggagaaacacccaaagaaaccttttcagaagtggatgaagaagagagcaatcaaaaaaggtaattatcttcggttccagcgtttattttatcttgatagagggaaactggctaaaatcattttagatgatattgaatgcttgtcttgtgacataccactcagtgaaatttattcggtttttaaaacaagatgggaaacaactggtagctttaaaagccttggggactttaaaacttacgggaaggctgacaacactgccttcagagaattaattacggctaaagaaattgagaaaaatgtgcaggaaatgagcaaaggctcggctcccggtccagacgggattactcttggggacgtcgtaaagatggatcccgagttttcccggaccatggagattttcaatttatggttaacaactggtaaaatcccggacatggtgagggggtgcagaaccgttttgattccaaaatcatcagacccggatcgtttgaaagacattaataactggagacctatcacgatcggttccatcttgctgagactgttctccaggattgtaacagctaggctgagcaaagcgtgccccctgaacccaaggcaaagaggctttatcagagcggcgggatgctctgaaaacttaaaactcctgcaaactataatttggtcggccaaaagagaacacagaccactgggtgttgtattcgtggacatcgccaaggcttttgacaccgtaagccaccagcacatcattcatgctttgcagcaaagagaggtggatccccacatcgtcggtctggtgagcaatatgtacgagaacatcagtacgtatatcaccacaaagaggaacacacacacagacaaaatccagatccgggttggagtaaagcagggtgacccgatgtcgccccttttatttaacctggcaatggaccctctattatgcaagctggaagagagtggcaaaggataccaccgaggacagagcagcatcacagcgatggcatttgcagacgatctggttttgctgagcgactcctgggaaaatatgaatacaaatattagcatactggagaccttctgcaatctgaccggactcaaaacacaggggcaaaagtgccacggcttttacatcaagccgacaaagaagtcttacaccatcaatgactgcgctgcctggactatcaacggcacacccctgaacatgatcgaccccggcgaatctgagaaatacctcggcctgcagtttgacccgtggattggaatagcaaggtccggtctctccacaaaactagatttttggcttcagcggatcgatcaagcaccacttaaacctctgcagaaactggatattctcaaaacatacaccatccctcggctgatctacatagctgaccactcagaagtgaaaagcgcactactcgaaacccttgaccagaagatccggacagcggtcaaggaatggcttcacctacctccgtgcacctgcgatgccatcctgtactcgagcacgagagacggcggtttgggcatcaccaaattggcaggactgatccccagcgtgcaggcccgtagactgcatcggatcgcacagtcatctgacgatacgatgaaatgcttcatggaaaaagagaaaatggaacagctgcataagaaattgtggattcaagctggaggggacagagagaacataccctcgatttgggaagcaccaccgtcgagtgaaccaccaaacaacgtgagcacaaattcggaatgggaagcaccgacccagaaagataaatttccaaagccttgcaattggaggaaaaacgaattcaaaaaatggaccaaattggcatcccaaggccgcggaattgtaaattttgaaagagacaaaattagtaaccattggatccaatactacagacgcatacctcacaggaaactcctcactgcactacaactcagggccaacgtttaccccacgagagaatttctagccaggggtagacaagaccaatacatcaaggcgtgtaggcactgcgatgcggacaacgaatcctgcgcccacatcatcggcaactgcccagtgacacaggacgcccgaatcaagaggcacaattacatctgcgaactgcttctcgaggaggcgaagaagaaggactgggtagtgttcaaggaaccgcacataagggattccaacaaggaactgtacaaacctgacctgatatttgtgaaggatgggcgtgcacttgtcgtggatgtgacagtacggtatgaagcagccaaatcatcgctggaggaagccgctgcagagaaagtgagaaagtacaaacacctggaaacggaagtaagacatctcacgaatgcaaaggacgttacttttgtgggctttcccctaggagcgcgggggaaatggcaccaagataactttaaacttttgactgagcttggcctctccaaatcgaggcaagtgaaaatggcagagactttttccacagtagcgctcttttcatctgtggacattgtacatatgtttgccagtagggccagaaaatctatggttatgtgataataggctgccttctgcggggcttgccttctggccatgcccttcttctctcccttgcacctgtacctcttggtctttgaataaagcctgagtaggaaggaccggtaaaaaaaaaaaaaaaaaaaaaaaaaaaaaaacgttgactaaaaaaaaaaaaaaaaaaaaaaaaaaaaaaaaaaaaaaaaaaaaaaaaaaaaaaaaaaaaaaaaaaaaaa

SEQ ID NO: 11396 - DNA, 5407 bp, synthetic construct
  source 1..5407: mol_type = other DNA
ggtctagttacaactgggcatcgctgcagagatcgcacctcctcgtggtcccgctggtagcccttcgaagggtgactaagtcgatctctgccccaggtacggagccgttgggactcaccagtccaacgtaactcctgcctaaattcggtgaaacaaattcctcggtaaaaagccccatgggaactgcactaacaccgctcctgacgaagttcgccacgcgctacgagatgggtaccacgcctgaagaagtggcgaacacgctcaagcagacctgtttcaagggccaggtcaatgattcgcagatggtcgccctgctgatcgtggcagaccagtacaagcttaaccccttcaccaaggagttgtacgcattccccgacaagaacaacggcatcgtgccggttgttggtgtggatggctgggctcggatcatcaacgagaacccacagttcgatggcatggaattctcaatggaccagcagggaaccgaatgcacctgcaagatctatcggaaggaccgcagccatgccatcagcgcgactgagtacatggccgagtgcaagcggaacacccagccttggcagtcccatccgcgccggatgcttcgccacaaggcaatgatccagtgcgcacgcctcgcgttcgggttcgccggcatatacgaccaggacgaggccgagcggatcgttgaacgagacgtcactcccgcagagcagtacgaggacgtcagcgaggcgatctgcctgatcaaggactccccaacaatggaggacttgcaggcagcattcagcaatgcctggaaagcctataagacaaagggcgcgcgcgaccagcttacggcggccaaggaccagcggaagaaagaattgctggacgcccctatagacgttgaattcgaggagaccggcgatgatcgagcagcgtctggaggatctagcggaggatcctctggcagcgagacaccaggaacaagcgagtcagcaacaccagagagcagtggcggcagcagcggcggcagcagcatggcttcttgcccgaaacctggccccccggtttcagcaggggcaatgagtttggaaagtggactgaccacccactccgttctcgccatcgaacgtggtcccaattcgttggcaaattccggatcagactttgggggggggggtctggggctaccgttacgcctattgagggtatcggtcggcactcagacctcccgctccgactgggtagacctggtgtcctggagccacccaggacccacgtctaagtcccagcaggttgacctggtgtctttatttcctaaacaccgggttgacctgttatccaaaaacgaccaggtagacctggtggctcaatttttaccatctaaatttccccccaatttggcagaaaatgatttggctttgctggtgaacttagagttctacagatcggatttgcatgtgtatgagtgtgttcattttgctgcacattgggagggattaagtggtttgcctgaggtgtatgaacaacttgcaccacaaccgtgtgtgggagaaactttacattctagcctcccacgagacagtgaactgtttgtgcctgaagaggggagcagcgagaaggagagcgaggacgcgccaaaaacatctcctccgacgcctgggaaacatggtttggaacagactggggaggaaaaagtgatggtgactgttcctgacaaaaatccaccttgtccttgctgtggtacccgggtaaactctgtgttgaatctgattgaacatctgaaagtgtcacacgggaaaaggggggtttgttttcggtgtgcaaaatgtggaaaggaaaatagtaactatcacagtgttgtttgtcattttccaaaatgcaggggtccagagacggagaaagccccagctggggagtggatttgtgaggtatgcaacagagattttacaaccaaaattggcctgggacaacacaagagattggcacacccagcagtgagaaatcaggaaaggatcgttgcttcccaaccgaaagaaacatcaaatagaggtgctcacaaaaggtgctggacaaaggaggaggaagaattactaataagactggaggctcagttcgagggaaacaaaaatattaataagcttattgcagaacacataaccaccaaaacagctaagcagatcagtgacaaaaggcgattgctgtccagaaagccagcagaggagccacgtgaggagcctggaacgtgtcatcacaccaggagagcagctgcgagcctgagaacggagcctgagatgagtcatcacgcccaggcagaggacagagataatggacctgggagacgccctctgccaggcagggcagctgccggagggagaacaatggacgagataagacgccaccctgataagggcaacggacagcagagacccaccaagcaaaaatcagaagaacagctgcaggcttactataaaaagacactagaggaacgactttcagctggggcacttaacaccttcccccgagcattcaagcaggtaatggaaggccgggatataaagctagtaatcaatcagacagcgcaggactgcttcggatgcctggaatccataagccaaataagaacggcaacccgagataaaaagtacacggtgacccgggagaaacacccaaagaaaccttttcagaagtggatgaaggacagagcaatcaaaaaaggtaattatcttcggttccagcgtttattttatcttgatagagggaaactggctaaaatcattttagatgatattgaatgcttgtcttgtgacataccactcagtgaaatttattcggtttttaaaacaagatgggaaacaactggtagctttaaaagccttggggactttaaaacttacgggaaggctgacaacactgccttcagagaattaattacggctaaagaaattgagaaaaatgtgcaggaaatgagcaaaggctcggctcccggtccagacgggattactcttggggacgtcgtaaagatggatcccgagttttccctgaccatggagattttcaatttatggttaacaactggtaaaatcccggacatggtgagggggtgcagaaccgttttgattccaaaatcatcaaagccggatcgtttgaaagacattaataactggagacctatcacgatcggttccatcttgctgagactgttctccaggattgtaacagctaggctgagcaaagcgtgccccctgaacccaaggcaaagaggctttatcagagcggcgggatgctctgaaaacttaaaactcctgcaaactataatttggtcggccaaaagagaacacagaccactgggtgttgtattcgtggacatcgccaaggcttttgacaccgtaagccaccagcacatcattcatgctttgcagcaaagagaggtggatccccacatcgtcggtctggtgagcaatatgtacgagaacatcagtacgtatatcaccacaaagaggaacacacacacagacaaaatccagatccgggttggagtaaagcagggtgacccgatgtcgccccttttatttaacctggcaatggaccctctattatgcaagctggaagagagtggcaaaggataccaccgaggacagagcagcatcacagcgatggcatttgcagacgatctggttttgctgagcgactcctgggaaaatatgaatacaaatattagcatactggagaccttctgcaatctgaccggactcaaaacacaggggcaaaagtgccacggcttttacatcaagccgacaaaggactcttacaccatcaatgactgcgctgcctggactatcaacggcacacccctgaacatgatcgaccccggcgaatctgagaaatacctcggcctgcagtttgacccgtggattggaatagcaaggtccggtctctccacaaaactagatttttggcttcagcggatcgatcaagcaccacttaaacctctgcagaaaactgatattctcaaaacatacaccatccctcggctgatctacatagctgaccactcagaagtgaaaactgcactactcgaaacccttgaccagaagatccggacagcggtcaaggaatggcttcacctacctccgtgcacctgcgatgccatcctgtactcgagcacgagagacggcggtttgggcatcaccaaattggcaggactgatccccagcgtgcaggcccgtagactgcatcggatcgcacagtcatctgacgatacgatgaaatgcttcatggaaaaagagaaaatggaacagctgcataagaaattgtggattcaagctggaggggacagagagaacataccctcgatttgggaagcaccaccgtcgagtgaaccaccaaacaacgtgagcacaaattcggaatgggaagcaccgacccagaaacccaaatttccaaagccttgcaattggaggaaaaacgaattcaaaaaatggaccaaattggcatcccaaggccgcggaattgtaaattttgaaagagacaaaattagtaaccattggatccaatactacagacgcatacctcacaggaaactcctcactgcactacaactcagggccaacgtttaccccacgagagaatttctagccaggggtagacaagaccaatacatcaaggcgtgtaggcactgcgatgcggacattgaatcctgcgcccacatcatcggcaactgcccagtgacacaggacgcccgaatcaagaggcacaattacatctgcgaactgcttctcgaggaggcgaagaagaaggactgggtagtgttcaaggaaccgcacataagggattccaacaaggaactgtacaaacctgacctgatatttgtgaaggatgcccgtgcacttgtcgtggatgtgacagtacggtatgaagcagccaaatcatcgctggaggaagccgctgcagagaaagtgagaaagtacaaacacctggaaacggaagtaagacatctcacgaatgcaaaggacgttacttttgtgggctttcccctaggagcgcgggggaaatggcaccaagataactttaaacttttgactgagcttggcctctccaaatcgaggcaagtgaaaatggcagagactttttccacagtagcgctcttttcatctgtggacattgtacatatgtttgccagtagggccagaaaatctatggttatgtgataataggctgccttctgcggggcttgccttctggccatgcccttcttctctcccttgcacctgtacctcttggtctttgaataaagcctgagtaggaaggaccggtaaaaaaaaaaaaaaaaaaaaaaaaaaaaaaacgttgactaaaaaaaaaaaaaaaaaaaaaaaaaaaaaaaaaaaaaaaaaaaaaaaaaaaaaaaaaaaaaaaaaaaaaa

SEQ ID NO: 11397 - DNA, 5075 bp, synthetic construct
  source 1..5075: mol_type = other DNA
ggtctagttacaactgggcatcgctgcagagatcgcacctcctcgtggtcccgctggtagcccttcgaagggtgactaagtcgatctctgccccaggtacggagccgttgggactcaccagtccaacgtaactcctgcctaaattcggtgaaacaaattcctcggtaaaaagccccatgcctaagagaaaggtgtccagcgccgagggcgctgccaaggaagagcctaaacggagaagcgccagactgagcgccaagccccccgccaaggtggaagccaagcctaagaaggccgccgctaaggacaagagcagcgataagaaagtccagaccaagggcaagcggggcgccaaaggcaaacaggccgaggtggccaaccaggagacaaaggaagatctgcctgctgagaacggcgaaaccaagaccgaggaatctccagcttctgacgaggccggagagaaggaggccaaaagcgacagcggctctgagacacctggaacaagcgagagcgccaccccggaatccgcttcttgcccgaaacctggccccccggtttcagcaggggcaatgagtttggaaagtggactgaccacccactccgttctcgccatcgaacgtggtcccaattcgttggcaaattccggatcagactttgggggggggggtctggggctaccgttacgcctattgagggtatcggtcggcactcagacctcccgctccgactgggtagacctggtgtcctggagccacccaggacccacgtctaagtcccagcaggttgacctggtgtctttatttcctaaacaccgggttgacctgttatccaaaaacgaccaggtagacctggtggctcaatttttaccatctaaatttccccccaatttggcagaaaatgatttggctttgctggtgaacttagagttctacagatcggatttgcatgtgtatgagtgtgttcattttgctgcacattgggagggattaagtggtttgcctgaggtgtatgaacaacttgcaccacaaccgtgtgtgggagaaactttacattctagcctcccacgagacagtgaactgtttgtgcctgaagaggggagcagcgagaaggagagcgaggacgcgccaaaaacatctcctccgacgcctgggaaacatggtttggaacagactggggaggaaaaagtgatggtgactgttcctgacaaaaatccaccttgtccttgctgtggtacccgggtaaactctgtgttgaatctgattgaacatctgaaagtgtcacacgggaaaaggggggtttgttttcggtgtgcaaaatgtggaaaggaaaatagtaactatcacagtgttgtttgtcattttaagaaatgcaggggtccagagacggagaaagccccagctggggagtggatttgtgaggtatgcaacagagattttacaaccaaaattggcctgggacaacacaagagattggcacacccagcagtgagaaatcaggaaaggatcgttgcttcccaaccgaaagaaacatcaaatagaggtgctcacaaaaggtgctggacaaaggaggaggaagaattactaataagactggaggctcagttcgagggaaacaaaaatattaataagcttattgcagaacacataaccaccaaaacagctaagcagatcagtgacaaaaggcgattgctgtccagaaagccagcagaggagccacgtgaggagcctggaacgtgtcatcacaccaggagagcagctgcgagcctgagaacggagcctgagatgagtcatcacgcccaggcagaggacagagataatggacctgggagacgccctctgccaggcagggcagctgccggagggagaacaatggacgagataagacgccaccctgataagggcaacggacagcagagacccaccaagcaaaaatcagaagaacagctgcaggcttactataaaaagacactagaggaacgactttcagctggggcacttaacaccttcccccgagcattcaagcaggtaatggaaggccgggatataaagctagtaatcaatcagacagcgcaggactgcttcggatgcctggaatccataagccaaataagaacggcaacccgagataaaaaggacacggtgacccgggagaaacacccaaagaaaccttttcagaagtggatgaagaagagagcaatcaaaaaaggtaattatcttcggttccagcgtttattttatcttgatagagggaaactggctaaaatcattttagatgatattgaatgcttgtcttgtgacataccactcagtgaaatttattcggtttttaaaacaagatgggaaacaactggtagctttaaaagccttggggactttaaaacttacgggaaggctgacaacactgccttcagagaattaattacggctaaagaaattgagaaaaatgtgcaggaaatgagcaaaggctcggctcccggtccagacgggattactcttggggacgtcgtaaagatggatcccgagttttcccggaccatggagattttcaatttatggttaacaactggtaaaatcccggacatggtgagggggtgcagaaccgttttgattccaaaatcatcaaagccggatcgtttgaaagacattaataactggagacctatcacgatcggttccatcttgctgagactgttctccaggattgtaacagctaggctgagcaaagcgtgccccctgaacccaaggcaaagaggctttatcagagcggcgggatgctctgaaaacttaaaactcctgcaaactataatttggtcggccaaaagagaacacagaccactgggtgttgtattcgtggacatcgccaaggcttttgacaccgtaagccaccagcacatcattcatgctttgcagcaaagagaggtggatccccacatcgtcggtctggtgagcaatatgtacgagaacatcagtacgtatatcaccacaaagaggaacacacacacagacaaaatccagatccgggttggagtaaagcagggtgacccgatgtcgccccttttatttaacctggcaatggaccctctattatgcaagctggaagagagtggcaaaggataccaccgaggacagagcagcatcacagcgatggcatttgcagacgatctggttttgctgagcgactcctgggaaaatatgaatacaaatattagcatactggagaccttctgcaatctgaccggactcaaaacacaggggcaaaagtgccacggcttttacatcaagccgacaaaggactcttacaccatcaatgactgcgctgcctggactatcaacggcacacccctgaacatgatcgaccccggcgaatctgagaaatacctcggcctgcagtttgacccgtggattggaatagcaaggtccggtctctccacaaaactagatttttggcttcagcggatcgatcaagcaccacttaaacctctgcagaaaactgatattctcaaaacatacaccatccctcggctgatctacatagctgaccactcagaagtgaaaactgcactactcgaaacccttgaccagaagatccggacagcggtcaaggaatggcttcacctacctccgtgcacctgcgatgccatcctgtactcgagcacgagagacggcggtttgggcatcaccaaattggcaggactgatccccagcgtgcaggcccgtagactgcatcggatcgcacagtcatctgacgatacgatgaaatgcttcatggaaaaagagaaaatggaacagctgcataagaaattgtggattcaagctggaggggacagagagaacataccctcgatttgggaagcaccaccgtcgagtgaaccaccaaacaacgtgagcacaaattcggaatgggaagcaccgacccagaaagataaatttccaaagccttgcaattggaggaaaaacgaattcaaaaaatggaccaaattggcatcccaaggccgcggaattgtaaattttgaaagagacaaaattagtaaccattggatccaatactacagacgcatacctcacaggaaactcctcactgcactacaactcagggccaacgtttaccccacgagagaatttctagccaggggtagacaagaccaatacatcaaggcgtgtaggcactgcgatgcggacattgaatcctgcgcccacatcatcggcaactgcccagtgacacaggacgcccgaatcaagaggcacaattacatctgcgaactgcttctcgaggaggcgaagaagaaggactgggtagtgttcaaggaaccgcacataagggattccaacaaggaactgtacaaacctgacctgatatttgtgaaggatgcccgtgcacttgtcgtggatgtgacagtacggtatgaagcagccaaatcatcgctggaggaagccgctgcagagaaagtgagaaagtacaaacacctggaaacggaagtaagacatctcacgaatgcaaaggacgttacttttgtgggctttcccctaggagcgcgggggaaatggcaccaagataactttaaacttttgactgagcttggcctctccaaatcgaggcaagtgaaaatggcagagactttttccacagtagcgctcttttcatctgtggacattgtacatatgtttgccagtagggccagaaaatctatggttatgaggaagaagaggaggcagaggaggaggtgataataggctgccttctgcggggcttgccttctggccatgcccttcttctctcccttgcacctgtacctcttggtctttgaataaagcctgagtaggaaggaccggtagacatgataagatacattgatgagtttggacaaaccacaactagaatgcagtgaaaaaaatgctttatttgtgaaatttgtgatgctattgctttatttgtaaccattataagctgcaataaacaagttaacaacaacaaaaaaaaaaaaaaaaaaaaaaaaaaaaaaacgttgactaaaaaaaaaaaaaaaaaaaaaaaaaaaaaaaaaaaaaaaaaaaaaaaaaaaaaaaaaaaaaaaaaaaaaa

SEQ ID NO: 11398 - DNA, 6035 bp, synthetic construct
  source 1..6035: mol_type = other DNA
ggtctagttacaactgggcatcgctgcagagatcgcacctcctcgtggtcccgctggtagcccttcgaagggtgactaagtcgatctctgccccaggtacggagccgttgggactcaccagtccaacgtaactcctgcctaaattcggtgaaacaaattcctcggtaaaaagccccatggcccctaagaaaaagcggaaggtgaatatcagcggctctagctgcggcagccccaacagcgccgacaccagcagcgacttcaaggacctgtggaccaagctgaaggaatgccacgaccgggaagtgcagggactccaggtgaaggtcaccaaactcaagcaagaaagaatcctggacgcccagagactggaagaattcttcaccaagaaccagcagctgagagagcagcagaaagtgctgcacgagacaatcaaggttctggaagatagactgcgggccggcctgtgcgacagatgcgccgtgaccgaggaacacatgcgcaaaaagcagcaggagttcgagaacattagacagcaaaatctgaaattgatcacagagctgatgaacgagagaaacacactgcaggaggagaacaagaagctgagcgagcagctgcaacagaagatcgagaatgatcagcaacaccaggccgctgagctggaatgtgaagaggacgtgatccccgacagcccaatcacagctttcagcttttctggcgtgaacagactgaggcggaaggaaaacccccacgtgcggtacatcgagcagacccataccaagctggaacacagcgtgtgtgccaacgagatgagaaaggtgtccaagtcctccacccatccccagcacaaccctaacgaaaatgagatcctggtggctgatacctacgaccagtctcagagccctatggccaaggcccacggcaccagctcttatacccctgataagagctccttcaacctggccaccgtggtggccgagacactgggcctgggcgtgcaggaggaaagcgagacacagggcccaatgagccctctgggagatgagctgtaccactgcctggaaggcaaccacaagaaacagccttttgagtccggctccgagactcctggaacaagcgagagcgctacacctgagggcagccctaagagaaaggtgtccagcgccgagggcgctgccaaggaagagcctaaacggagaagcgccagactgagcgccaagccccccgccaaggtggaagccaagcctaagaaggccgccgctaaggacaagagcagcgataagaaagtccagaccaagggcaagcggggcgccaaaggcaaacaggccgaggtggccaaccaggagacaaaggaagatctgcctgctgagaacggcgaaaccaagaccgaggaatctccagcttctgacgaggccggagagaaggaggccaaaagcgacagcggctctgagacacctggaacaagcgagagcgccaccccggaatccgcttcttgcccgaaacctggccccccggtttcagcaggggcaatgagtttggaaagtggactgaccacccactccgttctcgccatcgaacgtggtcccaattcgttggcaaattccggatcagactttgggggggggggtctggggctaccgttacgcctattgagggtatcggtcggcactcagacctcccgctccgactgggtagacctggtgtcctggagccacccaggacccacgtctaagtcccagcaggttgacctggtgtctttatttcctaaacaccgggttgacctgttatccaaaaacgaccaggtagacctggtggctcaatttttaccatctaaatttccccccaatttggcagaaaatgatttggctttgctggtgaacttagagttctacagatcggatttgcatgtgtatgagtgtgttcattttgctgcacattgggagggattaagtggtttgcctgaggtgtatgaacaacttgcaccacaaccgtgtgtgggagaaactttacattctagcctcccacgagacagtgaactgtttgtgcctgaagaggggagcagcgagaaggagagcgaggacgcgccaaaaacatctcctccgacgcctgggaaacatggtttggaacagactggggaggaaaaagtgatggtgactgttcctgacaaaaatccaccttgtccttgctgtggtacccgggtaaactctgtgttgaatctgattgaacatctgaaagtgtcacacgggaaaaggggggtttgttttcggtgtgcaaaatgtggaaaggaaaatagtaactatcacagtgttgtttgtcattttaagaaatgcaggggtccagagacggagaaagccccagctggggagtggatttgtgaggtatgcaacagagattttacaaccaaaattggcctgggacaacacaagagattggcacacccagcagtgagaaatcaggaaaggatcgttgcttcccaaccgaaagaaacatcaaatagaggtgctcacaaaaggtgctggacaaaggaggaggaagaattactaataagactggaggctcagttcgagggaaacaaaaatattaataagcttattgcagaacacataaccaccaaaacagctaagcagatcagtgacaaaaggcgattgctgtccagaaagccagcagaggagccacgtgaggagcctggaacgtgtcatcacaccaggagagcagctgcgagcctgagaacggagcctgagatgagtcatcacgcccaggcagaggacagagataatggacctgggagacgccctctgccaggcagggcagctgccggagggagaacaatggacgagataagacgccaccctgataagggcaacggacagcagagacccaccaagcaaaaatcagaagaacagctgcaggcttactataaaaagacactagaggaacgactttcagctggggcacttaacaccttcccccgagcattcaagcaggtaatggaaggccgggatataaagctagtaatcaatcagacagcgcaggactgcttcggatgcctggaatccataagccaaataagaacggcaacccgagataaaaaggacacggtgacccgggagaaacacccaaagaaaccttttcagaagtggatgaagaagagagcaatcaaaaaaggtaattatcttcggttccagcgtttattttatcttgatagagggaaactggctaaaatcattttagatgatattgaatgcttgtcttgtgacataccactcagtgaaatttattcggtttttaaaacaagatgggaaacaactggtagctttaaaagccttggggactttaaaacttacgggaaggctgacaacactgccttcagagaattaattacggctaaagaaattgagaaaaatgtgcaggaaatgagcaaaggctcggctcccggtccagacgggattactcttggggacgtcgtaaagatggatcccgagttttcccggaccatggagattttcaatttatggttaacaactggtaaaatcccggacatggtgagggggtgcagaaccgttttgattccaaaatcatcaaagccggatcgtttgaaagacattaataactggagacctatcacgatcggttccatcttgctgagactgttctccaggattgtaacagctaggctgagcaaagcgtgccccctgaacccaaggcaaagaggctttatcagagcggcgggatgctctgaaaacttaaaactcctgcaaactataatttggtcggccaaaagagaacacagaccactgggtgttgtattcgtggacatcgccaaggcttttgacaccgtaagccaccagcacatcattcatgctttgcagcaaagagaggtggatccccacatcgtcggtctggtgagcaatatgtacgagaacatcagtacgtatatcaccacaaagaggaacacacacacagacaaaatccagatccgggttggagtaaagcagggtgacccgatgtcgccccttttatttaacctggcaatggaccctctattatgcaagctggaagagagtggcaaaggataccaccgaggacagagcagcatcacagcgatggcatttgcagacgatctggttttgctgagcgactcctgggaaaatatgaatacaaatattagcatactggagaccttctgcaatctgaccggactcaaaacacaggggcaaaagtgccacggcttttacatcaagccgacaaaggactcttacaccatcaatgactgcgctgcctggactatcaacggcacacccctgaacatgatcgaccccggcgaatctgagaaatacctcggcctgcagtttgacccgtggattggaatagcaaggtccggtctctccacaaaactagatttttggcttcagcggatcgatcaagcaccacttaaacctctgcagaaaactgatattctcaaaacatacaccatccctcggctgatctacatagctgaccactcagaagtgaaaactgcactactcgaaacccttgaccagaagatccggacagcggtcaaggaatggcttcacctacctccgtgcacctgcgatgccatcctgtactcgagcacgagagacggcggtttgggcatcaccaaattggcaggactgatccccagcgtgcaggcccgtagactgcatcggatcgcacagtcatctgacgatacgatgaaatgcttcatggaaaaagagaaaatggaacagctgcataagaaattgtggattcaagctggaggggacagagagaacataccctcgatttgggaagcaccaccgtcgagtgaaccaccaaacaacgtgagcacaaattcggaatgggaagcaccgacccagaaagataaatttccaaagccttgcaattggaggaaaaacgaattcaaaaaatggaccaaattggcatcccaaggccgcggaattgtaaattttgaaagagacaaaattagtaaccattggatccaatactacagacgcatacctcacaggaaactcctcactgcactacaactcagggccaacgtttaccccacgagagaatttctagccaggggtagacaagaccaatacatcaaggcgtgtaggcactgcgatgcggacattgaatcctgcgcccacatcatcggcaactgcccagtgacacaggacgcccgaatcaagaggcacaattacatctgcgaactgcttctcgaggaggcgaagaagaaggactgggtagtgttcaaggaaccgcacataagggattccaacaaggaactgtacaaacctgacctgatatttgtgaaggatgcccgtgcacttgtcgtggatgtgacagtacggtatgaagcagccaaatcatcgctggaggaagccgctgcagagaaagtgagaaagtacaaacacctggaaacggaagtaagacatctcacgaatgcaaaggacgttacttttgtgggctttcccctaggagcgcgggggaaatggcaccaagataactttaaacttttgactgagcttggcctctccaaatcgaggcaagtgaaaatggcagagactttttccacagtagcgctcttttcatctgtggacattgtacatatgtttgccagtagggccagaaaatctatggttatgaggaagaagaggaggcagaggaggaggtgataataggctgccttctgcggggcttgccttctggccatgcccttcttctctcccttgcacctgtacctcttggtctttgaataaagcctgagtaggaaggaccggtagacatgataagatacattgatgagtttggacaaaccacaactagaatgcagtgaaaaaaatgctttatttgtgaaatttgtgatgctattgctttatttgtaaccattataagctgcaataaacaagttaacaacaacaaaaaaaaaaaaaaaaaaaaaaaaaaaaaaacgttgactaaaaaaaaaaaaaaaaaaaaaaaaaaaaaaaaaaaaaaaaaaaaaaaaaaaaaaaaaaaaaaaaaaaaaa

SEQ ID NO: 11399-11416 - skipped (18 entries)

SEQ ID NO: 11417 - DNA, 4571 bp, synthetic construct
  source 1..4571: mol_type = other DNA
gaaataagagagaaaagaagagtaagaagaaatataagagaattcgccaccatgtcaaaacctgaccctttaaacgtaaatatgtccactccattcttggggacacaaatgcgcctgctcagggtttcaactggaactcaaacatctatgtcagactgggcagactgggcacagaggctctgtggtacagctaccaggtctgcactgtgtaaggtggtcccggtgtccttactatccagacatcagacagaattactagctatgggccatgggagtcagatgcctctaaatgcaccccttaacaccccggacttaacagaaagtgaattggcttgtttggttttggactgggagttttacagaacagatttgtccgctagtagttttaaccttgttcaattttctgctaaccgagagagtttgagtgggctgcctgaggtgtatgaacagccgactccgtttcaacctgaaggggagaaaatctgccccccaagagactgtgaagcagttttggtcggggaaggggaggggagcagtgaggaggtcacaccagaaccatcgccccctgaaccagagacaacctccgtggcagcatctccaactctgcctgtaaccaacgtggaacagtcgtcggagagccccatcacagtaattgtgccggataaaaatccttcatgtccctgctgtggtattcgagcgagcggggtatcgggtttgattgagcatttgcgggaggttcacaggaggagggaggtttgctttcggtgttctaaatgtgagaaagaaaatactaattaccatagcattatttgtcattttcctaaatgcaagggtaaagaggaaacatctgcgccagccggggaatggtcctgtgaggtatgtggacgagattttaatactaaaattggcttgggacaacataaaagattggcacacccagctgttagaaatcaggaaagggtcgctgcttcccacccaaaagaaaattctaaacgaggagctcataaaaaatgttggactgaagaagaggaaaaattattaatagaattaatagctcagttcgaggggcatgcaaatattaataaattaattgcggaacatattacaaccaaaacagctaaacaaattagtgaaaaaaggagactgctctccaaaaaactaatggtagtggaggcagaatgtgaacctgggccaagtcatcggaccaggagagcagctgcagagataaggaagggagctgagatgaatcaccataatgaggatgctgctgaggacaatggagctgggaggggtcccctgaccaggagagcagctgcccggggggaaacaaaagaagagataagccagtttcctgataaggccaacgatcagcaggaggccagtagcagtgggaggggcccagtgaccaggagagcagctgcaggaaagaaaacaaaaaagagtattgatcaccctactgataaggccaacggccagcaggtagccatcagcactagaaggggttgtttgaatagaggagtgactgccggggtagaaacaatagagggctcgagtcacctccctgataaggacagtgacggacagggcacccccagccgggagaaggagggacaattacaagatcactatcaagaagtcatcggagcctggttatcagatgggaggatcaatacctttccagaggcattcaaagggttgttagggaaacgagagatacaggcaacgatcaatcagtcaatactggattgttttgggggcattgattcaaaaagccaggtgaacaaaatgactcgagataagaaagataaaaagccagggagacctccccagaagtggatgaaaaagagagccatcaaaagaggtagctatcttcgcttccaacgtcttttccatcttgataggggaaaattagccaagattgttttggacaatatcgaatgtttgacgtgcgatatcccacccagtgaaatttattccgtttttaaggccaggtgggaaacagcaggcaaatttaccagtcttggggactttaaatttactgaaaaggtggacaatagtgcattcagggatttaattacagctaaggaagtagaaaagaacatgcaagaaatgagcaaaggctcggctcctggtccagatggaattactctgagagacattcaaaaaatggatcctaagctctccaggaccacagagattttcaacctttggttggctgcaggcaaaattccggatggggtgagggaatgcaggactgtcttaattccaaaatcaacaaaaccagaacgcttaaaggacattaacaattggagaccaattacaatcggatccaccttgcttagattattttccaggattttaacagccagactaagcaaggcatgccccctcaacccaagacagaagggcttcattcaagcagccggatgctcagaaaacctgcaactcctgcaatccataatttggtcagcaaaacgggaacacaggcccctgggtgtcgtatttgtggacatcgcaaaggcttttgacacagtaagccacaagcacattctacacgttctgcagcggaggggagtggatcctcacatcatcggcctggtgagtgatatgtatgaaaacattcatacttctatcaccacgaagaaagcacgtacggatcgcatccagatccgagttggagttaaacagggcgacccgatgtctccccttctattcaatctggcaatggaccccctgctgtgcgaactggaaacgaacggcaggggacaccaccgcggcacaaattgcatcacagccatggcgtttgctgacgacctggtcctactgagtgactcctgggaggacatgaagagcaacatcaagatattggaggccttctgcgatctcaccggcctcaaaacgcagggagagaagtgccacggcttttacatcaagccgacgaaggactcgtacacggtcaacgactgtgctgcttggactataaacggcactcccctgaacatgattcttcccggtgagtccgagaaatacctgggcctgcagatagacccatggactggattggcaaaatcggacctctctacaaaactcgactcatggctcgagcaaatcgatagagttccactcaaaccgctgcagaaaattgaactcctgaaaacatacaccatccctcggttgacatacgtggctgaccattcggacttgaaagttagtttcctggagacattggatcagaagattcggacaatagttaaagattggctacacctgcctgcatgtacctgcgatgccatcctatactctagcacgaaggatggcggcctgggcatcactaaattagcaaagctgattcctagcgtacaggctaggagactacacagaatagcccaatcatcggacgaaaccatgaagcaatttctccacagggacaagatggaagcaatgtaccagaaactgtgggttcaagcgggaggagatagggagaaagttcctgcaatctgggaagctagacctacgatcgagtcacctaatttacaagaggtaggggtttcttctgagtgggaagcaccgactctgaaaaacaaatttcccaagccgtgcaattggagaaagatagaatttgaaaaatggaccaatttgatatctcagggacggggaatagggaatttcaagggggaccaaataagtaacaattggctgcaacactataggaacatacctcacaggaaactccttactgctgtacagctgagggccaatgtatatccaactagggaatttttagccaggggtaggcaggataaatacatcagaacgtgcagacattgcgacgcggccaacgaaacgtgcgcacatattattggcaattgccccataactcaggacgcgagaatcaagaggcacaactatatttgtcaagtgttgtcggagaaagcaatagggaaggactggatagtatataaagaaccgcacatcagggactccaacaaagaactttataaaccggacctgatatttgtgaaagacaaccgagcgtacgtcgtggatgtgaccgtgcgatacgaatcggacgagacctctttggagatggcggccacggagaaagtggacaagtacaaacacctgaccaaagagatacgaacgatcaccaacgcgaaagacattgtttttatgggctttcccctcggagctcgggggaaatggtaccaagggaactttgaacttttgaaagcccttggactctccaaatcggatcgagaaaagactgcccggtccttgtcatccatagcactcatgtcatctgtggacatcgtccacatatttgccagcaaatccaggacttgcactacactgtgataataggctgccttctgcggggcttgccttctggccatgcccttcttctctcccttgcacctgtacctcttggtctttgaataaagcctgagtaggaaggaccggtaaaaaaaaaaaaaaaaaaaaaaaaaaaaaaacgttgactaaaaaaaaaaaaaaaaaaaaaaaaaaaaaaaaaaaaaaaaaaaaaaaaaaaaaaaaaaaaaaaaaaaaaa

SEQ ID NO: 11418 - DNA, 4571 bp, synthetic construct
  source 1..4571: mol_type = other DNA
gaaataagagagaaaagaagagtaagaagaaatataagagaattcgccaccatgagcaagccagatcctctgaatgtgaacatgagcacccccttcctgggcacccagatgagactgctgagagttagcaccgggacacagaccagcatgagcgactgggcagattgggcccagagactttgcggcaccgctacaagaagcgccctgtgcaaggttgtgcctgtgagcctgctgagcagacaccagaccgagcttctggctatgggccacggctctcagatgcctctgaacgcccccttaaacacccccgaccttaccgagagcgagcttgcctgcctggttctggactgggagttctacagaaccgacctgagcgccagcagcttcaacctggtgcagttcagcgccaacagagagagccttagcggcctgcctgaggtttacgagcagcctacccctttccagcccgagggcgagaagatttgccctcccagagattgcgaggctgtgctggtgggcgagggagaaggctcttctgaggaggttacccctgagcccagcccccctgaacctgagacaacatctgtggccgcttctcccaccctgcccgttaccaacgttgagcaaagcagcgagagccccatcactgtgatcgtgcccgacaagaaccccagctgcccctgttgtggaatcagagcctctggcgtttcgggacttatcgagcacctgagagaggttcacagaagaagagaggtttgcttcagatgcagcaaatgcgagaaggagaacaccaactaccacagcatcatctgccacttcccaaaatgcaagggcaaggaggagacaagcgcccctgccggcgaatggtcttgtgaggtttgtggcagagacttcaacaccaagatcggcctgggccagcacaagagactggcccatcctgccgttagaaaccaggagagagttgccgccagccaccccaaggagaactccaagagaggcgctcataagaaatgctggaccgaggaggaggagaagctccttatcgaactcatcgcccagttcgagggccacgccaacatcaacaagctcatcgccgagcacatcaccaccaagaccgccaagcagatcagcgagaagagaaggctgctgtccaagaagctcatggtggtggaggccgaatgcgagcctggaccttctcacagaaccagaagagctgccgccgagatcagaaagggcgccgagatgaaccaccacaacgaggacgccgctgaggataacggcgctggaagaggacctcttaccagaagggccgctgccagaggcgagacaaaggaagaaatcagccagttccccgacaaggccaacgaccagcaggaggcttcttctagcggcagaggccctgtgaccagacgggctgctgctggcaaaaagaccaagaagagcatcgaccaccccacagataaggccaatggccagcaggttgccatcagcactagacggggctgtttgaacagaggcgttaccgccggagttgagacaatcgagggcagcagccacttgccagacaaggactcagatggccagggcacccctagcagagagaaggagggccagttacaggaccactaccaggaggttatcggcgcctggctgtcagatggcagaatcaacaccttccccgaggccttcaagggcctgcttggcaagagagagatccaggccaccatcaaccagagcatcctggactgcttcggcggcatcgacagcaagagccaagtcaacaagatgaccagagacaagaaggacaagaagcccggcagacccccccaaaaatggatgaagaagagggccatcaagagagggagctacctgagattccagagactgttccacctggacagaggcaagctggccaagatcgtgctggacaacatcgagtgcctcacctgcgacatcccccctagcgagatctacagcgtgttcaaggccagatgggagacagccggcaagttcaccagcctgggcgacttcaagttcacagagaaagtcgacaacagcgccttcagagatctcatcaccgccaaggaggtcgagaagaacatgcaggagatgagcaagggctctgctccaggccccgatggcatcacacttagagacatccagaagatggaccccaagctgagcaggaccaccgagatcttcaacctctggctggctgccggcaagatccccgatggagttagagagtgcagaaccgtgctcatccccaagagcaccaagcccgagagactgaaggacatcaataactggaggcccatcaccatcggcagcaccctgcttagactgttcagcagaatcctcaccgccagactgagcaaggcctgccctctgaaccctagacagaagggcttcatccaggccgctggctgcagcgagaacttacagcttctgcagtctattatatggagcgccaagagggagcacagacccctaggggttgtgttcgtggacatcgccaaggccttcgacaccgtgtcccacaagcacatcctgcacgtgctgcagagaagaggcgtcgaccctcacatcatcggtttggtgagcgacatgtacgagaacatccacaccagcatcaccacaaagaaggccagaacagacagaatccagatcagagtcggcgtcaagcagggcgaccccatgtctcctcttctgttcaacttggcgatggaccctctgctgtgcgagctggagacaaatggcagagggcaccacagaggcaccaactgcatcaccgctatggccttcgccgacgaccttgtgctgcttagcgacagctgggaggacatgaagagcaacatcaagatcctggaggccttctgtgacctcaccggcctgaaaacccagggggagaagtgtcatggcttctacatcaagcccaccaaggacagctacactgtaaacgactgcgccgcctggaccatcaacggcacccctttgaacatgatcctgcccggcgagagcgaaaagtacctgggcctgcagatcgatccctggaccggcttagctaagagcgacctgtccaccaagctggacagctggctggagcagatcgacagagtgcccctgaagcctctgcagaagatcgagttactaaagacctacaccatccccagactcacctacgtcgccgaccatagcgacctgaaggtgtccttcctggagacactggaccagaagatcagaaccatcgtgaaggactggctgcacctgcccgcttgcacctgtgatgctatcctgtacagcagcaccaaggatggcggcctcggcatcaccaagcttgccaagcttatccccagcgtgcaggccagaagattgcacagaatcgcccagagcagcgacgagacaatgaagcagttcctgcacagagataagatggaggccatgtaccagaagctgtgggtgcaggctggcggcgacagagagaaagtgcctgctatctgggaggccagacccaccatcgagagcccaaacctgcaggaggttggcgtgtccagcgaatgggaagctcctaccctgaagaacaagttccccaagccctgcaactggagaaagatcgaattcgagaaatggaccaacctcatcagccagggcagaggcatcggcaacttcaagggggaccagatcagcaacaactggctccagcactacagaaacatcccccacagaaagctgctcaccgccgtgcagctgagagccaacgtttaccctaccagagagttcctggccagaggcagacaggacaagtacatcagaacctgcagacactgcgacgccgccaacgagacatgcgcccacataattggcaattgccccattacccaggacgccagaatcaagagacacaactacatctgccaggtgctgagcgagaaggccatcggcaaggactggatcgtgtacaaggagccccacatcagagacagcaacaaggagctgtacaagccggatctcatcttcgtgaaagacaacagagcctacgtcgtggacgtcaccgtgcggtacgagtcagacgagacatccctggagatggccgctaccgagaaggtcgacaagtataagcacctcaccaaggagatcaggaccatcaccaacgccaaggacatcgtgttcatgggcttcccccttggcgctcgcggaaaatggtaccagggcaacttcgagctgctgaaggccctgggcttaagcaagagcgacagggaaaaaaccgccagaagcctgagcagcatcgccctcatgagcagcgtcgacatcgtgcacatcttcgcctccaagagccgtacttgtaccaccctgtgataataggctgccttctgcggggcttgccttctggccatgcccttcttctctcccttgcacctgtacctcttggtctttgaataaagcctgagtaggaaggaccggtaaaaaaaaaaaaaaaaaaaaaaaaaaaaaaacgttgactaaaaaaaaaaaaaaaaaaaaaaaaaaaaaaaaaaaaaaaaaaaaaaaaaaaaaaaaaaaaaaaaaaaaaa

SEQ ID NO: 11419 - DNA, 4571 bp, synthetic construct
  source 1..4571: mol_type = other DNA
gaaataagagagaaaagaagagtaagaagaaatataagagaattcgccaccatgtctaagccagatcctctgaatgtaaacatgtctactcctttccttggcactcagatgcgtttgcttcgtgtgtctactggcacgcagacttctatgagcgactgggccgactgggctcagcgtttatgcggcactgctactcgttctgctctttgcaaggttgtgcctgtgtctcttctttctcgtcaccagactgagcttcttgctatgggccacggctctcagatgcctctgaacgctcctctgaacactcccgaccttactgagagcgagcttgcttgccttgtgctggactgggagttctacaggacagacctttctgcttcttctttcaaccttgtgcagttctctgccaacagggagagcctttctggccttcctgaggtttacgagcagcctactcccttccagcctgagggcgagaagatttgccctcctcgtgactgcgaggctgtgcttgtgggcgagggagaaggctcttctgaggaggttactcctgagccttctcctcccgagcctgagactacttctgtggctgcttctcctactcttcctgtgacgaacgttgagcagagctctgagagccctattactgtgattgtgcccgacaagaacccttcttgcccttgctgcggcattcgtgcttctggcgttagcggccttattgagcaccttcgtgaggttcataggaggagggaggtttgcttccgttgctctaaatgcgagaaggagaacacgaactaccactctattatttgccacttccccaaatgcaagggcaaggaggagacttctgctcctgctggcgaatggtcttgcgaggtttgtggtagagacttcaacactaagattggccttggccagcacaagaggcttgctcaccctgctgtgaggaaccaggaaagggttgctgcttcccaccctaaggagaactcgaaacgaggcgctcacaagaaatgctggacggaggaggaggaaaagcttcttatcgagcttattgctcagttcgagggccacgccaacatcaacaagcttatcgctgagcacattactactaagactgctaagcagatttctgaaaagcgcaggcttctttctaagaagcttatggtggtggaggctgaatgcgagcctggcccttctcatcgtactcgtcgtgctgctgctgagattcgtaagggcgctgagatgaaccaccacaacgaggacgctgctgaggacaacggcgctggaagaggacctcttactcgtagggctgctgctcgtggcgagactaaggaagagatttctcagttccccgacaaggccaacgaccagcaggaggcttcttctagcggcaggggacctgtgactcgtagagccgctgctggaaaaaagactaagaaatcaatcgaccaccctacggacaaggcgaacggccagcaggttgctatttctactagacggggctgtttgaacaggggcgttactgctggcgttgagactattgagggctcttctcacctcccagacaaggacagcgacggccagggcactccttctagagagaaggagggccagcttcaggaccactaccaggaggttattggcgcttggcttagcgacggcaggatcaacactttccctgaggctttcaagggccttcttggcaagagggagattcaggctactatcaaccagagcatcttagactgcttcggaggcatagactctaagtcgcaggtcaacaagatgactcgtgacaagaaggacaagaagcctggccgtcctcctcagaaatggatgaagaagcgtgctattaagcgaggctcttaccttcgtttccagcgtctttttcacttagacaggggcaagcttgctaagattgtgttggacaacattgagtgccttacttgcgacattcctccttctgagatttactctgtgttcaaggctcgttgggagactgctggcaagttcacttctcttggcgacttcaagttcacggaaaaagtcgacaactctgcattccgagatcttattactgctaaggaggttgagaagaacatgcaggagatgtctaagggctctgccccaggcccagacggcattactcttcgtgatattcagaagatggaccctaagctttctcgtactactgagattttcaacctgtggcttgctgctgggaagattcccgacggcgttcgtgagtgccgtactgtgcttattcctaagtctactaagcctgagcgtcttaaagatataaacaactggcgtcctattactattggctctactcttcttcgtcttttctctcgtattcttactgctcgtcttagcaaggcttgtccactgaaccctcgtcagaagggcttcattcaggctgctggctgctctgagaaccttcagcttcttcagagcatcatttggtctgctaagagggagcaccgtcctttaggtgtcgtgttcgtggacattgctaaggctttcgacactgtgtctcacaagcacattcttcacgtgcttcagcgtcgtggcgtcgaccctcacattatcggtcttgtgagcgacatgtacgagaacattcacacttctattactacgaagaaggctcgtacggaccgtattcagattcgtgtgggcgttaagcagggcgaccctatgtctcctcttcttttcaacttggctatggaccctcttctgtgcgagcttgagacgaacggcaggggccatcatcgtggaacgaactgcatcactgctatggctttcgccgacgaccttgtgcttcttagcgactcttgggaggacatgaagagcaacattaagattcttgaggccttctgcgaccttacgggccttaagactcagggggagaagtgccacggcttctacattaagcctactaaggactcttacactgtgaacgactgcgctgcttggactatcaacggcactcctctcaacatgattcttcctggcgagtctgagaagtaccttggccttcagatcgacccttggactggccttgctaagtccgacctttctactaagttggactcttggcttgaacaaatagaccgtgtgcctcttaagcctcttcagaaaattgagctcttaaaaacttacactattcctcgtcttacttacgttgccgaccacagcgaccttaaggtgtctttccttgaaacgttagaccagaagattcgtactattgtgaaggactggcttcaccttcctgcttgcacttgcgacgctattctttactcttctactaaagacggcggccttggcattactaagctggctaagcttattccctctgtgcaggctcgtcgtctgcaccgtattgcccagtctagcgacgagactatgaagcagttcttgcatcgtgataagatggaggctatgtaccagaagctttgggtgcaggctggcggagatagggagaaagtgcctgctatttgggaggctcgtcctactattgagtctcccaaccttcaagaggtcggcgtgtctagcgaatgggaggcccctactcttaagaacaagttccctaagccttgcaactggaggaagattgagttcgagaaatggacaaaccttatttctcagggcaggggcattggcaacttcaagggcgaccagattagcaacaactggttgcagcactacaggaacattcctcacaggaagcttctcactgctgtgcagcttcgtgccaacgtgtaccctactcgtgagttccttgctaggggccgtcaggacaagtacattcgtacttgccgtcactgcgacgctgccaacgagacttgcgctcatatcattgggaactgccccatcactcaggacgctcgtattaagcgtcacaactacatttgccaggtgctttctgagaaggctattggcaaggactggattgtgtacaaggagcctcacattcgagactcaaacaaggagctttacaagcccgatcttattttcgtgaaggacaaccgtgcttacgttgtggacgttactgtgcgttacgagtcagatgagacttcgctcgaaatggctgctactgagaaggtcgacaagtataagcaccttactaaggagattaggactattacgaacgctaaggacattgtgttcatgggcttccctcttggcgctcgggggaaatggtaccagggcaacttcgagcttcttaaggctcttggcctttctaagtcggaccgagaaaagactgctcgttctctttcttctattgctcttatgtctagcgtcgacattgtgcacattttcgcttctaagtctaggacttgcactactctttgataataggctgccttctgcggggcttgccttctggccatgcccttcttctctcccttgcacctgtacctcttggtctttgaataaagcctgagtaggaaggaccggtaaaaaaaaaaaaaaaaaaaaaaaaaaaaaaacgttgactaaaaaaaaaaaaaaaaaaaaaaaaaaaaaaaaaaaaaaaaaaaaaaaaaaaaaaaaaaaaaaaaaaaaaa

SEQ ID NO: 11420 - DNA, 3986 bp, synthetic construct
  source 1..3986: mol_type = other DNA
gaaataagagagaaaagaagagtaagaagaaatataagagaattcgccaccatgggttggtctgggcggatttggttcgtcacagttgccacccagacaaaatactcggattgggcatttacggttcattccatcacgaaccctgagctggcaggggacgggattgcagatttgagaggactggaatttgtgaatagcgagaagggatattatgtggggcattccccttcccgatccagccttctggctactttaccggaggtatatgaaactccgagggtgatgggcaaagtcaccagcccgagttctgtgctgaccgaacatgagggagatagaacatcttctcccccaagaacaccacctcctattcttgagaccggggcagaccttccacaggagggcacacctgtggtaaaggtcccggatgataatccagcgtgtccatgctgcggtaatcgaataggaaggatttcggggcttatcgatcacttaaagagaacccatggaaagaaaaagatcctctttcaatgtgccaaatgtgggagaacaaatctgaaacatcacagtatcgcttgtcacgttccaaagtgcaaaggcgccaaggggaccagcccattaaggggctgggcctgcgaggaatgcaatagaacatttgggactaaaattggcttaagtcagcataagcggcttgctcacccagttactaggaatatagagcgaataacagcttcccgcccgaaagaggaaagtgcacgaggtgcacaccgtcggtgttggtctgaagaggaagtggagttgctcaagaagttggaaaaacagtatgaagggaataagaatataaacaaactaattgcagaacaccttccatcaaaaacagcaaagcagataagtgacaaaagaaggggactgataaaaagtccatcaaagaaaaatgggaaagatctgacgttgcgggaacaactcacggaggaaggagaacatctaattgagagtggctcccaagaaggtgggggactacggtcccactaccgtaagtcgattgcagaatggataagatctcagaaaataacgtcactcaggaaaatctttgagagagtgattgaagggaaagaagatctcccatccatagtcgatgaagctgcccaggattgctatgcatgcctgaaaagagatctcactgaaggggaaggtcgacaaattcaaaagatccgagagatccgcaggacccacccacaaaaaccatcaaaacaatggacaaaaaaaagggccagaaaacgagggcagttcctacggttccagcggctgttctacttggatagagggaaattggccggtataatcctggacgacgtggaatccctcaaatgtggtattccacttgacgtggtgcatgaagtattcaagtcaagatgggaatcacccggaacattcaagggcctgggtacttttaagaccattggtcaggcagacaattctgctttccaagctatgattaccatgaaggagattaagaaaaacatccgagaaatgaataaaaatgcggctccagggccggatgggatttccttgcgggacctcatgaagattgatccccagtgtgcgaaattaatggaattatttaatttgtggttgttaaccgggtatataccggatggggttaaaaattgtagaacaatattgataccaaaatcaactgtaccagaaaagttaaatgatgtgaataattggagacctataacgattggctcgattatattgagactattttcaaaaatattaacggcacgattaactaaggcatgccctattaacatacgacagaggggttttataaagtcatctggttgttctgaaaatctgaaattattacaactgataattagatatgcaaaaagagaacacaggccccttggggtggtctttgtcgacctggctaaagcatttgatacggtgagccactctcacatactgtcggtattaaaacaaaagggtgtggatgaacatataataaaactaattgaaaactcgtattataacatcaaaacctatattgatttgaaaaatgaaaaatctgactctattggaattcgaattggcgtaaaacaaggcgatccaatgtctccaattttgtttaacttatctgtcgatcctctattatgtaaacttgaagaaatgggtaatggatttcaatgtcatagccaaaatgtaacagcactggccttcgccgacgatttagtattactaagtgggtcctgggagggcatgcaaaataatataacaattgtagagaccttttgtgagctcactggtctcaagatgcagggggaaaagtgccacggcttttatatcaagccaacaaaagattcctatacgatcaatgactgtcccgtgtggactatcaatggcaccccccttaatatgattgaaccaggtagttctgagaaatacttgggtctttatgtcgacccgtggataggaatatctaaaccagaactactggagaaagttgacagatggcttgtgaaagtgggcaaggcaccattaaaaccttttcagaaagtcgacatcttgaaaggatacctgatcccgagagtaatatacctcgcggatcaagcaaatttaaaaccaacatatttagaatccattgacttggctatacgaactggagtcaaggaatggttgcacctaccagcgtgcacgtgtgacgccatcctttattcgaatactcaggatggagggttaggaatcagcagattggcagcactgattccgagtgtgcaggttcggagactgcacagaattgcccaaacctctgacgaagttttaaaaactatcgtcaaaagagaaggaatagaaagagaatttgagaaattatggttgatggccggtggtgataaggaaaggataccatctatatgggacccaaaaactgttatgataatatcggaaacgggcggtgaccaaatattgtcggaatgggagattcccaatccaaaactaatttatccaaaaccctgtaactggagaaaaagggaatttaataattggactaaattactgagccaaggccgaggtattgtaaattttgaaaaagataaaataagtaataattggttaatacactataggggcattcctcaaaggaaattaattacagcattacaattacgggcgaatatatacccgacgagggaatttttagctagaggacggtcggaaacttatattaaatcctgccgtcactgtcaggccgataatgagacttgcgcacatataattggctactgtccatctgtacaagatgcgagaattaaaagacataatcaaatctgtcatatattggcagaagaagctaagagaaaagattggttggtatatcaagaaccattattaagagatcaacaaaatgaattatataaaccggatttaatttttgttaaagggaatcaagcaatagtaacggatataacaataagatatgaaacaactattacaacgttggaagaggctgccttagaaaaagcaaagaaatatgtacatctagaatcgcaagtccaggatctgacaaatacatctgttataaattttacaggctttcctttgggatctcgtggcaaatggtaccaaggtaactacaaaatactaaatgaactgggtctctccaactcccgacaggagaaggtcgccagacgattatcaaactatgctttattcagctcggtggatatcattcacatgtttgcgagtaaagcgagaacggaggtaagatgataataggctgccttctgcggggcttgccttctggccatgcccttcttctctcccttgcacctgtacctcttggtctttgaataaagcctgagtaggaaggaccggtaaaaaaaaaaaaaaaaaaaaaaaaaaaaaaacgttgactaaaaaaaaaaaaaaaaaaaaaaaaaaaaaaaaaaaaaaaaaaaaaaaaaaaaaaaaaaaaaaaaaaaaaa

SEQ ID NO: 11421 - DNA, 3986 bp, synthetic construct
  source 1..3986: mol_type = other DNA
gaaataagagagaaaagaagagtaagaagaaatataagagaattcgccaccatgggatggtcgggaagaatttggttcgtgactgtggctactcagactaaatacagcgactgggctttcactgtgcactctattacgaaccctgagcttgctggcgacggcatcgcggatcttcgtggccttgaattcgtgaactctgagaagggctactacgttggccactctccttctcgttcttctcttcttgctactcttcctgaggtttacgagactcctcgtgtgatgggcaaggttacttctccttcttctgtgcttactgagcacgagggcgacaggacttcttctcctcctcgtactcctcctcctattcttgagaccggagcggaccttcctcaggagggcactcctgttgtgaaggttcccgacgacaaccctgcttgcccttgctgtggcaacaggattggcaggatttctggactcatcgaccaccttaagaggactcacggcaagaagaagattctcttccaatgcgcaaaatgtgggcgaacgaaccttaagcaccactctattgcttgccacgttcctaaatgcaagggcgctaagggcacttctcctcttaggggctgggcttgcgaggaatgcaacaggactttcggcactaagattggcctttctcagcacaagaggcttgctcaccctgtgactcgtaacattgagaggattactgcttctcgtcctaaggaggagagcgctcgtggcgctcatcgtcgttgttggtctgaggaggaggttgagcttcttaagaagttggagaagcaatacgagggcaacaagaacatcaacaagcttattgctgagcaccttccttctaagactgctaagcagattagcgacaagaggaggggccttattaagagcccttctaaaaagaacggcaaggaccttactcttcgtgagcagcttacggaggagggcgagcaccttattgagagcggcagccaggaaggcggaggacttcgttctcactatcgcaagagcattgctgaatggattcgctcacagaagattacttctcttcgtaagatttttgagcgagttattgagggcaaggaggacctgccttctattgtggacgaggctgctcaggactgctacgcttgccttaagcgggaccttaccgagggcgaagggagacagattcagaagattcgtgagattcgtcgtactcaccctcagaagccttctaagcaatggactaagaaaagggctcgtaagaggggccagttccttcgtttccagcgtttgttctacttggacagaggcaagcttgccggcattattctggacgacgttgagagtttgaaatgcggcattcctctggacgttgtgcacgaggttttcaagagccgttgggagagccctggcactttcaagggccttggcacttttaagactattggccaggccgacaactctgctttccaggctatgattactatgaaggagattaagaagaacatccgagagatgaacaagaacgctgctccagggcccgacggcatttcattacgggacctcatgaagatcgaccctcaatgcgctaagcttatggagcttttcaacctttggcttcttactggctacattcccgacggcgttaagaattgtcgaactattcttattcctaagagcactgtgcctgagaagctaaacgatgtgaacaactggaggcctattactattggctctattattcttcgtcttttctctaagattcttactgctcgtcttactaaggcttgccctatcaacattcggcagcggggcttcattaagagctctggctgctctgagaaccttaaacttcttcagcttattattcgttacgctaaaagggaacatcgacctcttggcgttgtgttcgtggaccttgctaaggctttcgacactgtgtctcactctcacattctttctgtgctgaagcagaaaggtgtagacgagcacattattaagcttatcgagaactcttactacaacattaagacttacatcgacttgaagaacgagaagagcgactctattggcattcgtattggcgttaagcagggcgaccctatgtctcccattcttttcaacttgtctgtggaccctcttctttgcaagcttgaggagatgggcaacggcttccagtgccactctcagaacgttactgctcttgctttcgccgacgaccttgtgcttctttctggctcttgggagggcatgcagaacaacataacaatcgtggagactttctgcgagcttactggccttaagatgcagggcgagaagtgccacggcttctacattaagcctactaaggactcttacactatcaacgactgccctgtgtggactataaacggcactcctctgaacatgattgagcctggctcttctgagaagtaccttggcctttatgtagacccttggattggcatttctaagcctgagcttctggaaaaggtcgaccgttggctggtcaaggttggcaaggctcctcttaagcctttccagaaagtcgacattcttaagggctaccttattcctcgtgttatttacctagcggatcaggcgaacctgaagcctacttaccttgagtctatcgaccttgccattcgtaccggagttaaggaatggcttcaccttcctgcttgcacttgcgacgctattctttacagcaacactcaggacggcggccttgggatttctcgtcttgctgctcttattccctctgtgcaggtgcgtaggcttcaccgtattgctcaaacctcagacgaggtgctaaagactatcgtgaagagagaagggattgaaagagagttcgagaagctttggcttatggctggcggcgacaaggagcgtattccttctatttgggaccctaagactgtgatgattatttctgagacaggcggcgaccagattttatcggaatgggagattcccaaccctaagctcatttaccctaagccttgcaactggcggaagagggagttcaacaattggactaagcttcttagccagggcaggggcattgtgaacttcgagaaggacaagattagcaacaactggcttattcattatcgcgggattcctcagaggaagcttattactgcccttcagttaagagccaacatttaccccactcgtgagttccttgctcgtggccgttctgagacgtacattaagtcttgccgtcactgccaggcggacaacgagacttgcgctcacattattggctactgccctagcgtgcaggacgctcgtattaagcgtcacaaccagatttgccacattcttgctgaggaggctaagaggaaggactggcttgtgtaccaggagcctcttcttcgtgaccagcagaacgagctttacaagcccgaccttattttcgtgaagggcaaccaggctatagttacggacattactattaggtacgagactactattactactcttgaggaggccgctcttgagaaggctaagaagtacgtgcaccttgagagccaggtgcaggacctcacgaacacttctgtgatcaacttcactggcttccctcttggctctcgtggcaaatggtaccagggcaactacaagattctgaacgagctgggccttagcaactctcgtcaggagaaggttgctcgtcgtctttccaactacgctcttttcagctctgtggacattattcacatgttcgcttctaaggctcgtactgaggtgcgttgataataggctgccttctgcggggcttgccttctggccatgcccttcttctctcccttgcacctgtacctcttggtctttgaataaagcctgagtaggaaggaccggtaaaaaaaaaaaaaaaaaaaaaaaaaaaaaaacgttgactaaaaaaaaaaaaaaaaaaaaaaaaaaaaaaaaaaaaaaaaaaaaaaaaaaaaaaaaaaaaaaaaaaaaaa

SEQ ID NO: 11422 - DNA, 4439 bp, synthetic construct
  source 1..4439: mol_type = other DNA
gaaataagagagaaaagaagagtaagaagaaatataagagaattcgccaccatggcttcttgcccgaaacctggccccccggtttcagcaggggcaatgagtttggaaagtggactgaccacccactccgttctcgccatcgaacgtggtcccaattcgttggcaaattccggatcagactttgggggggggggtctggggctaccgttacgcctattgagggtatcggtcggcactcagacctcccgctccgactgggtagacctggtgtcctggagccacccaggacccacgtctaagtcccagcaggttgacctggtgtctttatttcctaaacaccgggttgacctgttatccaaaaacgaccaggtagacctggtggctcaatttttaccatctaaatttccccccaatttggcagaaaatgatttggctttgctggtgaacttagagttctacagatcggatttgcatgtgtatgagtgtgttcataaggctgcacattgggagggattaagtggtttgcctgaggtgtatgaacaacttgcaccacaaccgtgtgtgggagaaactttacattctagcctcccacgagacagtgaactgtttgtgcctgaagaggggagcagcgagaaggagagcgaggacgcgccaaaaacatctcctccgacgcctgggaaacatggtttggaacagactggggaggaaaaagtgatggtgactgttcctgacaaaaatccaccttgtccttgctgtggtacccgggtaaactctgtgttgaatctgattgaacatctgaaagtgtcacacgggaaaaggggggtttgttttcggtgtgcaaaatgtggaaaggaaaatagtaactatcacagtgttgtttgtcattttaagaaatgcaggggtccagagacggagaaagccccagctggggagtggatttgtgaggtatgcaacagagattttacaaccaaaattggcctgggacaacacaagagattggcacacccagcagtgagaaatcaggaaaggatcgttgcttcccaaccgaaagaaacatcaaatagaggtgctcacaaaaggtgctggacaaaggaggaggaagaattactaataagactggaggctcagttcgagggaaacaaaaatattaataagcttattgcagaacacataaccaccaaaacagctaagcagatcagtgacaaaaggcgattgctgtccagaaagccagcagaggagccacgtatggagcctggaacgtgtcatcacaccaggagagcagctgcgagcctgagaacggagcctgagatgagtcatcacgcccaggcagaggacagagataatggacctgggagacgccctctgccaggcagggcagctgccggagggagaacaatggacgagataagacgccaccctgataagggcaacggacagcagagacccaccaagcaaaaatcagaagaacagctgcaggcttactataaaaagacactagaggaacgactttcagctggggcacttaacaccttcccccgagcattcaagcaggtaatggaaggccgggatataaagctagtaatcaatcagacagcgcaggactgcttcggatgcctggaatccataagccaaataagaacggcaacccgagataaaaaggacacggtgacccgggagaaacacccaaagaaaccttttcagaagtggatgaagaagagagcaatcaaaaaaggtaattatcttcggttccagcgtttattttatcttgatagagggaaactggctaaaatcattttagatgatattgaatgcttgtcttgtgacataccactcagtgaaatttattcggtttttaaaacaagatgggaaacaactggtagctttaaaagccttggggactttaaaacttacgggaaggctgacaacactgccttcagagaattaattacggctaaagaaattgagaaaaatgtgcaggaaatgagcaaaggctcggctcccggtccagacgggattactcttggggacgtcgtaaagatggatcccgagttttcccggaccatggagattttcaatttatggttaacaactggtaaaatcccggacatggtgagggggtgcagaaccgttttgattccaaaatcatcaaagccggatcgtttgaaagacattaataactggagacctatcacgatcggttccatcttgctgagactgttctccaggattgtaacagctaggctgagcaaagcgtgccccctgaacccaaggcaaagaggctttatcagagcggcgggatgctctgaaaacttaaaactcctgcaaactataatttggtcggccaaaagagaacacagaccactgggtgttgtattcgtggacatcgccaaggcttttgacaccgtaagccaccagcacatcattcatgctttgcagcaaagagaggtggatccccacatcgtcggtctggtgagcaatatgtacgagaacatcagtacgtatatcaccacaaagaggaacacacacacagacaaaatccagatccgggttggagtaaagcagggtgacccgatgtcgccccttttatttaacctggcaatggaccctctattatgcaagctggaagagagtggcaaaggataccaccgaggacagagcagcatcacagcgatggcatttgcagacgatctggttttgctgagcgactcctgggaaaatatgaatacaaatattagcatactggagaccttctgcaatctgaccggactcaaaacacaggggcaaaagtgccacggcttttacatcaagccgacaaagaagtcttacaccatcaatgactgcgctgcctggactatcaacggcacacccctgaacatgatcgaccccggcgaatctgagaaatacctcggcctgcagtttgacccgtggattggaatagcaaggtccggtctctccacaaaactagatttttggcttcagcggatcgatcaagcaccacttaaacctctgcagaaaactgatattctcaaaacatacaccatccctcggctgatctacatagctgaccactcagaagtgaaaagcgcactactcgaaacccttgaccagaagatccggacagcggtcaaggaatggcttcacctacctccgtgcacctgcgatgccatcctgtactcgagcacgagagacggcggtttgggcatcaccaaattggcaggactgatccccagcgtgcaggcccgtagactgcatcggatcgcacagtcatctgacgatacgatgaaatgcttcatggaaaaagagaaaatggaacagctgcataagaaattgtggattcaagctggaggggacagagagaacataccctcgatttgggaagcaccaccgtcgagtgaaccaccaaacaacgtgagcacaaattcggaatgggaagcaccgacccagaaagataaatttccaaagccttgcaattggaggaaaaacgaattcaaaaaatggaccaaattggcatcccaaggccgcggaattgtaaattttgaaagagacaaaattagtaaccattggatccaatactacagacgcatacctcacaggaaactcctcactgcactacaactcagggccaacgtttaccccacgagagaatttctagccaggggtagacaagaccaatacatcaaggcgtgtaggcactgcgatgcggacaacgaatcctgcgcccacatcatcggcaactgcccagtgacacaggacgcccgaatcaagaggcacaattacatctgcgaactgcttctcgaggaggcgaagaagaaggactgggtagtgttcaaggaaccgcacataagggattccaacaaggaactgtacaaacctgacctgatatttgtgaaggatgggcgtgcacttgtcgtggatgtgacagtacggtatgaagcagccaaatcatcgctggaggaagccgctgcagagaaagtgagaaagtacaaacacctggaaacggaagtaagacatctcacgaatgcaaaggacgttacttttgtgggctttcccctaggagcgcgggggaaatggcaccaagataactttaaacttttgactgagcttggcctctccaaatcgaggcaagtgaaaatggcagagactttttccacagtagcgctcttttcatctgtggacattgtacatatgtttgccagtagggccagaaaatctatggttatgtgataataggctgccttctgcggggcttgccttctggccatgcccttcttctctcccttgcacctgtacctcttggtctttgaataaagcctgagtaggaaggaccggtaaaaaaaaaaaaaaaaaaaaaaaaaaaaaaacgttgactaaaaaaaaaaaaaaaaaaaaaaaaaaaaaaaaaaaaaaaaaaaaaaaaaaaaaaaaaaaaaaaaaaaaaa

SEQ ID NO: 11423 - DNA, 4564 bp, synthetic construct
  source 1..4564: mol_type = other DNA
ggtctagttacaactgggcatcgctgcagagatcgcacctcctcgtggtcccgctggtagcccttcgaagggtgactaagtcgatctctgccccaggtacggagccgttgggactcaccagtccaacgtaactcctgcctaaattcggtgaaacaaattcctcggtaaaaagccccatggcttcttgcccgaaacctggccccccggtttcagcaggggcaatgagtttggaaagtggactgaccacccactccgttctcgccatcgaacgtggtcccaattcgttggcaaattccggatcagactttgggggggggggtctggggctaccgttacgcctattgagggtatcggtcggcactcagacctcccgctccgactgggtagacctggtgtcctggagccacccaggacccacgtctaagtcccagcaggttgacctggtgtctttatttcctaaacaccgggttgacctgttatccaaaaacgaccaggtagacctggtggctcaatttttaccatctaaatttccccccaatttggcagaaaatgatttggctttgctggtgaacttagagttctacagatcggatttgcatgtgtatgagggcgttcataaggctgcacattgggagggattaagtggtttgcctgaggtgtatgaacaacttgcaccacaaccgtgtgtgggagaaactttacattctagcctcaagcgagacagtgaactgtttgtgcctgaagaggggagcagcgagaaggagagcgaggacgcgccaaaaacatctcctccgacgcctgggaaacatggtaagaggcagactggggaggaaaaagtgatggtgactgttcctgacaaaaatccaccttgtccttgctgtggtacccgggtaaactctgtgttgaatctgattgaacatctgaaagtgtcacacgggaaaaggggggtttgttttcggtgtgcaaaatgtggaaaggaaaatagtaactatcacagtgttgtttgtcattttaagaaatgcaggggtccagagacggagaaagccccagctggggagtggatttgtgaggtatgcaacagagattttacaaccaaaattggcctgggacaacacaagagaagggcacacccagcagtgagaaatcaggaaaggatcgttgcttcccaaccgaaagaaacatcaaatagaggtgctcacaaaaggtgctggacaaaggaggagagggaattactaataagactggaggctcagttcgagggaaacaaaaatattaataagcttattgcagaacacataaccaccaaaacagctaagcagatcagtgacaaaaggcgattgctgtccagaaagccagcagaggagccacgtgagatgcctggaacgtgtcatcacaccaggagagcagctgcgagcctgagaacggagcctgagatgagtcatcacgcccaggcagaggacagagataatggacctgggagacgccctctgccaggcagggcagctgccggagggagaacaatggacgagataagacgccaccctgataagggcaacggacagcagagacccaccaagcaaaaatcagaagaacagctgcaggcttactataaaaagacactagaggaacgactttcagctggggcacttaacaccttcccccgagcattcaagcaggtaatggaaggccgggatataaagctagtaatcaatcagacagcgcaggactacttcggatgcctggaatccataagccaaataagaacggcaacccgagataaaaaggacacggtgacccggaagaaacacccaaagaaaccttttcagaagtggatgaagaagagagcaatcaaaaaaggtaattatcttcggttccagcgtttatttcaccttgatagagggaaactggctaaaatcattttagatgatattgaatgcttgtcttgtgacataccactcagtgaaatttattcggtttttaaaacaagatgggaaacaactggtagctttaaaagccttggggactttaaaacttacgggaaggctgacaacactgccttcagagacttaattacggctaaagaaattgagaaaaatgtgcaggaaatgagcaaaggctcggctcccggtccagacgggattactcttggggacgtcgtaaagatggatcccgagtactcccggaccgccgagattttcaatttatggttaacaactggtaaaatcccggacatggtgagggggtgcagaaccgttttgattccaaaatcatcagacccggatcgtttgaaagacattaataactggagacctatcacgatcggttccatcttgctgagactgttctccaggattgtaacagctaggctgagcaaagcgtgccccctgaacccaaggcaaagaggctttatcagagcggcgggatgctctgaaaacttaaaactcctgcaaactataatttggtcggccaaaagagaacacagaccactgggtgttgtattcgtggacatcgccaaggcttttgacaccgtaagccaccagcacatcattcatgctttgcagcaaagagaggtggatccccacatcgtcggtctggtgagcaatatgtacgagaacatcagtacgtatatcaccacaaagaggaacacacacacagacaaaatccagatccgggttggagtaaagcagggtgacccgatgtcgccccttttatttaacctggcaatggaccctctattatgcaagctggaagagagtggcaaaggataccaccgaggacagagcagcatcacagcgatggcatttgcagacgatctggttttgctgagcgactcctgggaaggcatgaatacaaatattagcatactggagaccttctgcaatctgaccggactcaaaacacaggggcaaaagtgccacggcttttacatcaagccgacaaagaagtcttacaccatcaatgactgcgctgcctggactatcaacggcacacccctgaacatgatcgaccccggcgaatctgagaaatacctcggcctgcagtttgacccgtggattggaatagcaaggtccggtctctccacaaaactagatttttggcttcagcggatcgatcaagcaccacttaaacctctgcagaaactggatattctcaaaacatacaccatccctcggctgatctacatagctgaccactcagaagtgaaaactgcactactcgaactgcttgaccagaagatccggacagcggtcaaggaatggcttcacctacctccgtgcacctgcgatgccatcctgtactcgagcacgagagacggcggtttgggcatcaccaaattggcaggactgatccccagcgtgcaggcccgtagactgcatcggatcgcacagtcatctgacgagacgatgaaatgcttcatggaaaaagagaaaatggaacagctgcataagaaattgtggattcaagctggaggggacagagagaacataccctcgatttgggaagcaccaccgtcgagtgaaccaccaaacaacgtgagcacaaattcggaatgggaagcaccgacccagaaagataaatttccaaagccttgcaattggaggaaaaacgaattcaaaaaatggaccaaattggcatcccaaggccgcggaattgtaaattttgaaagagacaaaattagtaaccattggatccaatactacagacgcatacctcacaggaaactcctcactgcactacaactcagggccaacgtttaccccacgagagaatttctagccaggggtagacaagaccaatacatcaaggcgtgtaggcactgcgatgcggacattgaatcctgcgcccacatcatcggcaactgcccagtgacacaggacgcccgaatcaagaggcacaataagatctgcgaactgcttctcgaggaggcgaagaagaaggactgggtagtgttcaaggaaccgcacataagggattccaacaaggaactgtacaaacctgacctgatatttgtgaaggatgcccgtgcacttgtcgtggatgtgacagtacggtatgaagcagccaaatcatcgctggaggaagccgctgcagagaaagtgagaaagtacaaacacctggaaacggaagtaagacatctcacgaatgcaaaggacgttacttttgtgggctttcccctaggagcgcgggggaaatggcaccaagataactttaaacttttgactgagcttggcctctccaaatcgaggcaagtgaaaatggcagagactttttccacagtagcgctcttttcatctgtggacattgtacatatgtttgccagtagggccagaaaatctatggttatgtgataataggctgccttctgcggggcttgccttctggccatgcccttcttctctcccttgcacctgtacctcttggtctttgaataaagcctgagtaggaaggaccggtaaaaaaaaaaaaaaaaaaaaaaaaaaaaaaacgttgactaaaaaaaaaaaaaaaaaaaaaaaaaaaaaaaaaaaaaaaaaaaaaaaaaaaaaaaaaaaaaaaaaaaaaa

SEQ ID NO: 11424 - DNA, 4564 bp, synthetic construct
  source 1..4564: mol_type = other DNA
ggtctagttacaactgggcatcgctgcagagatcgcacctcctcgtggtcccgctggtagcccttcgaagggtgactaagtcgatctctgccccaggtacggagccgttgggactcaccagtccaacgtaactcctgcctaaattcggtgaaacaaattcctcggtaaaaagccccatggcttcttgcccgaaacctggccccccggtttcagcaggggcaatgagtttggaaagtggactgaccacccactccgttctcgccatcgaacgtggtcccaattcgttggcaaattccggatcagactttgggggggggggtctggggctaccgttacgcctattgagggtatcggtcggcactcagacctcccgctccgactgggtagacctggtgtcctggagccacccaggacccacgtctaagtcccagcaggttgacctggtgtctttatttcctaaacaccgggttgacctgttatccaaaaacgaccaggtagacctggtggctcaatttttaccatctaaatttccccccaatttggcagaaaatgatttggctttgctggtgaacttagagttctacagatcggatttgcatgtgtatgagggcgttcataaggctgcacattgggagggattaagtggtttgcctgaggtgtatgaacaacttgcaccacaaccgtgtgtgggagaaactttacattctagcctcccacgagacagtgaactgtttgtgcctgaagaggggagcagcgagaaggagagcgaggacgcgccaaaaacatctcctccgacgcctgggaaacatggtaagaggcagactggggaggaaaaagtgatggtgactgttcctgacaaaaatccaccttgtccttgctgtggtacccgggtaaactctgtgttgaatctgattgaacatctgaaagtgtcacacgggaaaaggagggtttgttttcggtgtgcaaaatgtggaaaggaaaatagtaactatcacagtgttgtttgtcattttaagaaatgcaggggtccagagacggagaaagccccagctggggagtggatttgtgaggtatgcaacagagattttacaaccaaaattggcctgggacaacacaagagaagggcacacccagcagtgagaaatcaggaaaggatcgttgcttcccaaccgaaagaaacatcaaatagaggtgctcacaaaaggtgctggacaaaggaggaggaagaattactaataagactggaggctcagttcgagggaaacaaaaatattaataagcttattgcagaacacataaccaccaaaacagctaagcagatcagtgacaaaaggcgattgctgtccagaaagccagcagaggagccacgtgagatgcctggaacgtgtcatcacaccaggagagcagctgcgagcctgagaacggagcctgagatgagtcatcacgcccaggcagaggacagagataatggacctgggagacgccctctgccaggcagggcagctgccggagggagaacaatggacgagataagacgccaccctgataagggcaacggacagcagagacccaccaagcaaaaatcagaagaacagctgcaggcttactataaaaagacactagaggaacgactttcagctggggcacttaacaccttcccccgagcattcaagcaggtaatggaaggccgggatataaagctagtaatcaatcagacagcgcaggactacttcggatgcctggaatccataagccaaataagaacggcaacccgagataaaaagtacacggtgacccggaagaaacacccaaagaaaccttttcagaagtggatgaagaagagagcaatcaaaaaaggtaattatcttcggttccagcgtttatttcaccttgatagagggaaactggctaaaatcattttagatgatattgaatgcttgtcttgtgacataccactcagtgaaatttattcggtttttaaaacaagatgggaaacaactggtagctttaaaagccttggggactttaaaacttacgggaaggctgacaacactgccttcagagacttaattacggctaaagaaattgagaaaaatgtgcaggaaatgagcaaaggctcggctcccggtccagacgggattactcttggggacgtcgtaaagatggatcccgagggctcccggaccatggagattttcaatttatggttaacaactggtaaaatcccggacatggtgagggggtgcagaaccgttttgattccaaaatcatcagacccggatcgtttgaaagacattaataactggagacctatcacgatcggttccatcttgctgagactgttctccaggattgtaacagctaggctgagcaaagcgtgccccctgaacccaaggcaaagaggctttatcagagcggcgggatgctctgaaaacttaaaactcctgcaaactataatttggtcggccaaaagagaacacagaccactgggtgttgtattcgtggacatcgccaaggcttttgacaccgtaagccaccagcacatcattcatgctttgcagcaaagagaggtggatccccacatcgtcggtctggtgagcaatatgtacgagaacatcagtacgtatatcaccacaaagaggaacacacacacagacaaaatccagatccgggttggagtaaagcagggtgacccgatgtcgccccttttatttaacctggcaatggaccctctattatgcaagctggaagagagtggcaaaggataccaccgaggacagagcagcatcacagcgatggcatttgcagacgatctggttttgctgagcgactcctgggaaggcatgaatacaaatattagcatactggagaccttctgcaatctgaccggactcaaaacacaggggcaaaagtgccacggcttttacatcaagccgacaaagaagtcttacaccatcaatgactgcgctgcctggactatcaacggcacacccctgaacatgatcgaccccggcgaatctgagaaatacctcggcctgcagtttgacccgtggattggaatagcaaggtccggtctctccacaaaactagatttttggcttcagcggatcgatcaagcaccacttaaacctctgcagaaactggatattctcaaaacatacaccatccctcggctgatctacatagctgaccactcagaagtgaaaactgcactactcgaaacccttgaccagaagatccggacagcggtcaaggaatggcttcacctacctccgtgcacctgcgatgccatcctgtactcgagcacgagagacggcggtttgggcatcaccaaattggcaggactgatccccagcgtgcaggcccgtagactgcatcggatcgcacagtcatctgacgatacgatgaaatgcttcatggaaaaagagaaaatggaacagctgcataagaaattgtggattcaagctggaggggacagagagaacataccctcgatttgggaagcaccaccgtcgagtgaaccaccaaacaacgtgagcacaaattcggaatgggaagcaccgacccagaaagataaatttccaaagccttgcaattggaggaaaaacgaattcaaaaaatggaccaaattggcatcccaaggccgcggaattgtaaattttgaaagagacaaaattagtaaccattggatccaatactacagacgcatacctcacaggaaactcctcactgcactacaactcagggccaacgtttaccccacgagagaatttctagccaggggtagacaagaccaatacatcaaggcgtgtaggcactgcgatgcggacattgaatcctgcgcccacatcatcggcaactgcccagtgacacaggacgcccgaatcaagaggcacaataagatctgcgaactgcttctcgaggaggcgaagaagaaggactgggtagtgttcaaggaaccgcacataagggattccaacaaggaactgtacaaacctgacctgatatttgtgaaggatggccgtgcacttgtcgtggatgtgacagtacggtatgaagcagccaaatcatcgctggaggaagccgctgcagagaaagtgagaaagtacaaacacctggaaacggaagtaagacatctcacgaatgcaaaggacgttacttttgtgggctttcccctaggagcgcgggggaaatggcaccaagataactttaaacttttgactgagcttggcctctccaaatcgaggcaagtgaaaatggcagagactttttccacagtagcgctcttttcatctgtggacattgtacatatgtttgccagtagggccagaaaatctatggttatgtgataataggctgccttctgcggggcttgccttctggccatgcccttcttctctcccttgcacctgtacctcttggtctttgaataaagcctgagtaggaaggaccggtaaaaaaaaaaaaaaaaaaaaaaaaaaaaaaacgttgactaaaaaaaaaaaaaaaaaaaaaaaaaaaaaaaaaaaaaaaaaaaaaaaaaaaaaaaaaaaaaaaaaaaaaa

SEQ ID NO: 11425 - DNA, 5407 bp, synthetic construct
  source 1..5407: mol_type = other DNA
ggtctagttacaactgggcatcgctgcagagatcgcacctcctcgtggtcccgctggtagcccttcgaagggtgactaagtcgatctctgccccaggtacggagccgttgggactcaccagtccaacgtaactcctgcctaaattcggtgaaacaaattcctcggtaaaaagccccatgggaactgcactaacaccgctcctgacgaagttcgccacgcgctacgagatgggtaccacgcctgaagaagtggcgaacacgctcaagcagacctgtttcaagggccaggtcaatgattcgcagatggtcgccctgctgatcgtggcagaccagtacaagcttaaccccttcaccaaggagttgtacgcattccccgacaagaacaacggcatcgtgccggttgttggtgtggatggctgggctcggatcatcaacgagaacccacagttcgatggcatggaattctcaatggaccagcagggaaccgaatgcacctgcaagatctatcggaaggaccgcagccatgccatcagcgcgactgagtacatggccgagtgcaagcggaacacccagccttggcagtcccatccgcgccggatgcttcgccacaaggcaatgatccagtgcgcacgcctcgcgttcgggttcgccggcatatacgaccaggacgaggccgagcggatcgttgaacgagacgtcactcccgcagagcagtacgaggacgtcagcgaggcgatctgcctgatcaaggactccccaacaatggaggacttgcaggcagcattcagcaatgcctggaaagcctataagacaaagggcgcgcgcgaccagcttacggcggccaaggaccagcggaagaaagaattgctggacgcccctatagacgttgaattcgaggagaccggcgatgatcgagcagcgtctggaggatctagcggaggatcctctggcagcgagacaccaggaacaagcgagtcagcaacaccagagagcagtggcggcagcagcggcggcagcagcatggcttcttgcccgaaacctggccccccggtttcagcaggggcaatgagtttggaaagtggactgaccacccactccgttctcgccatcgaacgtggtcccaattcgttggcaaattccggatcagactttgggggggggggtctggggctaccgttacgcctattgagggtatcggtcggcactcagacctcccgctccgactgggtagacctggtgtcctggagccacccaggacccacgtctaagtcccagcaggttgacctggtgtctttatttcctaaacaccgggttgacctgttatccaaaaacgaccaggtagacctggtggctcaatttttaccatctaaatttccccccaatttggcagaaaatgatttggctttgctggtgaacttagagttctacagatcggatttgcatgtgtatgagtgtgttcataaggctgcacattgggagggattaagtggtttgcctgaggtgtatgaacaacttgcaccacaaccgtgtgtgggagaaactttacattctagcctcccacgagacagtgaactgtttgtgcctgaagaggggagcagcgagaaggagagcgaggacgcgccaaaaacatctcctccgacgcctgggaaacatggtttggaacagactggggaggaaaaagtgatggtgactgttcctgacaaaaatccaccttgtccttgctgtggtacccgggtaaactctgtgttgaatctgattgaacatctgaaagtgtcacacgggaaaaggagggtttgttttcggtgtgcaaaatgtggaaaggaaaatagtaactatcacagtgttgtttgtcattttccaaaatgcaggggtccagagacggagaaagccccagctggggagtggatttgtgaggtatgcaacagagattttacaaccaaaattggcctgggacaacacaagagattggcacacccagcagtgagaaatcaggaaaggatcgttgcttcccaaccgaaagaaacatcaaatagaggtgctcacaaaaggtgctggacaaaggaggaggaagaattactaataagactggaggctcagttcgagggacacaaaaatattaataagcttattgcagaacacataaccaccaaaacagctaagcagatcagtgacaaaaggcgattgctgtccagaaagccagcagaggagccacgtatggagcctggaacgtgtcatcacaccaggagagcagctgcgagcctgagaacggagcctgagatgagtcatcaggcccaggcagaggacagagataatggacctgggagacgccctctgccaggcaggcccgctgccggagggagaacaatggacgagataagacgccaccctgataagggcaacggacagcagagacccaccaagcaaaaatcagaagaacagctgcaggcttactataaaaagacactagaggaacgactttcagctggggcacttaacaccttcccccgagcattcaagcaggtaatggaaggccgggatataaagctagtaatcaatcagacagcgcaggactgcttcggatgcctggaatccataagccaaataagaacggcaacccgagataaaaagtacacgggcacccgggagaaacacccaaagaggccttttcagaagtggatgaagaagagagcaatcaaaaaaggtaattatcttcggttccagcgtttattttatcttgatagagggaaactggctaaaatcattttagatgatattgaatgcttgtcttgtgacataccactcagtgaaatttattcggtttttaaaacaagatgggaaacaactggtagctttaaaagccttggggactttaaaacttacgggaaggctgacaacactgccttcagagaattaattacggctaaagaaattgagaaaaatgtgcaggaaatgagcaaaggctcggctcccggtccagacgggattactcttggggacgtcgtaaagatggatcccgagttttccctgaccatggagattttcaatttatggttaacaactggtaaaatcccggacatggtgagggggtgcagaaccgttttgattccaaaatcatcaaagccggatcgtttgaaagacattaataactggagacctatcacgatcggttccatcttgctgagactgttctccaggattgtaacagctaggctgagcaaagcgtgccccctgaacccaaggcaaagaggctttatcagagcggcgggatgctctgaaaacttaaaactcctgcaaactataatttggtcggccaaaagagaacacagaccactgggtgttgtattcgtggacatcgccaaggcttttgacaccgtaagccaccagcacatcattcatgctttgcagcaaagagaggtggatccccacatcgtcggtctggtgagcaatatgtacgagaacatcagtacgtatatcaccacaaagaggaacacacacacagacaaaatccagatccgggttggagtaaagcagggtgacccgatgtcgccccttttatttaacctggcaatggaccctctattatgcaagctggaagagagtggcaaaggataccaccgaggacagagcagcatcacagcgatggcatttgcagacgatctggttttgctgagcgactcctgggaaggcatgaatacaaatattagcatactggagaccttctgcaatctgaccggactcaaaacacaggggcaaaagtgccacggcttttacatcaagccgacaaaggactcttacaccatcaatgactgcgctgcctggactatcaacggcacacccctgaacatgatcgaccccggcgaatctgagaaatacctcggcctgcagtttgacccgtggattggaatagcaaggtccggtctctccacaaaactagatgagtggcttcagcggatcgatcaagcaccacttaaacctctgcagaaaactgatattctcaaaacatacaccatccctcggctgatctacatagctgaccactcagaagtgaaagccgcactactcgaaacccttgacaggaagatccggacagcggtcaaggaatggcttcacctacctccgtgcacctgcgatgccatcctgtactcgagcacgagagacggcggtttgggcatcaccaaattggcaggactgatccccagcgtgcaggcccgtagactgcatcggatcgcacagtcatctgacgatacgatgaaatgcttcatggaaaaagagaggatggaacagctgcataagaaattgtggattcaagctggaggggacagagagaacataccctcgatttgggaagcaccaccgtcgagtgaaccaccaaacaacgtgagcacaaattcggaatgggaagcaccgacccagaaacccaaatttccaaagccttgcaattggaggaaaaacgaattcaaaaaatggaccaaattggcatcccaaggccgcggaattgtaaattttgaaagagacaaaattagtaaccattggatccaatactacagaggcatacctcacaggaaactcctcactgcactacaactcagggccaacgtttaccccacgagagaatttctagccaggggtagacaagaccaatacatcaaggcgtgtaggcactgcgatgcggacattgaatcctgcgcccacatcatcggcaactgcccagtgacacaggacgcccgaatcaagaggcacaataagatctgcgaactgcttctcgaggaggcgaagaagaaggactgggtagtgttcaaggaaccgcacataagggattccaacaaggaactgtacaaacctgacctgatatttgtgaaggatggccgtgcacttgtcgtggatgtgacagtacggtatgaagcagccaaatcatcgctggaggaagccgctgcagagaaagtgagaaagtacaaacacctggaaacggaagtaagacatctcacgaatgcaaaggacgttacttttgtgggctttcccctaggagcgcgggggaaatggcaccaagataactttaaacttttgactgagcttggcctctccaaatcgaggcaagtgaaaatggcagagactttttccacagtagcgctcttttcatctgtggacattgtacatatgtttgccagtagggccagaaaatctatggttatgtgataataggctgccttctgcggggcttgccttctggccatgcccttcttctctcccttgcacctgtacctcttggtctttgaataaagcctgagtaggaaggaccggtaaaaaaaaaaaaaaaaaaaaaaaaaaaaaaacgttgactaaaaaaaaaaaaaaaaaaaaaaaaaaaaaaaaaaaaaaaaaaaaaaaaaaaaaaaaaaaaaaaaaaaaaa

SEQ ID NO: 11426 - DNA, 5264 bp, synthetic construct
  source 1..5264: mol_type = other DNA
gaaataagagagaaaagaagagtaagaagaaatataagagaattcgccaccatggcccctaagaaaaagcggaaggtgaatatcagcggctctagctgcggcagccccaacagcgccgacaccagcagcgacttcaaggacctgtggaccaagctgaaggaatgccacgaccgggaagtgcagggactccaggtgaaggtcaccaaactcaagcaagaaagaatcctggacgcccagagactggaagaattcttcaccaagaaccagcagctgagagagcagcagaaagtgctgcacgagacaatcaaggttctggaagatagactgcgggccggcctgtgcgacagatgcgccgtgaccgaggaacacatgcgcaaaaagcagcaggagttcgagaacattagacagcaaaatctgaaattgatcacagagctgatgaacgagagaaacacactgcaggaggagaacaagaagctgagcgagcagctgcaacagaagatcgagaatgatcagcaacaccaggccgctgagctggaatgtgaagaggacgtgatccccgacagcccaatcacagctttcagcttttctggcgtgaacagactgaggcggaaggaaaacccccacgtgcggtacatcgagcagacccataccaagctggaacacagcgtgtgtgccaacgagatgagaaaggtgtccaagtcctccacccatccccagcacaaccctaacgaaaatgagatcctggtggctgatacctacgaccagtctcagagccctatggccaaggcccacggcaccagctcttatacccctgataagagctccttcaacctggccaccgtggtggccgagacactgggcctgggcgtgcaggaggaaagcgagacacagggcccaatgagccctctgggagatgagctgtaccactgcctggaaggcaaccacaagaaacagccttttgagtccggctccgagactcctggaacaagcgagagcgctacacctgagggcagccctaagagaaaggtgtccagcgccgagggcgctgccaaggaagagcctaaacggagaagcgccagactgagcgccaagccccccgccaaggtggaagccaagcctaagaaggccgccgctaaggacaagagcagcgataagaaagtccagaccaagggcaagcggggcgccaaaggcaaacaggccgaggtggccaaccaggagacaaaggaagatctgcctgctgagaacggcgaaaccaagaccgaggaatctccagcttctgacgaggccggagagaaggaggccaaaagcgacagcggctctgagacacctggaacaagcgagagcgccaccccggaatcctatgaacaacttgcaccacaaccgtgtgtgggagaaactttacattctagcctcccacgagacagtgaactgtttgtgcctgaagaggggagcagcgagaaggagagcgaggacgcgccaaaaacatctcctccgacgcctgggaaacatggtttggaacagactggggaggaaaaagtgatggtgactgttcctgacaaaaatccaccttgtccttgctgtggtacccgggtaaactctgtgttgaatctgattgaacatctgaaagtgtcacacgggaaaaggggggtttgttttcggtgtgcaaaatgtggaaaggaaaatagtaactatcacagtgttgtttgtcattttaagaaatgcaggggtccagagacggagaaagccccagctggggagtggatttgtgaggtatgcaacagagattttacaaccaaaattggcctgggacaacacaagagattggcacacccagcagtgagaaatcaggaaaggatcgttgcttcccaaccgaaagaaacatcaaatagaggtgctcacaaaaggtgctggacaaaggaggaggaagaattactaataagactggaggctcagttcgagggaaacaaaaatattaataagcttattgcagaacacataaccaccaaaacagctaagcagatcagtgacaaaaggcgattgctgtccagaaagccagcagaggagccacgtgaggagcctggaacgtgtcatcacaccaggagagcagctgcgagcctgagaacggagcctgagatgagtcatcacgcccaggcagaggacagagataatggacctgggagacgccctctgccaggcagggcagctgccggagggagaacaatggacgagataagacgccaccctgataagggcaacggacagcagagacccaccaagcaaaaatcagaagaacagctgcaggcttactataaaaagacactagaggaacgactttcagctggggcacttaacaccttcccccgagcattcaagcaggtaatggaaggccgggatataaagctagtaatcaatcagacagcgcaggactgcttcggatgcctggaatccataagccaaataagaacggcaacccgagataaaaaggacacggtgacccgggagaaacacccaaagaaaccttttcagaagtggatgaagaagagagcaatcaaaaaaggtaattatcagcggttcctgcgtttattttatcttgatagagggaaactggctaaaatcattttagatgatattgaatgcttgtcttgtgacataccactcagtgaaatttattcggtttttaaaacaagatgggaaacaactggtagctttaaaagccttggggactttaaaacttacgggaaggctgacaacactgccttcagagaattaattacggctaaagaaattgagaaaaatgtgcaggaaatgagcaaaggctcggctcccggtccagacgggattactcttggggacgtcgtaaagatggatcccgagttttcccggaccatggagattttcaatttatggttaacaactggtaaaatcccggacatggtgagggggtgcagaaccgttttgattccaaaatcatcaaagccggatcgtttgaaagacattaataactggagacctatcacgatcggttccatcttgctgagactgttctccaggattgtaacagctaggctgagcaaagcgtgccccctgaacccaaggcaaagaggctttatcagagcggcgggatgctctgaaaacttaaaactcctgcaaactataatttggtcggccaaaagagaacacagaccactgggtgttgtattcgtggacatcgccaaggcttttgacaccgtaagccaccagcacatcattcatgctttgcagcaaagagaggtggatccccacatcgtcggtctggtgagcaatatgtacgagaacatcagtacgtatatcaccacaaagaggaacacacacacagacaaaatccagatccgggttggagtaaagcagggtgacccgatgtcgccccttttatttaacctggcaatggaccctctattatgcaagctggaagagagtggcaaaggataccaccgaggacagagcagcatcacagcgatggcatttgcagacgatctggttttgctgagcgactcctgggaaaatatgaatacaaatattagcatactggagaccttctgcaatctgaccggactcaaaacacaggggcaaaagtgccacggcttttacatcaagccgacaaaggactcttacaccatcaatgactgcgctgcctggactatcaacggcacacccctgaacatgatcgaccccggcgaatctgagaaatacctcggcctgcagtttgacccgtggattggaatagcaaggtccggtctctccacaaaactagatttttggcttcagcggatcgatcaagcaccacttaaacctctgcagaaaactgatattctcaaaacatacaccatccctcggctgatctacatagctgaccactcagaagtgaaaagcgcactactcgaaacccttgaccagaagatccggacagcggtcaaggaatggcttcacctacctccgtgcacctgcgatgccatcctgtactcgagcacgagagacggcggtttgggcatcaccaaattggcaggactgatccccagcgtgcaggcccgtagactgcatcggatcgcacagtcatctgacgatacgatgaaatgcttcatggaaaaagagaaaatggaacagctgcataagaaattgtggattcaagctggaggggacagagagaacataccctcgatttgggaagcaccaccgtcgagtgaaccaccaaacaacgtgagcacaaattcggaatgggaagcaccgacccagaaagataaatttccaaagccttgcaattggaggaaaaacgaattcaaaaaatggaccaaattggcatcccaaggccgcggaattgtaaattttgaaagagacaaaattagtaaccattggatccaatactacagacgcatacctcacaggaaactcctcactgcactacaactcagggccaacgtttaccccacgagagaatttctagccaggggtagacaagaccaatacatcaaggcgtgtaggcactgcgatgcggacaacgaatcctgcgcccacatcatcggcaactgcccagtgacacaggacgcccgaatcaagaggcacaattacatctgcgaactgcttctcgaggaggcgaagaagaaggactgggtagtgttcaaggaaccgcacataagggattccaacaaggaactgtacaaacctgacctgatatttgtgaaggatgggcgtgcacttgtcgtggatgtgacagtacggtatgaagcagccaaatcatcgctggaggaagccgctgcagagaaagtgagaaagtacaaacacctggaaacggaagtaagacatctcacgaatgcaaaggacgttacttttgtgggctttcccctaggagcgcgggggaaatggcaccaagataactttaaacttttgactgagcttggcctctccaaatcgaggcaagtgaaaatggcagagactttttccacagtagcgctcttttcatctgtggacattgtacatatgtttgccagtagggccagaaaatctatggttatgtgataataggctgccttctgcggggcttgccttctggccatgcccttcttctctcccttgcacctgtacctcttggtctttgaataaagcctgagtaggaaggaccggtaaaaaaaaaaaaaaaaaaaaaaaaaaaaaaacgttgactaaaaaaaaaaaaaaaaaaaaaaaaaaaaaaaaaaaaaaaaaaaaaaaaaaaaaaaaaaaaaaaaaaaaaa

SEQ ID NO: 11427 - DNA, 5264 bp, synthetic construct; identical to SEQ ID NO: 10784
  source 1..5264: mol_type = other DNA

SEQ ID NO: 11428 - DNA, 4564 bp, synthetic construct
  source 1..4564: mol_type = other DNA
ggtctagttacaactgggcatcgctgcagagatcgcacctcctcgtggtcccgctggtagcccttcgaagggtgactaagtcgatctctgccccaggtacggagccgttgggactcaccagtccaacgtaactcctgcctaaattcggtgaaacaaattcctcggtaaaaagccccatggcttcttgcccgaaacctggccccccggtttcagcaggggcaatgagtttggaaagtggactgaccacccactccgttctcgccatcgaacgtggtcccaattcgttggcaaattccggatcagactttgggggggggggtctggggctaccgttacgcctattgagggtatcggtcggcactcagacctcccgctccgactgggtagacctggtgtcctggagccacgtgggacccacgtctaagtcccagcaggttgacctggtgtctttatttcctaaacaccgggttgacctgttatccaaaaacgaccaggtagacctggtggctcaatttttaccatctaaatttccccccaatttggcagaaaatgatttggctttgctggtgaacttagagttctacagatcggatttgcatgtgtatgagggcgttcataaggctgcacattgggagggattaagtggtttgcctgaggtgtatgaacaacttgcaccacaaccgtgtgtgggagaaactttacattctagcctcaagcgagacagtgaactgtttgtgcctgaagaggggagcagcgagaaggagagcgaggacgcgccaaaaacatctcctccgacgcctgggaaacatggtaagaggcagactggggaggaaaaagtgatggtgactgttcctgacaaaaatccaccttgtccttgctgtggtacccgggtaaactctgtgttgaatctgattgaacatctgaaagtgtcacacgggaaaaggggggtttgttttcggtgtgcaaaatgtggaaaggaaaatagtaactatcacagtgttgtttgtcattttaagaaatgcaggggtccagagacggagaaagccccagctggggagtggatttgtgaggtatgcaacagagattttacaaccaaaattggcctgggacaacacaagagaagggcacacccagcagtgagaaatcaggaaaggatcgttgcttcccaaccgaaagaaacatcaaatagaggtgctcacaaaaggtgctggacaaaggaggagagggaattactaataagactggaggctcagttcgagggaaacaaaaatattaataagcttattgcagaacacataaccaccaaaacagctaagcagatcagtgacaaaaggcgattgctgtccagaaagccagcagaggagccacgtgagatgcctggaacgtgtcatcacaccaggagagcagctgcgagcctgagaacggagcctgagatgagtcatcacgcccaggcagaggacagagataatggacctgggagacgccctctgccaggcagggcagctgccggagggagaacaatggacgagataagacgccaccctgataagggcaacggacagcagagacccaccaagcaaaaatcagaagaacagctgcaggcttactataaaaagacactagaggaacgactttcagctggggcacttaacaccttcccccgagcattcaagcaggtaatggaaggccgggatataaagctagtaatcaatcagacagcgcaggactacttcggatgcctggaatccataagccaaataagaacggcaacccgagataaaaaggacacggtgacccggaagaaacacccaaagaaaccttttcagaagtggatgaagaagagagcaatcaaaaaaggtaattatcttcggttccagcgtttatttcaccttgatagagggaaactggctaaaatcattttagatgatattgaatgcttgtcttgtgacataccactcagtgaaatttattcggtttttaaaacaagatgggaaacaactggtagctttaaaagccttggggactttaaaacttacgggaaggctgacaacactgccttcagagacttaattacggctaaagaaattgagaaaaatgtgcaggaaatgagcaaaggctcggctcccggtccagacgggattactcttggggacgtcgtaaagatggatcccgagtactcccggaccgccgagattttcaatttatggttaacaactggtaaaatcccggacatggtgagggggtgcagaaccgttttgattccaaaatcatcagacccggatcgtttgaaagacattaataactggagacctatcacgatcggttccatcttgctgagactgttctccaggattgtaacagctaggctgagcaaagcgtgccccctgaacccaaggcaaagaggctttatcagagcggcgggatgctctgaaaacttaaaactcctgcaaactataatttggtcggccaaaagagaacacagaccactgggtgttgtattcgtggacatcgccaaggcttttgacaccgtaagccaccagcacatcattcatgctttgcagcaaagagaggtggatccccacatcgtcggtctggtgagcaatatgtacgagaacatcagtacgtatatcaccacaaagaggaacacacacacagacaaaatccagatccgggttggagtaaagcagggtgacccgatgtcgccccttttatttaacctggcaatggaccctctattatgcaagctggaagagagtggcaaaggataccaccgaggacagagcagcatcacagcgatggcatttgcagacgatctggttttgctgagcgactcctgggaaggcatgaatacaaatattagcatactggagaccttctgcaatctgaccggactcaaaacacaggggcaaaagtgccacggcttttacatcaagccgacaaagaagtcttacaccatcaatgactgcgctgcctggactatcaacggcacacccctgaacatgatcgaccccggcgaatctgagaaatacctcggcctgcagtttgacccgtggattggaatagcaaggtccggtctctccacaaaactagatttttggcttcagcggatcgatcaagcaccacttaaacctctgcagaaactggatattctcaaaacatacaccatccctcggctgatctacatagctgaccactcagaagtgaaaactgcactactcgaactgcttgaccagaagatccggacagcggtcaaggaatggcttcacctacctccgtgcacctgcgatgccatcctgtactcgagcacgagagacggcggtttgggcatcaccaaattggcaggactgatccccagcgtgcaggcccgtagactgcatcggatcgcacagtcatctgacgagacgatgaaatgcttcatggaaaaagagaaaatggaacagctgcataagaaattgtggattcaagctggaggggacagagagaacataccctcgatttgggaagcaccaccgtcgagtgaaccaccaaacaacgtgagcacaaattcggaatgggaagcaccgacccagaaagataaatttccaaagccttgcaattggaggaaaaacgaattcaaaaaatggaccaaattggcatcccaaggccgcggaattgtaaattttgaaagagacaaaattagtaaccattggatccaatactacagacgcatacctcacaggaaactcctcactgcactacaactcagggccaacgtttaccccacgagagaatttctagccaggggtagacaagaccaatacatcaaggcgtgtaggcactgcgatgcggacattgaatcctgcgcccacatcatcggcaactgcccagtgacacaggacgcccgaatcaagaggcacaataagatctgcgaactgcttctcgaggaggcgaagaagaaggactgggtagtgttcaaggaaccgcacataagggattccaacaaggaactgtacaaacctgacctgatatttgtgaaggatgcccgtgcacttgtcgtggatgtgacagtacggtatgaagcagccaaatcatcgctggaggaagccgctgcagagaaagtgagaaagtacaaacacctggaaacggaagtaagacatctcacgaatgcaaaggacgttacttttgtgggctttcccctaggagcgcgggggaaatggcaccaagataactttaaacttttgactgagcttggcctctccaaatcgaggcaagtgaaaatggcagagactttttccacagtagcgctcttttcatctgtggacattgtacatatgtttgccagtagggccagaaaatctatggttatgtgataataggctgccttctgcggggcttgccttctggccatgcccttcttctctcccttgcacctgtacctcttggtctttgaataaagcctgagtaggaaggaccggtaaaaaaaaaaaaaaaaaaaaaaaaaaaaaaacgttgactaaaaaaaaaaaaaaaaaaaaaaaaaaaaaaaaaaaaaaaaaaaaaaaaaaaaaaaaaaaaaaaaaaaaaa

SEQ ID NO: 11429 - DNA, 4564 bp, synthetic construct
  source 1..4564: mol_type = other DNA
ggtctagttacaactgggcatcgctgcagagatcgcacctcctcgtggtcccgctggtagcccttcgaagggtgactaagtcgatctctgccccaggtacggagccgttgggactcaccagtccaacgtaactcctgcctaaattcggtgaaacaaattcctcggtaaaaagccccatggcttcttgcccgaaacctggccccccggtttcagcaggggcaatgagtttggaaagtggactgaccacccactccgttctcgccatcgaacgtggtcccaattcgttggcaaattccggatcagactttgggggggggggtctggggctaccgttacgcctattgagggtatcggtcggcactcagacctcccgctccgactgggtagacctggtgtcctggagccacccaggacccacgtctaagtcccagcaggttgacctggtgtctttatttcctaaacaccgggttgacctgttatccaaaaacgaccaggtagacctggtggctcaatttttaccatctaaatttccccccaatttggcagaaaatgatttggctttgctggtgaacttagagttctacagatcggatttgcatgtgtatgagggcgttcataaggctgcacattgggagggattaagtggtttgcctgaggtgtatgaacaacttgcaccacaaccgtgtgtgggagaaactttacattctagcctcccacgagacagtgaactgtttgtgcctgaagaggggagcagcgagaaggagagcgaggacgcgccaaaaacatctcctccgacgcctgggaaacatggtaagaggcagactggggaggaaaaagtgatggtgactgttcctgacaaaaatccaccttgtccttgctgtggtacccgggtaaactctgtgttgaatctgattgaacatctgaaagtgtcacacgggaaaaggagggtttgttttcggtgtgcaaaatgtggaaaggaaaatagtaactatcacagtgttgtttgtcattttaagaaatgcaggggtccagagacggagaaagccccagctggggagtggatttgtgaggtatgcaacagagattttacaaccaaaattggcctgggacaacacaagagaagggcacacccagcagtgagaaatcaggaaaggatcgttgcttcccaaccgaaagaaacatcaaatagaggtgctcacaaaaggtgctggacaaaggaggaggaagaattactaataagactggaggctcagttcgagggaaacaaaaatattaataagcttattgcagaacacataaccaccaaaacagctaagcagatcagtgacaaaaggcgattgctgtccagaaagccagcagaggagccacgtgagatgcctggaacgtgtcatcacaccaggagagcagctgcgagcctgagaacggagcctgagatgagtcatcacgcccaggcagaggacagagataatggacctgggagacgccctctgccaggcagggcagctgccggagggagaacaatggacgagataagacgccaccctgataagggcaacggacagcagagacccaccaagcaaaaatcagaagaacagctgcaggcttactataaaaagacactagaggaacgactttcagctggggcacttaacaccttcccccgagcattcaagcaggtaatggaaggccgggatataaagctagtaatcaatcagacagcgcaggactacttcggatgcctggaatccataagccaaataagaacggcaacccgagataaaaagtacacggtgacccggaagaaacacccaaagaaaccttttcagaagtggatgaagaagagagcaatcaaaaaaggtaattatcttcggttccagcgtttatttcaccttgatagagggaaactggctaaaatcattttagatgatattgaatgcttgtcttgtgacataccactcagtgaaatttattcggtttttaaaacaagatgggaaacaactggtagctttaaaagccttggggactttaaaacttacgggaaggctgacaacactgccttcagagacttaattacggctaaagaaattgagaaaaatgtgcaggaaatgagcaaaggctcggctcccggtccagacgggattactcttggggacgtcgtaaagatggatcccgagggctcccggaccatggagattttcaatttatggttaacaactggtaaaatcccggacatggtgagggggtgcagaaccgttttgattccaaaatcatcagacccggatcgtttgaaagacattaataactggagacctatcacgatcggttccatcttgctgagactgttctccaggattgtaacagctaggctgagcaaagcgtgccccctgaacccaaggcaaagaggctttatcagagcggcgggatgctctgaaaacttaaaactcctgcaaactataatttggtcggccaaaagagaacacagaccactgggtgttgtattcgtggacatcgccaaggcttttgacaccgtaagccaccagcacatcattcatgctttgcagcaaagagaggtggatccccacatcgtcggtctggtgagcaatatgtacgagaacatcagtacgtatatcaccacaaagaggaacacacacacagacaaaatccagatccgggttggagtaaagcagggtgacccgatgtcgccccttttatttaacctggcaatggaccctctattatgcaagctggaagagagtggcaaaggataccaccgaggacagagcagcatcacagcgatggcatttgcagacgatctggttttgctgagcgactcctgggaaggcatgaatacaaatattagcatactggagaccttctgcaatctgaccggactcaaaacacaggggcaaaagtgccacggcttttacatcaagccgacaaagaagtcttacaccatcaatgactgcgctgcctggactatcaacggcacacccctgaacatgatcgaccccggcgaatctgagaaatacctcggcctgcagtttgacccgtggattggaatagcaaggtccggtctctccacaaaactagatttttggcttcagcggatcgatcaagcaccacttaaacctctgcagaaactggatattctcaaaacatacaccatccctcggctgatctacatagctgaccactcagaagtgaaaactgcactactcgaaacccttgaccagaagatccggacagcggtcaaggaatggcttcacctacctccgtgcacctgcgatgccatcctgtactcgagcacgagagacggcggtttgggcatcaccaaattggcaggactgatccccagcgtgcaggcccgtagactgcatcggatcgcacagtcatctgacgagacgatgaaatgcttcatggaaaaagagaaaatggaacagctgcataagaaattgtggattcaagctggaggggacagagagaacataccctcgatttgggaagcaccaccgtcgagtgaaccaccaaacaacgtgagcacaaattcggaatgggaagcaccgacccagaaagataaatttccaaagccttgcaattggaggaaaaacgaattcaaaaaatggaccaaattggcatcccaaggccgcggaattgtaaattttgaaagagacaaaattagtaaccattggatccaatactacagacgcatacctcacaggaaactcctcactgcactacaactcagggccaacgtttaccccacgagagaatttctagccaggggtagacaagaccaatacatcaaggcgtgtaggcactgcgatgcggacattgaatcctgcgcccacatcatcggcaactgcccagtgacacaggacgcccgaatcaagaggcacaataagatctgcgaactgcttctcgaggaggcgaagaagaaggactgggtagtgttcaaggaaccgcacataagggattccaacaaggaactgtacaaacctgacctgatatttgtgaaggatggccgtgcacttgtcgtggatgtgacagtacggtatgaagcagccaaatcatcgctggaggaagccgctgcagagaaagtgagaaagtacaaacacctggaaacggaagtaagacatctcacgaatgcaaaggacgttacttttgtgggctttcccctaggagcgcgggggaaatggcaccaagataactttaaacttttgactgagcttggcctctccaaatcgaggcaagtgaaaatggcagagactttttccacagtagcgctcttttcatctgtggacattgtacatatgtttgccagtagggccagaaaatctatggttatgtgataataggctgccttctgcggggcttgccttctggccatgcccttcttctctcccttgcacctgtacctcttggtctttgaataaagcctgagtaggaaggaccggtaaaaaaaaaaaaaaaaaaaaaaaaaaaaaaacgttgactaaaaaaaaaaaaaaaaaaaaaaaaaaaaaaaaaaaaaaaaaaaaaaaaaaaaaaaaaaaaaaaaaaaaaa

SEQ ID NO: 11430 - DNA, 4564 bp, synthetic construct
  source 1..4564: mol_type = other DNA
ggtctagttacaactgggcatcgctgcagagatcgcacctcctcgtggtcccgctggtagcccttcgaagggtgactaagtcgatctctgccccaggtacggagccgttgggactcaccagtccaacgtaactcctgcctaaattcggtgaaacaaattcctcggtaaaaagccccatggcttcttgcccgaaacctggccccccggtttcagcaggggcaatgagtttggaaagtggactgaccacccactccgttctcgccatcgaacgtggtcccaattcgttggcaaattccggatcagactttgggggggggggtctggggctaccgttacgcctattgagggtatcggtcggcactcagacctcccgctccgactgggtagacctggtgtcctggagccacccaggacccacgtctaagtcccagcaggttgacctggtgtctttatttcctaaacaccgggttgacctgttatccaaaaacgaccaggtagacctggtggctcaatttttaccatctaaatttccccccaatttggcagaaaatgatttggctttgctggtgaacttagagttctacagatcggatttgcatgtgtatgagtgtgttcataaggctgcacattgggagggattaagtggtttgcctgaggtgtatgaacaacttgcaccacaaccgtgtgtgggagaaactttacattctagcctcccacgagacagtgaactgtttgtgcctgaagaggggagcagcgagaaggagagcgaggacgcgccaaaaacatctcctccgacgcctgggaaacatggtttggaacagactggggaggaaaaagtgatggtgactgttcctgacaaaaatccaccttgtccttgctgtggtacccgggtaaactctgtgttgaatctgattgaacatctgaaagtgtcacacgggaaaaggagggtttgttttcggtgtgcaaaatgtggaaaggaaaatagtaactatcacagtgttgtttgtcattttccaaaatgcaggggtccagagacggagaaagccccagctggggagtggatttgtgaggtatgcaacagagattttacaaccaaaattggcctgggacaacacaagagattggcacacccagcagtgagaaatcaggaaaggatcgttgcttcccaaccgaaagaaacatcaaatagaggtgctcacaaaaggtgctggacaaaggaggaggaagaattactaataagactggaggctcagttcgagggacacaaaaatattaataagcttattgcagaacacataaccaccaaaacagctaagcagatcagtgacaaaaggcgattgctgtccagaaagccagcagaggagccacgtatggagcctggaacgtgtcatcacaccaggagagcagctgcgagcctgagaacggagcctgagatgagtcatcaggcccaggcagaggacagagataatggacctgggagacgccctctgccaggcaggcccgctgccggagggagaacaatggacgagataagacgccaccctgataagggcaacggacagcagagacccaccaagcaaaaatcagaagaacagctgcaggcttactataaaaagacactagaggaacgactttcagctggggcacttaacaccttcccccgagcattcaagcaggtaatggaaggccgggatataaagctagtaatcaatcagacagcgcaggactgcttcggatgcctggaatccataagccaaataagaacggcaacccgagataaaaagtacacgggcacccgggagaaacacccaaagaggccttttcagaagtggatgaagaagagagcaatcaaaaaaggtaattatcttcggttccagcgtttattttatcttgatagagggaaactggctaaaatcattttagatgatattgaatgcttgtcttgtgacataccactcagtgaaatttattcggtttttaaaacaagatgggaaacaactggtagctttaaaagccttggggactttaaaacttacgggaaggctgacaacactgccttcagagaattaattacggctaaagaaattgagaaaaatgtgcaggaaatgagcaaaggctcggctcccggtccagacgggattactcttggggacgtcgtaaagatggatcccgagttttccctgaccatggagattttcaatttatggttaacaactggtaaaatcccggacatggtgagggggtgcagaaccgttttgattccaaaatcatcaaagccggatcgtttgaaagacattaataactggagacctatcacgatcggttccatcttgctgagactgttctccaggattgtaacagctaggctgagcaaagcgtgccccctgaacccaaggcaaagaggctttatcagagcggcgggatgctctgaaaacttaaaactcctgcaaactataatttggtcggccaaaagagaacacagaccactgggtgttgtattcgtggacatcgccaaggcttttgacaccgtaagccaccagcacatcattcatgctttgcagcaaagagaggtggatccccacatcgtcggtctggtgagcaatatgtacgagaacatcagtacgtatatcaccacaaagaggaacacacacacagacaaaatccagatccgggttggagtaaagcagggtgacccgatgtcgccccttttatttaacctggcaatggaccctctattatgcaagctggaagagagtggcaaaggataccaccgaggacagagcagcatcacagcgatggcatttgcagacgatctggttttgctgagcgactcctgggaaggcatgaatacaaatattagcatactggagaccttctgcaatctgaccggactcaaaacacaggggcaaaagtgccacggcttttacatcaagccgacaaaggactcttacaccatcaatgactgcgctgcctggactatcaacggcacacccctgaacatgatcgaccccggcgaatctgagaaatacctcggcctgcagtttgacccgtggattggaatagcaaggtccggtctctccacaaaactagatgagtggcttcagcggatcgatcaagcaccacttaaacctctgcagaaaactgatattctcaaaacatacaccatccctcggctgatctacatagctgaccactcagaagtgaaagccgcactactcgaaacccttgaccagaagatccggacagcggtcaaggaatggcttcacctacctccgtgcacctgcgatgccatcctgtactcgagcacgagagacggcggtttgggcatcaccaaattggcaggactgatccccagcgtgcaggcccgtagactgcatcggatcgcacagtcatctgacgatacgatgaaatgcttcatggaaaaagagaggatggaacagctgcataagaaattgtggattcaagctggaggggacagagagaacataccctcgatttgggaagcaccaccgtcgagtgaaccaccaaacaacgtgagcacaaattcggaatgggaagcaccgacccagaaacccaaatttccaaagccttgcaattggaggaaaaacgaattcaaaaaatggaccaaattggcatcccaaggccgcggaattgtaaattttgaaagagacaaaattagtaaccattggatccaatactacagaggcatacctcacaggaaactcctcactgcactacaactcagggccaacgtttaccccacgagagaatttctagccaggggtagacaagaccaatacatcaaggcgtgtaggcactgcgatgcggacattgaatcctgcgcccacatcatcggcaactgcccagtgacacaggacgcccgaatcaagaggcacaattacatctgcgaactgcttctcgaggaggcgaagaagaaggactgggtagtgttcaaggaaccgcacataagggattccaacaaggaactgtacaaacctgacctgatatttgtgaaggatggccgtgcacttgtcgtggatgtgacagtacggtatgaagcagccaaatcatcgctggaggaagccgctgcagagaaagtgagaaagtacaaacacctggaaacggaagtaagacatctcacgaatgcaaaggacgttacttttgtgggctttcccctaggagcgcgggggaaatggcaccaagataactttaaacttttgactgagcttggcctctccaaatcgaggcaagtgaaaatggcagagactttttccacagtagcgctcttttcatctgtggacattgtacatatgtttgccagtagggccagaaaatctatggttatgtgataataggctgccttctgcggggcttgccttctggccatgcccttcttctctcccttgcacctgtacctcttggtctttgaataaagcctgagtaggaaggaccggtaaaaaaaaaaaaaaaaaaaaaaaaaaaaaaacgttgactaaaaaaaaaaaaaaaaaaaaaaaaaaaaaaaaaaaaaaaaaaaaaaaaaaaaaaaaaaaaaaaaaaaaaa

SEQ ID NO: 11431 - DNA, 6182 bp, synthetic construct; identical to SEQ ID NO: 10782
  source 1..6182: mol_type = other DNA

SEQ ID NO: 11432 - DNA, 6212 bp, synthetic construct
  source 1..6212: mol_type = other DNA
gaaataagagagaaaagaagagtaagaagaaatataagagaattcgccaccatggcccctaagaaaaagcggaaggtgcctgtggattttcactatggggtcagggtggacgtgaccctcctgtctaaaatcaggagggtcaatgaacacattaagagtgccactaaaaccggagtagtgcaagtgcacggatcggcttgcacgccaaccctcagtgtgctgtccagcgtggggacagctggcgttctggggttaagaataaagaatgcccttacgcccctggtgggacacacggaaggcagtggagacgttagcttcagcttcaggaatacgtccgtcggtagcggcttcacgcacacgcgtgagctattcggtgcgaatgtactcgacgctggcatagccttttatcgaaagggggaggcatgcgatacgggggcccaaccgcagttcgtcaggaccaccatttcctacggggacaacctcacctccaccgtgcacaaaagcgtggtggaccaaaagggtatcctacctttccacgatcggatggaagccggtggtaggaccaccaggcttctcctctgtggcaaaacgggtgcattcctacttaagtggctaaggcagcaaaaaacaaaagaggaccaaacggtgactgtgtctgtcagcgagacgctgtcgatcgtgacattttctcttggtggcgtgagcaagatcattgatttcaagccagaaaccaaacccgtttctggctgggatggtctgaaggggaagaagtcggtggatgtgggcgtggtgcacaccgacgccctgagccgggttagcctggagtccttaatcgccgccctgagactgtgtaaagtcccgggttggtttacccccgggctgatttggcactccaacgaaatattagaagtggaaggtgtgcccactggctgccaatcaggtgacgtaaagttaagtgtcctacttttagaggtatccggctccgagactcctggaacaagcgagagcgctacacctgagggcagcaatatcagcggctctagctgcggcagccccaacagcgccgacaccagcagcgacttcaaggacctgtggaccaagctgaaggaatgccacgaccgggaagtgcagggactccaggtgaaggtcaccaaactcaagcaagaaagaatcctggacgcccagagactggaagaattcttcaccaagaaccagcagctgagagagcagcagaaagtgctgcacgagacaatcaaggttctggaagatagactgcgggccggcctgtgcgacagatgcgccgtgaccgaggaacacatgcgcaaaaagcagcaggagttcgagaacattagacagcaaaatctgaaattgatcacagagctgatgaacgagagaaacacactgcaggaggagaacaagaagctgagcgagcagctgcaacagaagatcgagaatgatcagcaacaccaggccgctgagctggaatgtgaagaggacgtgatccccgacagcccaatcacagctttcagcttttctggcgtgaacagactgaggcggaaggaaaacccccacgtgcggtacatcgagcagacccataccaagctggaacacagcgtgtgtgccaacgagatgagaaaggtgtccaagtcctccacccatccccagcacaaccctaacgaaaatgagatcctggtggctgatacctacgaccagtctcagagccctatggccaaggcccacggcaccagctcttatacccctgataagagctccttcaacctggccaccgtggtggccgagacactgggcctgggcgtgcaggaggaaagcgagacacagggcccaatgagccctctgggagatgagctgtaccactgcctggaaggcaaccacaagaaacagccttttgagtccggctccgagactcctggaacaagcgagagcgctacacctgagggcagccctaagagaaaggtgtccagcgccgagggcgctgccaaggaagagcctaaacggagaagcgccagactgagcgccaagccccccgccaaggtggaagccaagcctaagaaggccgccgctaaggacaagagcagcgataagaaagtccagaccaagggcaagcggggcgccaaaggcaaacaggccgaggtggccaaccaggagacaaaggaagatctgcctgctgagaacggcgaaaccaagaccgaggaatctccagcttctgacgaggccggagagaaggaggccaaaagcgacagcggctctgagacacctggaacaagcgagagcgccaccccggaatcctatgaacaacttgcaccacaaccgtgtgtgggagaaactttacattctagcctcccacgagacagtgaactgtttgtgcctgaagaggggagcagcgagaaggagagcgaggacgcgccaaaaacatctcctccgacgcctgggaaacatggtttggaacagactggggaggaaaaagtgatggtgactgttcctgacaaaaatccaccttgtccttgctgtggtacccgggtaaactctgtgttgaatctgattgaacatctgaaagtgtcacacgggaaaaggggggtttgttttcggtgtgcaaaatgtggaaaggaaaatagtaactatcacagtgttgtttgtcattttaagaaatgcaggggtccagagacggagaaagccccagctggggagtggatttgtgaggtatgcaacagagattttacaaccaaaattggcctgggacaacacaagagattggcacacccagcagtgagaaatcaggaaaggatcgttgcttcccaaccgaaagaaacatcaaatagaggtgctcacaaaaggtgctggacaaaggaggaggaagaattactaataagactggaggctcagttcgagggaaacaaaaatattaataagcttattgcagaacacataaccaccaaaacagctaagcagatcagtgacaaaaggcgattgctgtccagaaagccagcagaggagccacgtgaggagcctggaacgtgtcatcacaccaggagagcagctgcgagcctgagaacggagcctgagatgagtcatcacgcccaggcagaggacagagataatggacctgggagacgccctctgccaggcagggcagctgccggagggagaacaatggacgagataagacgccaccctgataagggcaacggacagcagagacccaccaagcaaaaatcagaagaacagctgcaggcttactataaaaagacactagaggaacgactttcagctggggcacttaacaccttcccccgagcattcaagcaggtaatggaaggccgggatataaagctagtaatcaatcagacagcgcaggactgcttcggatgcctggaatccataagccaaataagaacggcaacccgagataaaaaggacacggtgacccgggagaaacacccaaagaaaccttttcagaagtggatgaagaagagagcaatcaaaaaaggtaattatcttcggttccagcgtttattttatcttgatagagggaaactggctaaaatcattttagatgatattgaatgcttgtcttgtgacataccactcagtgaaatttattcggtttttaaaacaagatgggaaacaactggtagctttaaaagccttggggactttaaaacttacgggaaggctgacaacactgccttcagagaattaattacggctaaagaaattgagaaaaatgtgcaggaaatgagcaaaggctcggctcccggtccagacgggattactcttggggacgtcgtaaagatggatcccgagttttcccggaccatggagattttcaatttatggttaacaactggtaaaatcccggacatggtgagggggtgcagaaccgttttgattccaaaatcatcaaagccggatcgtttgaaagacattaataactggagacctatcacgatcggttccatcttgctgagactgttctccaggattgtaacagctaggctgagcaaagcgtgccccctgaacccaaggcaaagaggctttatcagagcggcgggatgctctgaaaacttaaaactcctgcaaactataatttggtcggccaaaagagaacacagaccactgggtgttgtattcgtggacatcgccaaggcttttgacaccgtaagccaccagcacatcattcatgctttgcagcaaagagaggtggatccccacatcgtcggtctggtgagcaatatgtacgagaacatcagtacgtatatcaccacaaagaggaacacacacacagacaaaatccagatccgggttggagtaaagcagggtgacccgatgtcgccccttttatttaacctggcaatggaccctctattatgcaagctggaagagagtggcaaaggataccaccgaggacagagcagcatcacagcgatggcatttgcagacgatctggttttgctgagcgactcctgggaaaatatgaatacaaatattagcatactggagaccttctgcaatctgaccggactcaaaacacaggggcaaaagtgccacggcttttacatcaagccgacaaaggactcttacaccatcaatgactgcgctgcctggactatcaacggcacacccctgaacatgatcgaccccggcgaatctgagaaatacctcggcctgcagtttgacccgtggattggaatagcaaggtccggtctctccacaaaactagatttttggcttcagcggatcgatcaagcaccacttaaacctctgcagaaaactgatattctcaaaacatacaccatccctcggctgatctacatagctgaccactcagaagtgaaaagcgcactactcgaaacccttgaccagaagatccggacagcggtcaaggaatggcttcacctacctccgtgcacctgcgatgccatcctgtactcgagcacgagagacggcggtttgggcatcaccaaattggcaggactgatccccagcgtgcaggcccgtagactgcatcggatcgcacagtcatctgacgatacgatgaaatgcttcatggaaaaagagaaaatggaacagctgcataagaaattgtggattcaagctggaggggacagagagaacataccctcgatttgggaagcaccaccgtcgagtgaaccaccaaacaacgtgagcacaaattcggaatgggaagcaccgacccagaaagataaatttccaaagccttgcaattggaggaaaaacgaattcaaaaaatggaccaaattggcatcccaaggccgcggaattgtaaattttgaaagagacaaaattagtaaccattggatccaatactacagacgcatacctcacaggaaactcctcactgcactacaactcagggccaacgtttaccccacgagagaatttctagccaggggtagacaagaccaatacatcaaggcgtgtaggcactgcgatgcggacaacgaatcctgcgcccacatcatcggcaactgcccagtgacacaggacgcccgaatcaagaggcacaattacatctgcgaactgcttctcgaggaggcgaagaagaaggactgggtagtgttcaaggaaccgcacataagggattccaacaaggaactgtacaaacctgacctgatatttgtgaaggatgggcgtgcacttgtcgtggatgtgacagtacggtatgaagcagccaaatcatcgctggaggaagccgctgcagagaaagtgagaaagtacaaacacctggaaacggaagtaagacatctcacgaatgcaaaggacgttacttttgtgggctttcccctaggagcgcgggggaaatggcaccaagataactttaaacttttgactgagcttggcctctccaaatcgaggcaagtgaaaatggcagagactttttccacagtagcgctcttttcatctgtggacattgtacatatgtttgccagtagggccagaaaatctatggttatgtgataataggctgccttctgcggggcttgccttctggccatgcccttcttctctcccttgcacctgtacctcttggtctttgaataaagcctgagtaggaaggaccggtaaaaaaaaaaaaaaaaaaaaaaaaaaaaaaacgttgactaaaaaaaaaaaaaaaaaaaaaaaaaaaaaaaaaaaaaaaaaaaaaaaaaaaaaaaaaaaaaaaaaaaaaa

SEQ ID NO: 11433 - DNA, 5264 bp, synthetic construct
  source 1..5264: mol_type = other DNA
gaaataagagagaaaagaagagtaagaagaaatataagagaattcgccaccatggcccctaagaaaaagcggaaggtgaatatcagcggctctagctgcggcagccccaacagcgccgacaccagcagcgacttcaaggacctgtggaccaagctgaaggaatgccacgaccgggaagtgcagggactccaggtgaaggtcaccaaactcaagcaagaaagaatcctggacgcccagagactggaagaattcttcaccaagaaccagcagctgagagagcagcagaaagtgctgcacgagacaatcaaggttctggaagatagactgcgggccggcctgtgcgacagatgcgccgtgaccgaggaacacatgcgcaaaaagcagcaggagttcgagaacattagacagcaaaatctgaaattgatcacagagctgatgaacgagagaaacacactgcaggaggagaacaagaagctgagcgagcagctgcaacagaagatcgagaatgatcagcaacaccaggccgctgagctggaatgtgaagaggacgtgatccccgacagcccaatcacagctttcagcttttctggcgtgaacagactgaggcggaaggaaaacccccacgtgcggtacatcgagcagacccataccaagctggaacacagcgtgtgtgccaacgagatgagaaaggtgtccaagtcctccacccatccccagcacaaccctaacgaaaatgagatcctggtggctgatacctacgaccagtctcagagccctatggccaaggcccacggcaccagctcttatacccctgataagagctccttcaacctggccaccgtggtggccgagacactgggcctgggcgtgcaggaggaaagcgagacacagggcccaatgagccctctgggagatgagctgtaccactgcctggaaggcaaccacaagaaacagccttttgagtccggctccgagactcctggaacaagcgagagcgctacacctgagggcagccctaagagaaaggtgtccagcgccgagggcgctgccaaggaagagcctaaacggagaagcgccagactgagcgccaagccccccgccaaggtggaagccaagcctaagaaggccgccgctaaggacaagagcagcgataagaaagtccagaccaagggcaagcggggcgccaaaggcaaacaggccgaggtggccaaccaggagacaaaggaagatctgcctgctgagaacggcgaaaccaagaccgaggaatctccagcttctgacgaggccggagagaaggaggccaaaagcgacagcggctctgagacacctggaacaagcgagagcgccaccccggaatcctatgaacaacttgcaccacaaccgtgtgtgggagaaactttacattctagcctcccacgagacagtgaactgtttgtgcctgaagaggggagcagcgagaaggagagcgaggacgcgccaaaaacatctcctccgacgcctgggaaacatggtttggaacagactggggaggaaaaagtgatggtgactgttcctgacaaaaatccaccttgtccttgctgtggtacccgggtaaactctgtgttgaatctgattgaacatctgaaagtgtcacacgggaaaaggggggtttgttttcggtgtgcaaaatgtggaaaggaaaatagtaactatcacagtgttgtttgtcattttaagaaatgcaggggtccagagacggagaaagccccagctggggagtggatttgtgaggtatgcaacagagattttacaaccaaaattggcctgggacaacacaagagattggcacacccagcagtgagaaatcaggaaaggatcgttgcttcccaaccgaaagaaacatcaaatagaggtgctcacaaaaggtgctggacaaaggaggaggaagaattactaataagactggaggctcagttcgagggaaacaaaaatattaataagcttattgcagaacacataaccaccaaaacagctaagcagatcagtgacaaaaggcgattgctgtccagaaagccagcagaggagccacgtgaggagcctggaacgtgtcatcacaccaggagagcagctgcgagcctgagaacggagcctgagatgagtcatcacgcccaggcagaggacagagataatggacctgggagacgccctctgccaggcagggcagctgccggagggagaacaatggacgagataagacgccaccctgataagggcaacggacagcagagacccaccaagcaaaaatcagaagaacagctgcaggcttactataaaaagacactagaggaacgactttcagctggggcacttaacaccttcccccgagcattcaagcaggtaatggaaggccgggatataaagctagtaatcaatcagacagcgcaggactgcttcggatgcctggaatccataagccaaataagaacggcaacccgagataaaaaggacacggtgacccgggagaaacacccaaagaaaccttttcagaagtggatgaagaagagagcaatcaaaaaaggtaattatcagacatctatgaccgacttctaccttgatagagggaaactggctaaaatcattttagatgatattgaatgcttgtcttgtgacataccactcagtgaaatttattcggtttttaaaacaagatgggaaacaactggtagctttaaaagccttggggactttaaaacttacgggaaggctgacaacactgccttcagagaattaattacggctaaagaaattgagaaaaatgtgcaggaaatgagcaaaggctcggctcccggtccagacgggattactcttggggacgtcgtaaagatggatcccgagttttcccggaccatggagattttcaatttatggttaacaactggtaaaatcccggacatggtgagggggtgcagaaccgttttgattccaaaatcatcaaagccggatcgtttgaaagacattaataactggagacctatcacgatcggttccatcttgctgagactgttctccaggattgtaacagctaggctgagcaaagcgtgccccctgaacccaaggcaaagaggctttatcagagcggcgggatgctctgaaaacttaaaactcctgcaaactataatttggtcggccaaaagagaacacagaccactgggtgttgtattcgtggacatcgccaaggcttttgacaccgtaagccaccagcacatcattcatgctttgcagcaaagagaggtggatccccacatcgtcggtctggtgagcaatatgtacgagaacatcagtacgtatatcaccacaaagaggaacacacacacagacaaaatccagatccgggttggagtaaagcagggtgacccgatgtcgccccttttatttaacctggcaatggaccctctattatgcaagctggaagagagtggcaaaggataccaccgaggacagagcagcatcacagcgatggcatttgcagacgatctggttttgctgagcgactcctgggaaaatatgaatacaaatattagcatactggagaccttctgcaatctgaccggactcaaaacacaggggcaaaagtgccacggcttttacatcaagccgacaaaggactcttacaccatcaatgactgcgctgcctggactatcaacggcacacccctgaacatgatcgaccccggcgaatctgagaaatacctcggcctgcagtttgacccgtggattggaatagcaaggtccggtctctccacaaaactagatttttggcttcagcggatcgatcaagcaccacttaaacctctgcagaaaactgatattctcaaaacatacaccatccctcggctgatctacatagctgaccactcagaagtgaaaagcgcactactcgaaacccttgaccagaagatccggacagcggtcaaggaatggcttcacctacctccgtgcacctgcgatgccatcctgtactcgagcacgagagacggcggtttgggcatcaccaaattggcaggactgatccccagcgtgcaggcccgtagactgcatcggatcgcacagtcatctgacgatacgatgaaatgcttcatggaaaaagagaaaatggaacagctgcataagaaattgtggattcaagctggaggggacagagagaacataccctcgatttgggaagcaccaccgtcgagtgaaccaccaaacaacgtgagcacaaattcggaatgggaagcaccgacccagaaagataaatttccaaagccttgcaattggaggaaaaacgaattcaaaaaatggaccaaattggcatcccaaggccgcggaattgtaaattttgaaagagacaaaattagtaaccattggatccaatactacagacgcatacctcacaggaaactcctcactgcactacaactcagggccaacgtttaccccacgagagaatttctagccaggggtagacaagaccaatacatcaaggcgtgtaggcactgcgatgcggacaacgaatcctgcgcccacatcatcggcaactgcccagtgacacaggacgcccgaatcaagaggcacaattacatctgcgaactgcttctcgaggaggcgaagaagaaggactgggtagtgttcaaggaaccgcacataagggattccaacaaggaactgtacaaacctgacctgatatttgtgaaggatgggcgtgcacttgtcgtggatgtgacagtacggtatgaagcagccaaatcatcgctggaggaagccgctgcagagaaagtgagaaagtacaaacacctggaaacggaagtaagacatctcacgaatgcaaaggacgttacttttgtgggctttcccctaggagcgcgggggaaatggcaccaagataactttaaacttttgactgagcttggcctctccaaatcgaggcaagtgaaaatggcagagactttttccacagtagcgctcttttcatctgtggacattgtacatatgtttgccagtagggccagaaaatctatggttatgtgataataggctgccttctgcggggcttgccttctggccatgcccttcttctctcccttgcacctgtacctcttggtctttgaataaagcctgagtaggaaggaccggtaaaaaaaaaaaaaaaaaaaaaaaaaaaaaaacgttgactaaaaaaaaaaaaaaaaaaaaaaaaaaaaaaaaaaaaaaaaaaaaaaaaaaaaaaaaaaaaaaaaaaaaaa

SEQ ID NO: 11434 - DNA, 4564 bp, synthetic construct
  source 1..4564: mol_type = other DNA
ggtctagttacaactgggcatcgctgcagagatcgcacctcctcgtggtcccgctggtagcccttcgaagggtgactaagtcgatctctgccccaggtacggagccgttgggactcaccagtccaacgtaactcctgcctaaattcggtgaaacaaattcctcggtaaaaagccccatggcttcttgcccgaaacctggccccccggtttcagcaggggcaatgagtttggaaagtggactgaccacccactccgttctcgccatcgaacgtggtcccaattcgttggcaaattccggatcagactttgggggggggggtctggggctaccgttacgcctattgagggtatcggtcggcactcagacctcccgctccgactgggtagacctggtgtcctggagccacgtgggacccacgtctaagtcccagcaggttgacctggtgtctttatttcctaaacaccgggttgacctgttatccaaaaacgaccaggtagacctggtggctcaatttttaccatctaaatttccccccaatttggcagaaaatgatttggctttgctggtgaacttagagttctacagatcggatttgcatgtgtatgagggcgttcataaggctgcacattgggagggattaagtggtttgcctgaggtgtatgaacaacttgcaccacaaccgtgtgtgggagaaactttacattctagcctcaagcgagacagtgaactgtttgtgcctgaagaggggagcagcgagaaggagagcgaggacgcgccaaaaacatctcctccgacgcctgggaaacatggtaagaggcagactggggaggaaaaagtgatggtgactgttcctgacaaaaatccaccttgtccttgctgtggtacccgggtaaactctgtgttgaatctgattgaacatctgaaagtgtcacacgggaaaaggggggtttgttttcggtgtgcaaaatgtggaaaggaaaatagtaactatcacagtgttgtttgtcattttaagaaatgcaggggtccagagacggagaaagccccagctggggagtggatttgtgaggtatgcaacagagattttacaaccaaaattggcctgggacaacacaagagaagggcacacccagcagtgagaaatcaggaaaggatcgttgcttcccaaccgaaagaaacatcaaatagaggtgctcacaaaaggtgctggacaaaggaggagagggaattactaataagactggaggctcagttcgagggaaacaaaaatattaataagcttattgcagaacacataaccaccaaaacagctaagcagatcagtgacaaaaggcgattgctgtccagaaagccagcagaggagccacgtgagatgcctggaacgtgtcatcacaccaggagagcagctgcgagcctgagaacggagcctgagatgagtcatcacgcccaggcagaggacagagataatggacctgggagacgccctctgccaggcagggcagctgccggagggagaacaatggacgagataagacgccaccctgataagggcaacggacagcagagacccaccaagcaaaaatcagaagaacagctgcaggcttactataaaaagacactagaggaacgactttcagctggggcacttaacaccttcccccgagcattcaagcaggtaatggaaggccgggatataaagctagtaatcaatcagacagcgcaggactacttcggatgcctggaatccataagccaaataagaacggcaacccgagataaaaaggacacggtgacccggaagaaacacccaaagaaaccttttcagaagtggatgaagaagagagcaatcaaaaaaggtaattatcttcggttccagcgtttatttcaccttgatagagggaaactggctaaaatcattttagatgatattgaatgcttgtcttgtgacataccactcagtgaaatttattcggtttttaaaacaagatgggaaacaactggtagctttaaaagccttggggactttaaaacttacgggaaggctgacaacactgccttcagagacttaattacggctaaagaaattgagaaaaatgtgcaggaaatgagcaaaggctcggctcccggtccagacgggattactcttggggacgtcgtaaagatggatcccgagtactccatcaccgccgagattttcaatttatggttaacaactggtaaaatcccggacatggtgagggggtgcagaaccgttttgattccaaaatcatcagacccggatcgtttgaaagacattaataactggagacctatcacgatcggttccatcttgctgagactgttctccaggattgtaacagctaggctgagcaaagcgtgccccctgaacccaaggcaaagaggctttatcagagcggcgggatgctctgaaaacttaaaactcctgcaaactataatttggtcggccaaaagagaacacagaccactgggtgttgtattcgtggacatcgccaaggcttttgacaccgtaagccaccagcacatcattcatgctttgcagcaaagagaggtggatccccacatcgtcggtctggtgagcaatatgtacgagaacatcagtacgtatatcaccacaaagaggaacacacacacagacaaaatccagatccgggttggagtaaagcagggtgacccgatgtcgccccttttatttaacctggcaatggaccctctattatgcaagctggaagagagtggcaaaggataccaccgaggacagagcagcatcacagcgatggcatttgcagacgatctggttttgctgagcgactcctgggaaggcatgaatacaaatattagcatactggagaccttctgcaatctgaccggactcaaaacacaggggcaaaagtgccacggcttttacatcaagccgacaaagaagtcttacaccatcaatgactgcgctgcctggactatcaacggcacacccctgaacatgatcgaccccggcgaatctgagaaatacctcggcctgcagtttgacccgtggattggaatagcaaggtccggtctctccacaaaactagatttttggcttcagcggatcgatcaagcaccacttaaacctctgcagaaactggatattctcaaaacatacaccatccctcggctgatctacatagctgaccactcagaagtgaaaactgcactactcgaactgcttgaccagaagatccggacagcggtcaaggaatggcttcacctacctccgtgcacctgcgatgccatcctgtactcgagcacgagagacggcggtttgggcatcaccaaattggcaggactgatccccagcgtgcaggcccgtagactgcatcggatcgcacagtcatctgacgagacgatgaaatgcttcatggaaaaagagaaaatggaacagctgcataagaaattgtggattcaagctggaggggacagagagaacataccctcgatttgggaagcaccaccgtcgagtgaaccaccaaacaacgtgagcacaaattcggaatgggaagcaccgacccagaaagataaatttccaaagccttgcaattggaggaaaaacgaattcaaaaaatggaccaaattggcatcccaaggccgcggaattgtaaattttgaaagagacaaaattagtaaccattggatccaatactacagacgcatacctcacaggaaactcctcactgcactacaactcagggccaacgtttaccccacgagagaatttctagccaggggtagacaagaccaatacatcaaggcgtgtaggcactgcgatgcggacattgaatcctgcgcccacatcatcggcaactgcccagtgacacaggacgcccgaatcaagaggcacaataagatctgcgaactgcttctcgaggaggcgaagaagaaggactgggtagtgttcaaggaaccgcacataagggattccaacaaggaactgtacaaacctgacctgatatttgtgaaggatgcccgtgcacttgtcgtggatgtgacagtacggtatgaagcagccaaatcatcgctggaggaagccgctgcagagaaagtgagaaagtacaaacacctggaaacggaagtaagacatctcacgaatgcaaaggacgttacttttgtgggctttcccctaggagcgcgggggaaatggcaccaagataactttaaacttttgactgagcttggcctctccaaatcgaggcaagtgaaaatggcagagactttttccacagtagcgctcttttcatctgtggacattgtacatatgtttgccagtagggccagaaaatctatggttatgtgataataggctgccttctgcggggcttgccttctggccatgcccttcttctctcccttgcacctgtacctcttggtctttgaataaagcctgagtaggaaggaccggtaaaaaaaaaaaaaaaaaaaaaaaaaaaaaaacgttgactaaaaaaaaaaaaaaaaaaaaaaaaaaaaaaaaaaaaaaaaaaaaaaaaaaaaaaaaaaaaaaaaaaaaaa

SEQ ID NO: 11435 - DNA, 4564 bp, synthetic construct
  source 1..4564: mol_type = other DNA
ggtctagttacaactgggcatcgctgcagagatcgcacctcctcgtggtcccgctggtagcccttcgaagggtgactaagtcgatctctgccccaggtacggagccgttgggactcaccagtccaacgtaactcctgcctaaattcggtgaaacaaattcctcggtaaaaagccccatggcttcttgcccgaaacctggccccccggtttcagcaggggcaatgagtttggaaagtggactgaccacccactccgttctcgccatcgaacgtggtcccaattcgttggcaaattccggatcagactttgggggggggggtctggggctaccgttacgcctattgagggtatcggtcggcactcagacctcccgctccgactgggtagacctggtgtcctggagccacccaggacccacgtctaagtcccagcaggttgacctggtgtctttatttcctaaacaccgggttgacctgttatccaaaaacgaccaggtagacctggtggctcaatttttaccatctaaatttccccccaatttggcagaaaatgatttggctttgctggtgaacttagagttctacagatcggatttgcatgtgtatgagtgtgttcataaggctgcacattgggagggattaagtggtttgcctgaggtgtatgaacaacttgcaccacaaccgtgtgtgggagaaactttacattctagcctcccacgagacagtgaactgtttgtgcctgaagaggggagcagcgagaaggagagcgaggacgcgccaaaaacatctcctccgacgcctgggaaacatggtttggaacagactggggaggaaaaagtgatggtgactgttcctgacaaaaatccaccttgtccttgctgtggtacccgggtaaactctgtgttgaatctgattgaacatctgaaagtgtcacacgggaaaaggagggtttgttttcggtgtgcaaaatgtggaaaggaaaatagtaactatcacagtgttgtttgtcattttccaaaatgcaggggtccagagacggagaaagccccagctggggagtggatttgtgaggtatgcaacagagattttacaaccaaaattggcctgggacaacacaagagattggcacacccagcagtgagaaatcaggaaaggatcgttgcttcccaaccgaaagaaacatcaaatagaggtgctcacaaaaggtgctggacaaaggaggaggaagaattactaataagactggaggctcagttcgagggacacaaaaatattaataagcttattgcagaacacataaccaccaaaacagctaagcagatcagtgacaaaaggcgattgctgtccagaaagccagcagaggagccacgtatggagcctggaacgtgtcatcacaccaggagagcagctgcgagcctgagaacggagcctgagatgagtcatcaggcccaggcagaggacagagataatggacctgggagacgccctctgccaggcaggcccgctgccggagggagaacaatggacgagataagacgccaccctgataagggcaacggacagcagagacccaccaagcaaaaatcagaagaacagctgcaggcttactataaaaagacactagaggaacgactttcagctggggcacttaacaccttcccccgagcattcaagcaggtaatggaaggccgggatataaagctagtaatcaatcagacagcgcaggactgcttcggatgcctggaatccataagccaaataagaacggcaacccgagataaaaagtacacgggcacccgggagaaacacccaaagaggccttttcagaagtggatgaagaagagagcaatcaaaaaaggtaattatcttcggttccagcgtttattttatcttgatagagggaaactggctaaaatcattttagatgatattgaatgcttgtcttgtgacataccactcagtgaaatttattcggtttttaaaacaagatgggaaacaactggtagctttaaaagccttggggactttaaaacttacgggaaggctgacaacactgccttcagagaattaattacggctaaagaaattgagaaaaatgtgcaggaaatgagcaaaggctcggctcccggtccagacgggattactcttggggacgtcgtaaagatggatcccgagttttccctgaccatggagattttcaatttatggttaacaactggtaaaatcccggacatggtgagggggtgcagaaccgttttgattccaaaatcatcaaagccggatcgtttgaaagacattaataactggagacctatcacgatcggttccatcttgctgagactgttctccaggattgtaacagctaggctgagcaaagcgtgccccctgaacccaaggcaaagaggctttatcagagcggcgggatgctctgaaaacttaaaactcctgcaaactataatttggtcggccaaaagagaacacagaccactgggtgttgtattcgtggacatcgccaaggcttttgacaccgtaagccaccagcacatcattcatgctttgcagcaaagagaggtggatccccacatcgtcggtctggtgagcaatatgtacgagaacatcagtacgtatatcaccacaaagaggaacacacacacagacaaaatccagatccgggttggagtaaagcagggtgacccgatgtcgccccttttatttaacctggcaatggaccctctattatgcaagctggaagagagtggcaaaggataccaccgaggacagagcagcatcacagcgatggcatttgcagacgatctggttttgctgagcgactcctgggaaggcatgaatacaaatattagcatactggagaccttctgcaatctgaccggactcaaaacacaggggcaaaagtgccacggcttttacatcaagccgacaaaggactcttacaccatcaatgactgcgctgcctggactatcaacggcacacccctgaacatgatcgaccccggcgaatctgagaaatacctcggcctgcagtttgacccgtggattggaatagcaaggtccggtctctccacaaaactagatgagtggcttcagcggatcgatcaagcaccacttaaacctctgcagaaaactgatattctcaaaacatacaccatccctcggctgatctacatagctgaccactcagaagtgaaagccgcactactcgaaacccttgacaggaagatccggacagcggtcaaggaatggcttcacctacctccgtgcacctgcgatgccatcctgtactcgagcacgagagacggcggtttgggcatcaccaaattggcaggactgatccccagcgtgcaggcccgtagactgcatcggatcgcacagtcatctgacgatacgatgaaatgcttcatggaaaaagagaggatggaacagctgcataagaaattgtggattcaagctggaggggacagagagaacataccctcgatttgggaagcaccaccgtcgagtgaaccaccaaacaacgtgagcacaaattcggaatgggaagcaccgacccagaaacccaaatttccaaagccttgcaattggaggaaaaacgaattcaaaaaatggaccaaattggcatcccaaggccgcggaattgtaaattttgaaagagacaaaattagtaaccattggatccaatactacagaggcatacctcacaggaaactcctcactgcactacaactcagggccaacgtttaccccacgagagaatttctagccaggggtagacaagaccaatacatcaaggcgtgtaggcactgcgatgcggacattgaatcctgcgcccacatcatcggcaactgcccagtgacacaggacgcccgaatcaagaggcacaataagatctgcgaactgcttctcgaggaggcgaagaagaaggactgggtagtgttcaaggaaccgcacataagggattccaacaaggaactgtacaaacctgacctgatatttgtgaaggatggccgtgcacttgtcgtggatgtgacagtacggtatgaagcagccaaatcatcgctggaggaagccgctgcagagaaagtgagaaagtacaaacacctggaaacggaagtaagacatctcacgaatgcaaaggacgttacttttgtgggctttcccctaggagcgcgggggaaatggcaccaagataactttaaacttttgactgagcttggcctctccaaatcgaggcaagtgaaaatggcagagactttttccacagtagcgctcttttcatctgtggacattgtacatatgtttgccagtagggccagaaaatctatggttatgtgataataggctgccttctgcggggcttgccttctggccatgcccttcttctctcccttgcacctgtacctcttggtctttgaataaagcctgagtaggaaggaccggtaaaaaaaaaaaaaaaaaaaaaaaaaaaaaaacgttgactaaaaaaaaaaaaaaaaaaaaaaaaaaaaaaaaaaaaaaaaaaaaaaaaaaaaaaaaaaaaaaaaaaaaaa

SEQ ID NO: 11436 - DNA, 4564 bp, synthetic construct
  source 1..4564: mol_type = other DNA
ggtctagttacaactgggcatcgctgcagagatcgcacctcctcgtggtcccgctggtagcccttcgaagggtgactaagtcgatctctgccccaggtacggagccgttgggactcaccagtccaacgtaactcctgcctaaattcggtgaaacaaattcctcggtaaaaagccccatggcttcttgcccgaaacctggccccccggtttcagcaggggcaatgagtttggaaagtggactgaccacccactccgttctcgccatcgaacgtggtcccaattcgttggcaaattccggatcagactttgggggggggggtctggggctaccgttacgcctattgagggtatcggtcggcactcagacctcccgctccgactgggtagacctggtgtcctggagccacccaggacccacgtctaagtcccagcaggttgacctggtgtctttatttcctaaacaccgggttgacctgttatccaaaaacgaccaggtagacctggtggctcaatttttaccatctaaatttccccccaatttggcagaaaatgatttggctttgctggtgaacttagagttctacagatcggatttgcatgtgtatgagtgtgttcataaggctgcacattgggagggattaagtggtttgcctgaggtgtatgaacaacttgcaccacaaccgtgtgtgggagaaactttacattctagcctcccacgagacagtgaactgtttgtgcctgaagaggggagcagcgagaaggagagcgaggacgcgccaaaaacatctcctccgacgcctgggaaacatggtttggaacagactggggaggaaaaagtgatggtgactgttcctgacaaaaatccaccttgtccttgctgtggtacccgggtaaactctgtgttgaatctgattgaacatctgaaagtgtcacacgggaaaaggagggtttgttttcggtgtgcaaaatgtggaaaggaaaatagtaactatcacagtgttgtttgtcattttaagaaatgcaggggtccagagacggagaaagccccagctggggagtggatttgtgaggtatgcaacagagattttacaaccaaaattggcctgggacaacacaagagattggcacacccagcagtgagaaatcaggaaaggatcgttgcttcccaaccgaaagaaacatcaaatagaggtgctcacaaaaggtgctggacaaaggaggaggaagaattactaataagactggaggctcagttcgagggacacaaaaatattaataagcttattgcagaacacataaccaccaaaacagctaagcagatcagtgacaaaaggcgattgctgtccagaaagccagcagaggagccacgtatggagcctggaacgtgtcatcacaccaggagagcagctgcgagcctgagaacggagcctgagatgagtcatcacgcccaggcagaggacagagataatggacctgggagacgccctctgccaggcaggcccgctgccggagggagaacaatggacgagataagacgccaccctgataagggcaacggacagcagagacccaccaagcaaaaatcagaagaacagctgcaggcttactataaaaagacactagaggaacgactttcagctggggcacttaacaccttcccccgagcattcaagcaggtaatggaaggccgggatataaagctagtaatcaatcagacagcgcaggactgcttcggatgcctggaatccataagccaaataagaacggcaacccgagataaaaagtacacgggcacccgggagaaacacccaaagaggccttttcagaagtggatgaagaagagagcaatcaaaaaaggtaattatcttcggttccagcgtttattttatcttgatagagggaaactggctaaaatcattttagatgatattgaatgcttgtcttgtgacataccactcagtgaaatttattcggtttttaaaacaagatgggaaacaactggtagctttaaaagccttggggactttaaaacttacgggaaggctgacaacactgccttcagagaattaattacggctaaagaaattgagaaaaatgtgcaggaaatgagcaaaggctcggctcccggtccagacgggattactcttggggacgtcgtaaagatggatcccgagttttccctgaccatggagattttcaatttatggttaacaactggtaaaatcccggacatggtgagggggtgcagaaccgttttgattccaaaatcatcaaagccggatcgtttgaaagacattaataactggagacctatcacgatcggttccatcttgctgagactgttctccaggattgtaacagctaggctgagcaaagcgtgccccctgaacccaaggcaaagaggctttatcagagcggcgggatgctctgaaaacttaaaactcctgcaaactataatttggtcggccaaaagagaacacagaccactgggtgttgtattcgtggacatcgccaaggcttttgacaccgtaagccaccagcacatcattcatgctttgcagcaaagagaggtggatccccacatcgtcggtctggtgagcaatatgtacgagaacatcagtacgtatatcaccacaaagaggaacacacacacagacaaaatccagatccgggttggagtaaagcagggtgacccgatgtcgccccttttatttaacctggcaatggaccctctattatgcaagctggaagagagtggcaaaggataccaccgaggacagagcagcatcacagcgatggcatttgcagacgatctggttttgctgagcgactcctgggaaaatatgaatacaaatattagcatactggagaccttctgcaatctgaccggactcaaaacacaggggcaaaagtgccacggcttttacatcaagccgacaaaggactcttacaccatcaatgactgcgctgcctggactatcaacggcacacccctgaacatgatcgaccccggcgaatctgagaaatacctcggcctgcagtttgacccgtggattggaatagcaaggtccggtctctccacaaaactagatgagtggcttcagcggatcgatcaagcaccacttaaacctctgcagaaaactgatattctcaaaacatacaccatccctcggctgatctacatagctgaccactcagaagtgaaagccgcactactcgaaacccttgaccagaagatccggacagcggtcaaggaatggcttcacctacctccgtgcacctgcgatgccatcctgtactcgagcacgagagacggcggtttgggcatcaccaaattggcaggactgatccccagcgtgcaggcccgtagactgcatcggatcgcacagtcatctgacgatacgatgaaatgcttcatggaaaaagagaggatggaacagctgcataagaaattgtggattcaagctggaggggacagagagaacataccctcgatttgggaagcaccaccgtcgagtgaaccaccaaacaacgtgagcacaaattcggaatgggaagcaccgacccagaaacccaaatttccaaagccttgcaattggaggaaaaacgaattcaaaaaatggaccaaattggcatcccaaggccgcggaattgtaaattttgaaagagacaaaattagtaaccattggatccaatactacagaggcatacctcacaggaaactcctcactgcactacaactcagggccaacgtttaccccacgagagaatttctagccaggggtagacaagaccaatacatcaaggcgtgtaggcactgcgatgcggacattgaatcctgcgcccacatcatcggcaactgcccagtgacacaggacgcccgaatcaagaggcacaattacatctgcgaactgcttctcgaggaggcgaagaagaaggactgggtagtgttcaaggaaccgcacataagggattccaacaaggaactgtacaaacctgacctgatatttgtgaaggatggccgtgcacttgtcgtggatgtgacagtacggtatgaagcagccaaatcatcgctggaggaagccgctgcagagaaagtgagaaagtacaaacacctggaaacggaagtaagacatctcacgaatgcaaaggacgttacttttgtgggctttcccctaggagcgcgggggaaatggcaccaagataactttaaacttttgactgagcttggcctctccaaatcgaggcaagtgaaaatggcagagactttttccacagtagcgctcttttcatctgtggacattgtacatatgtttgccagtagggccagaaaatctatggttatgtgataataggctgccttctgcggggcttgccttctggccatgcccttcttctctcccttgcacctgtacctcttggtctttgaataaagcctgagtaggaaggaccggtaaaaaaaaaaaaaaaaaaaaaaaaaaaaaaacgttgactaaaaaaaaaaaaaaaaaaaaaaaaaaaaaaaaaaaaaaaaaaaaaaaaaaaaaaaaaaaaaaaaaaaaaa

SEQ ID NO: 11437 - DNA, 5407 bp, synthetic construct
  source 1..5407: mol_type = other DNA
ggtctagttacaactgggcatcgctgcagagatcgcacctcctcgtggtcccgctggtagcccttcgaagggtgactaagtcgatctctgccccaggtacggagccgttgggactcaccagtccaacgtaactcctgcctaaattcggtgaaacaaattcctcggtaaaaagccccatgggaactgcactaacaccgctcctgacgaagttcgccacgcgctacgagatgggtaccacgcctgaagaagtggcgaacacgctcaagcagacctgtttcaagggccaggtcaatgattcgcagatggtcgccctgctgatcgtggcagaccagtacaagcttaaccccttcaccaaggagttgtacgcattccccgacaagaacaacggcatcgtgccggttgttggtgtggatggctgggctcggatcatcaacgagaacccacagttcgatggcatggaattctcaatggaccagcagggaaccgaatgcacctgcaagatctatcggaaggaccgcagccatgccatcagcgcgactgagtacatggccgagtgcaagcggaacacccagccttggcagtcccatccgcgccggatgcttcgccacaaggcaatgatccagtgcgcacgcctcgcgttcgggttcgccggcatatacgaccaggacgaggccgagcggatcgttgaacgagacgtcactcccgcagagcagtacgaggacgtcagcgaggcgatctgcctgatcaaggactccccaacaatggaggacttgcaggcagcattcagcaatgcctggaaagcctataagacaaagggcgcgcgcgaccagcttacggcggccaaggaccagcggaagaaagaattgctggacgcccctatagacgttgaattcgaggagaccggcgatgatcgagcagcgtctggaggatctagcggaggatcctctggcagcgagacaccaggaacaagcgagtcagcaacaccagagagcagtggcggcagcagcggcggcagcagcatggcttcttgcccgaaacctggccccccggtttcagcaggggcaatgagtttggaaagtggactgaccacccactccgttctcgccatcgaacgtggtcccaattcgttggcaaattccggatcagactttgggggggggggtctggggctaccgttacgcctattgagggtatcggtcggcactcagacctcccgctccgactgggtagacctggtgtcctggagccacccaggacccacgtctaagtcccagcaggttgacctggtgtctttatttcctaaacaccgggttgacctgttatccaaaaacgaccaggtagacctggtggctcaatttttaccatctaaatttccccccaatttggcagaaaatgatttggctttgctggtgaacttagagttctacagatcggatttgcatgtgtatgagtgtgttcataaggctgcacattgggagggattaagtggtttgcctgaggtgtatgaacaacttgcaccacaaccgtgtgtgggagaaactttacattctagcctcccacgagacagtgaactgtttgtgcctgaagaggggagcagcgagaaggagagcgaggacgcgccaaaaacatctcctccgacgcctgggaaacatggtttggaacagactggggaggaaaaagtgatggtgactgttcctgacaaaaatccaccttgtccttgctgtggtacccgggtaaactctgtgttgaatctgattgaacatctgaaagtgtcacacgggaaaaggagggtttgttttcggtgtgcaaaatgtggaaaggaaaatagtaactatcacagtgttgtttgtcattttaagaaatgcaggggtccagagacggagaaagccccagctggggagtggatttgtgaggtatgcaacagagattttacaaccaaaattggcctgggacaacacaagagattggcacacccagcagtgagaaatcaggaaaggatcgttgcttcccaaccgaaagaaacatcaaatagaggtgctcacaaaaggtgctggacaaaggaggaggaagaattactaataagactggaggctcagttcgagggacacaaaaatattaataagcttattgcagaacacataaccaccaaaacagctaagcagatcagtgacaaaaggcgattgctgtccagaaagccagcagaggagccacgtatggagcctggaacgtgtcatcacaccaggagagcagctgcgagcctgagaacggagcctgagatgagtcatcacgcccaggcagaggacagagataatggacctgggagacgccctctgccaggcaggcccgctgccggagggagaacaatggacgagataagacgccaccctgataagggcaacggacagcagagacccaccaagcaaaaatcagaagaacagctgcaggcttactataaaaagacactagaggaacgactttcagctggggcacttaacaccttcccccgagcattcaagcaggtaatggaaggccgggatataaagctagtaatcaatcagacagcgcaggactgcttcggatgcctggaatccataagccaaataagaacggcaacccgagataaaaagtacacgggcacccgggagaaacacccaaagaggccttttcagaagtggatgaagaagagagcaatcaaaaaaggtaattatcttcggttccagcgtttattttatcttgatagagggaaactggctaaaatcattttagatgatattgaatgcttgtcttgtgacataccactcagtgaaatttattcggtttttaaaacaagatgggaaacaactggtagctttaaaagccttggggactttaaaacttacgggaaggctgacaacactgccttcagagaattaattacggctaaagaaattgagaaaaatgtgcaggaaatgagcaaaggctcggctcccggtccagacgggattactcttggggacgtcgtaaagatggatcccgagttttccctgaccatggagattttcaatttatggttaacaactggtaaaatcccggacatggtgagggggtgcagaaccgttttgattccaaaatcatcaaagccggatcgtttgaaagacattaataactggagacctatcacgatcggttccatcttgctgagactgttctccaggattgtaacagctaggctgagcaaagcgtgccccctgaacccaaggcaaagaggctttatcagagcggcgggatgctctgaaaacttaaaactcctgcaaactataatttggtcggccaaaagagaacacagaccactgggtgttgtattcgtggacatcgccaaggcttttgacaccgtaagccaccagcacatcattcatgctttgcagcaaagagaggtggatccccacatcgtcggtctggtgagcaatatgtacgagaacatcagtacgtatatcaccacaaagaggaacacacacacagacaaaatccagatccgggttggagtaaagcagggtgacccgatgtcgccccttttatttaacctggcaatggaccctctattatgcaagctggaagagagtggcaaaggataccaccgaggacagagcagcatcacagcgatggcatttgcagacgatctggttttgctgagcgactcctgggaaaatatgaatacaaatattagcatactggagaccttctgcaatctgaccggactcaaaacacaggggcaaaagtgccacggcttttacatcaagccgacaaaggactcttacaccatcaatgactgcgctgcctggactatcaacggcacacccctgaacatgatcgaccccggcgaatctgagaaatacctcggcctgcagtttgacccgtggattggaatagcaaggtccggtctctccacaaaactagatgagtggcttcagcggatcgatcaagcaccacttaaacctctgcagaaaactgatattctcaaaacatacaccatccctcggctgatctacatagctgaccactcagaagtgaaagccgcactactcgaaacccttgaccagaagatccggacagcggtcaaggaatggcttcacctacctccgtgcacctgcgatgccatcctgtactcgagcacgagagacggcggtttgggcatcaccaaattggcaggactgatccccagcgtgcaggcccgtagactgcatcggatcgcacagtcatctgacgatacgatgaaatgcttcatggaaaaagagaggatggaacagctgcataagaaattgtggattcaagctggaggggacagagagaacataccctcgatttgggaagcaccaccgtcgagtgaaccaccaaacaacgtgagcacaaattcggaatgggaagcaccgacccagaaacccaaatttccaaagccttgcaattggaggaaaaacgaattcaaaaaatggaccaaattggcatcccaaggccgcggaattgtaaattttgaaagagacaaaattagtaaccattggatccaatactacagacgcatacctcacaggaaactcctcactgcactacaactcagggccaacgtttaccccacgagagaatttctagccaggggtagacaagaccaatacatcaaggcgtgtaggcactgcgatgcggacattgaatcctgcgcccacatcatcggcaactgcccagtgacacaggacgcccgaatcaagaggcacaattacatctgcgaactgcttctcgaggaggcgaagaagaaggactgggtagtgttcaaggaaccgcacataagggattccaacaaggaactgtacaaacctgacctgatatttgtgaaggatggccgtgcacttgtcgtggatgtgacagtacggtatgaagcagccaaatcatcgctggaggaagccgctgcagagaaagtgagaaagtacaaacacctggaaacggaagtaagacatctcacgaatgcaaaggacgttacttttgtgggctttcccctaggagcgcgggggaaatggcaccaagataactttaaacttttgactgagcttggcctctccaaatcgaggcaagtgaaaatggcagagactttttccacagtagcgctcttttcatctgtggacattgtacatatgtttgccagtagggccagaaaatctatggttatgtgataataggctgccttctgcggggcttgccttctggccatgcccttcttctctcccttgcacctgtacctcttggtctttgaataaagcctgagtaggaaggaccggtaaaaaaaaaaaaaaaaaaaaaaaaaaaaaaacgttgactaaaaaaaaaaaaaaaaaaaaaaaaaaaaaaaaaaaaaaaaaaaaaaaaaaaaaaaaaaaaaaaaaaaaaa

SEQ ID NO: 11438 - DNA, 6053 bp, synthetic construct
  source 1..6053: mol_type = other DNA
gaaataagagagaaaagaagagtaagaagaaatataagagaattcgccaccatggcccctaagaaaaagcggaaggtgggaactgcactaacaccgctcctgacgaagttcgccacgcgctacgagatgggtaccacgcctgaagaagtggcgaacacgctcaagcagacctgtttcaagggccaggtcaatgattcgcagatggtcgccctgctgatcgtggcagaccagtacaagcttaaccccttcaccaaggagttgtacgcattccccgacaagaacaacggcatcgtgccggttgttggtgtggatggctgggctcggatcatcaacgagaacccacagttcgatggcatggaattctcaatggaccagcagggaaccgaatgcacctgcaagatctatcggaaggaccgcagccatgccatcagcgcgactgagtacatggccgagtgcaagcggaacacccagccttggcagtcccatccgcgccggatgcttcgccacaaggcaatgatccagtgcgcacgcctcgcgttcgggttcgccggcatatacgaccaggacgaggccgagcggatcgttgaacgagacgtcactcccgcagagcagtacgaggacgtcagcgaggcgatctgcctgatcaaggactccccaacaatggaggacttgcaggcagcattcagcaatgcctggaaagcctataagacaaagggcgcgcgcgaccagcttacggcggccaaggaccagcggaagaaagaattgctggacgcccctatagacgttgaattcgaggagaccggcgatgatcgagcagcgagcggctctgagacacctggaacaagcgagagcgccaccccggaatccaatatcagcggctctagctgcggcagccccaacagcgccgacaccagcagcgacttcaaggacctgtggaccaagctgaaggaatgccacgaccgggaagtgcagggactccaggtgaaggtcaccaaactcaagcaagaaagaatcctggacgcccagagactggaagaattcttcaccaagaaccagcagctgagagagcagcagaaagtgctgcacgagacaatcaaggttctggaagatagactgcgggccggcctgtgcgacagatgcgccgtgaccgaggaacacatgcgcaaaaagcagcaggagttcgagaacattagacagcaaaatctgaaattgatcacagagctgatgaacgagagaaacacactgcaggaggagaacaagaagctgagcgagcagctgcaacagaagatcgagaatgatcagcaacaccaggccgctgagctggaatgtgaagaggacgtgatccccgacagcccaatcacagctttcagcttttctggcgtgaacagactgaggcggaaggaaaacccccacgtgcggtacatcgagcagacccataccaagctggaacacagcgtgtgtgccaacgagatgagaaaggtgtccaagtcctccacccatccccagcacaaccctaacgaaaatgagatcctggtggctgatacctacgaccagtctcagagccctatggccaaggcccacggcaccagctcttatacccctgataagagctccttcaacctggccaccgtggtggccgagacactgggcctgggcgtgcaggaggaaagcgagacacagggcccaatgagccctctgggagatgagctgtaccactgcctggaaggcaaccacaagaaacagccttttgagtccggctccgagactcctggaacaagcgagagcgctacacctgagggcagccctaagagaaaggtgtccagcgccgagggcgctgccaaggaagagcctaaacggagaagcgccagactgagcgccaagccccccgccaaggtggaagccaagcctaagaaggccgccgctaaggacaagagcagcgataagaaagtccagaccaagggcaagcggggcgccaaaggcaaacaggccgaggtggccaaccaggagacaaaggaagatctgcctgctgagaacggcgaaaccaagaccgaggaatctccagcttctgacgaggccggagagaaggaggccaaaagcgacagcggctctgagacacctggaacaagcgagagcgccaccccggaatcctatgaacaacttgcaccacaaccgtgtgtgggagaaactttacattctagcctcccacgagacagtgaactgtttgtgcctgaagaggggagcagcgagaaggagagcgaggacgcgccaaaaacatctcctccgacgcctgggaaacatggtttggaacagactggggaggaaaaagtgatggtgactgttcctgacaaaaatccaccttgtccttgctgtggtacccgggtaaactctgtgttgaatctgattgaacatctgaaagtgtcacacgggaaaaggggggtttgttttcggtgtgcaaaatgtggaaaggaaaatagtaactatcacagtgttgtttgtcattttaagaaatgcaggggtccagagacggagaaagccccagctggggagtggatttgtgaggtatgcaacagagattttacaaccaaaattggcctgggacaacacaagagattggcacacccagcagtgagaaatcaggaaaggatcgttgcttcccaaccgaaagaaacatcaaatagaggtgctcacaaaaggtgctggacaaaggaggaggaagaattactaataagactggaggctcagttcgagggaaacaaaaatattaataagcttattgcagaacacataaccaccaaaacagctaagcagatcagtgacaaaaggcgattgctgtccagaaagccagcagaggagccacgtgaggagcctggaacgtgtcatcacaccaggagagcagctgcgagcctgagaacggagcctgagatgagtcatcacgcccaggcagaggacagagataatggacctgggagacgccctctgccaggcagggcagctgccggagggagaacaatggacgagataagacgccaccctgataagggcaacggacagcagagacccaccaagcaaaaatcagaagaacagctgcaggcttactataaaaagacactagaggaacgactttcagctggggcacttaacaccttcccccgagcattcaagcaggtaatggaaggccgggatataaagctagtaatcaatcagacagcgcaggactgcttcggatgcctggaatccataagccaaataagaacggcaacccgagataaaaaggacacggtgacccgggagaaacacccaaagaaaccttttcagaagtggatgaagaagagagcaatcaaaaaaggtaattatcttcggttccagcgtttattttatcttgatagagggaaactggctaaaatcattttagatgatattgaatgcttgtcttgtgacataccactcagtgaaatttattcggtttttaaaacaagatgggaaacaactggtagctttaaaagccttggggactttaaaacttacgggaaggctgacaacactgccttcagagaattaattacggctaaagaaattgagaaaaatgtgcaggaaatgagcaaaggctcggctcccggtccagacgggattactcttggggacgtcgtaaagatggatcccgagttttcccggaccatggagattttcaatttatggttaacaactggtaaaatcccggacatggtgagggggtgcagaaccgttttgattccaaaatcatcaaagccggatcgtttgaaagacattaataactggagacctatcacgatcggttccatcttgctgagactgttctccaggattgtaacagctaggctgagcaaagcgtgccccctgaacccaaggcaaagaggctttatcagagcggcgggatgctctgaaaacttaaaactcctgcaaactataatttggtcggccaaaagagaacacagaccactgggtgttgtattcgtggacatcgccaaggcttttgacaccgtaagccaccagcacatcattcatgctttgcagcaaagagaggtggatccccacatcgtcggtctggtgagcaatatgtacgagaacatcagtacgtatatcaccacaaagaggaacacacacacagacaaaatccagatccgggttggagtaaagcagggtgacccgatgtcgccccttttatttaacctggcaatggaccctctattatgcaagctggaagagagtggcaaaggataccaccgaggacagagcagcatcacagcgatggcatttgcagacgatctggttttgctgagcgactcctgggaaaatatgaatacaaatattagcatactggagaccttctgcaatctgaccggactcaaaacacaggggcaaaagtgccacggcttttacatcaagccgacaaaggactcttacaccatcaatgactgcgctgcctggactatcaacggcacacccctgaacatgatcgaccccggcgaatctgagaaatacctcggcctgcagtttgacccgtggattggaatagcaaggtccggtctctccacaaaactagatttttggcttcagcggatcgatcaagcaccacttaaacctctgcagaaaactgatattctcaaaacatacaccatccctcggctgatctacatagctgaccactcagaagtgaaaagcgcactactcgaaacccttgaccagaagatccggacagcggtcaaggaatggcttcacctacctccgtgcacctgcgatgccatcctgtactcgagcacgagagacggcggtttgggcatcaccaaattggcaggactgatccccagcgtgcaggcccgtagactgcatcggatcgcacagtcatctgacgatacgatgaaatgcttcatggaaaaagagaaaatggaacagctgcataagaaattgtggattcaagctggaggggacagagagaacataccctcgatttgggaagcaccaccgtcgagtgaaccaccaaacaacgtgagcacaaattcggaatgggaagcaccgacccagaaagataaatttccaaagccttgcaattggaggaaaaacgaattcaaaaaatggaccaaattggcatcccaaggccgcggaattgtaaattttgaaagagacaaaattagtaaccattggatccaatactacagacgcatacctcacaggaaactcctcactgcactacaactcagggccaacgtttaccccacgagagaatttctagccaggggtagacaagaccaatacatcaaggcgtgtaggcactgcgatgcggacaacgaatcctgcgcccacatcatcggcaactgcccagtgacacaggacgcccgaatcaagaggcacaattacatctgcgaactgcttctcgaggaggcgaagaagaaggactgggtagtgttcaaggaaccgcacataagggattccaacaaggaactgtacaaacctgacctgatatttgtgaaggatgggcgtgcacttgtcgtggatgtgacagtacggtatgaagcagccaaatcatcgctggaggaagccgctgcagagaaagtgagaaagtacaaacacctggaaacggaagtaagacatctcacgaatgcaaaggacgttacttttgtgggctttcccctaggagcgcgggggaaatggcaccaagataactttaaacttttgactgagcttggcctctccaaatcgaggcaagtgaaaatggcagagactttttccacagtagcgctcttttcatctgtggacattgtacatatgtttgccagtagggccagaaaatctatggttatgtgataataggctgccttctgcggggcttgccttctggccatgcccttcttctctcccttgcacctgtacctcttggtctttgaataaagcctgagtaggaaggaccggtaaaaaaaaaaaaaaaaaaaaaaaaaaaaaaacgttgactaaaaaaaaaaaaaaaaaaaaaaaaaaaaaaaaaaaaaaaaaaaaaaaaaaaaaaaaaaaaaaaaaaaaaa

SEQ ID NO: 11439 - DNA, 6530 bp, synthetic construct; identical to SEQ ID NO: 10783
  source 1..6530: mol_type = other DNA

SEQ ID NO: 11440 - skipped

SEQ ID NO: 11441 - DNA, 4703 bp, synthetic construct
  source 1..4703: mol_type = other DNA
ggtctagttacaactgggcatcgctgcagagatcgcacctcctcgtggtcccgctggtagcccttcgaagggtgactaagtcgatctctgccccaggtacggagccgttgggactcaccagtccaacgtaactcctgcctaaattcggtgaaacaaattcctcggtaaaaagccccatggcttcttgcccgaaacctggccccccggtttcagcaggggcaatgagtttggaaagtggactgaccacccactccgttctcgccatcgaacgtggtcccaattcgttggcaaattccggatcagactttgggggggggggtctggggctaccgttacgcctattgagggtatcggtcggcactcagacctcccgctccgactgggtagacctggtgtcctggagccacccaggacccacgtctaagtcccagcaggttgacctggtgtctttatttcctaaacaccgggttgacctgttatccaaaaacgaccaggtagacctggtggctcaatttttaccatctaaatttccccccaatttggcagaaaatgatttggctttgctggtgaacttagagttctacagatcggatttgcatgtgtatgagtgtgttcattttgctgcacattgggagggattaagtggtttgcctgaggtgtatgaacaacttgcaccacaaccgtgtgtgggagaaactttacattctagcctcccacgagacagtgaactgtttgtgcctgaagaggggagcagcgagaaggagagcgaggacgcgccaaaaacatctcctccgacgcctgggaaacatggtttggaacagactggggaggaaaaagtgatggtgactgttcctgacaaaaatccaccttgtccttgctgtggtacccgggtaaactctgtgttgaatctgattgaacatctgaaagtgtcacacgggaaaaggggggtttgttttcggtgtgcaaaatgtggaaaggaaaatagtaactatcacagtgttgtttgtcattttccaaaatgcaggggtccagagacggagaaagccccagctggggagtggatttgtgaggtatgcaacagagattttacaaccaaaattggcctgggacaacacaagagattggcacacccagcagtgagaaatcaggaaaggatcgttgcttcccaaccgaaagaaacatcaaatagaggtgctcacaaaaggtgctggacaaaggaggaggaagaattactaataagactggaggctcagttcgagggaaacaaaaatattaataagcttattgcagaacacataaccaccaaaacagctaagcagatcagtgacaaaaggcgattgctgtccagaaagccagcagaggagccacgtgaggagcctggaacgtgtcatcacaccaggagagcagctgcgagcctgagaacggagcctgagatgagtcatcacgcccaggcagaggacagagataatggacctgggagacgccctctgccaggcagggcagctgccggagggagaacaatggacgagataagacgccaccctgataagggcaacggacagcagagacccaccaagcaaaaatcagaagaacagctgcaggcttactataaaaagacactagaggaacgactttcagctggggcacttaacaccttcccccgagcattcaagcaggtaatggaaggccgggatataaagctagtaatcaatcagacagcgcaggactgcttcggatgcctggaatccataagccaaataagaacggcaacccgagataaaaaggacacggtgacccgggagaaacacccaaagaaaccttttcagaagtggatgaaggacagagcaatcaaaaaaggtaattatcttcggttccagcgtttattttatcttgatagagggaaactggctaaaatcattttagatgatattgaatgcttgtcttgtgacataccactcagtgaaatttattcggtttttaaaacaagatgggaaacaactggtagctttaaaagccttggggactttaaaacttacgggaaggctgacaacactgccttcagagaattaattacggctaaagaaattgagaaaaatgtgcaggaaatgagcaaaggctcggctcccggtccagacgggattactcttggggacgtcgtaaagatggatcccgagttttcccggaccatggagattttcaatttatggttaacaactggtaaaatcccggacatggtgagggggtgcagaaccgttttgattccaaaatcatcaaagccggatcgtttgaaagacattaataactggagacctatcacgatcggttccatcttgctgagactgttctccaggattgtaacagctaggctgagcaaagcgtgccccctgaacccaaggcaaagaggctttatcagagcggcgggatgctctgaaaacttaaaactcctgcaaactataatttggtcggccaaaagagaacacagaccactgggtgttgtattcgtggacatcgccaaggcttttgacaccgtaagccaccagcacatcattcatgctttgcagcaaagagaggtggatccccacatcgtcggtctggtgagcaatatgtacgagaacatcagtacgtatatcaccacaaagaggaacacacacacagacaaaatccagatccgggttggagtaaagcagggtgacccgatgtcgccccttttatttaacctggcaatggaccctctattatgcaagctggaagagagtggcaaaggataccaccgaggacagagcagcatcacagcgatggcatttgcagacgatctggttttgctgagcgactcctgggaaaatatgaatacaaatattagcatactggagaccttctgcaatctgaccggactcaaaacacaggggcaaaagtgccacggcttttacatcaagccgacaaaggactcttacaccatcaatgactgcgctgcctggactatcaacggcacacccctgaacatgatcgaccccggcgaatctgagaaatacctcggcctgcagtttgacccgtggattggaatagcaaggtccggtctctccacaaaactagatttttggcttcagcggatcgatcaagcaccacttaaacctctgcagaaaactgatattctcaaaacatacaccatccctcggctgatctacatagctgaccactcagaagtgaaaactgcactactcgaaacccttgaccagaagatccggacagcggtcaaggaatggcttcacctacctccgtgcacctgcgatgccatcctgtactcgagcacgagagacggcggtttgggcatcaccaaattggcaggactgatccccagcgtgcaggcccgtagactgcatcggatcgcacagtcatctgacgatacgatgaaatgcttcatggaaaaagagaaaatggaacagctgcataagaaattgtggattcaagctggaggggacagagaggacataccctcgatttgggaagcaccaccgtcgagtgaaccaccaaacaacgtgagcacaaattcggaatgggaagcaccgacccagaaagataaatttccaaagccttgcaattggaggaaaaacgaattcaaaaaatggaccaaattggcatcccaaggccgcggaattgtaaattttgaaagagacaaaattagtaaccattggatccaatactacagacgcatacctcacaggaaactcctcactgcactacaactcagggccaacgtttaccccacgagagaatttctagccaggggtagacaagaccaatacatcaaggcgtgtaggcactgcgatgcggacattgaatcctgcgcccacatcatcggcaactgcccagtgacacaggacgcccgaatcaagaggcacaattacatctgcgaactgcttctcgaggaggcgaagaagaaggactgggtagtgttcaaggaaccgcacataagggattccaacaaggaactgtacaaacctgacctgatatttgtgaaggatgcccgtgcacttgtcgtggatgtgacagtacggtatgaagcagccaaatcatcgctggaggaagccgctgcagagaaagtgagaaagtacaaacacctggaaacggaagtaagacatctcacgaatgcaaaggacgttacttttgtgggctttcccctaggagcgcgggggaaatggcaccaagataactttaaacttttgactgagcttggcctctccaaatcgaggcaagtgaaaatggcagagactttttccacagtagcgctcttttcatctgtggacattgtacatatgtttgccagtagggccagaaaatctatggttatgtgataataggctgccttctgcggggcttgccttctggccatgcccttcttctctcccttgcacctgtacctcttggtctttgaataaagcctgagtaggaaggaccggtagacatgataagatacattgatgagtttggacaaaccacaactagaatgcagtgaaaaaaatgctttatttgtgaaatttgtgatgctattgctttatttgtaaccattataagctgcaataaacaagttaacaacaacaaaaaaaaaaaaaaaaaaaaaaaaaaaaaaacgttgactaaaaaaaaaaaaaaaaaaaaaaaaaaaaaaaaaaaaaaaaaaaaaaaaaaaaaaaaaaaaaaaaaaaaaa

SEQ ID NO: 11442 - DNA, 4703 bp, synthetic construct
  source 1..4703: mol_type = other DNA
ggtctagttacaactgggcatcgctgcagagatcgcacctcctcgtggtcccgctggtagcccttcgaagggtgactaagtcgatctctgccccaggtacggagccgttgggactcaccagtccaacgtaactcctgcctaaattcggtgaaacaaattcctcggtaaaaagccccatggcttcttgcccgaaacctggccccccggtttcagcaggggcaatgagtttggaaagtggactgaccacccactccgttctcgccatcgaacgtggtcccaattcgttggcaaattccggatcagactttgggggggggggtctggggctaccgttacgcctattgagggtatcggtcggcactcagacctcccgctccgactgggtagacctggtgtcctggagccacccaggacccacgtctaagtcccagcaggttgacctggtgtctttatttcctaaacaccgggttgacctgttatccaaaaacgaccaggtagacctggtggctcaatttttaccatctaaatttccccccaatttggcagaaaatgatttggctttgctggtgaacttagagttctacagatcggatttgcatgtgtatgagtgtgttcattttgctgcacattgggagggattaagtggtttgcctgaggtgtatgaacaacttgcaccacaaccgtgtgtgggagaaactttacattctagcctcccacgagacagtgaactgtttgtgcctgaagaggggagcagcgagaaggagagcgaggacgcgccaaaaacatctcctccgacgcctgggaaacatggtttggaacagactggggaggaaaaagtgatggtgactgttcctgacaaaaatccaccttgtccttgctgtggtacccgggtaaactctgtgttgaatctgattgaacatctgaaagtgtcacacgggaaaaggggggtttgttttcggtgtgcaaaatgtggaaaggaaaatagtaactatcacagtgttgtttgtcattttccaaaatgcaggggtccagagacggagaaagccccagctggggagtggatttgtgaggtatgcaacagagattttacaaccaaaattggcctgggacaacacaagagattggcacacccagcagtgagaaatcaggaaaggatcgttgcttcccaaccgaaagaaacatcaaatagaggtgctcacaaaaggtgctggacaaaggaggaggaagaattactaataagactggaggctcagttcgagggaaacaaaaatattaataagcttattgcagaacacataaccaccaaaacagctaagcagatcagtgacaaaaggcgattgctgtccagaaagccagcagaggagccacgtgaggagcctggaacgtgtcatcacaccaggagagcagctgcgagcctgagaacggagcctgagatgagtcatcacgcccaggcagaggacagagataatggacctgggagacgccctctgccaggcagggcagctgccggagggagaacaatggacgagataagacgccaccctgataagggcaacggacagcagagacccaccaagcaaaaatcagaagaacagctgcaggcttactataaaaagacactagaggaacgactttcagctggggcacttaacaccttcccccgagcattcaagcaggtaatggaaggccgggatataaagctagtaatcaatcagacagcgcaggactgcttcggatgcctggaatccataagccaaataagaacggcaacccgagataaaaaggacacggtgacccgggagaaacacccaaagaaaccttttcagaagtggatgaagaagagagcaatcaaaaaaggtaattatcttcggttccagcgtttattttatcttgatagagggaaactggctaaaatcattttagatgatattgaatgcttgtcttgtgacataccactcagtgaaatttattcggtttttaaaacaagatgggaaacaactggtagctttaaaagccttggggactttaaaacttacgggaaggctgacaacactgccttcagagaattaattacggctaaagaaattgagaaaaatgtgcaggaaatgagcaaaggctcggctcccggtccagacgggattactcttggggacgtcgtaaagatggatcccgagttttcccggaccatggagattttcaatttatggttaacaactggtaaaatcccggacatggtgagggggtgcagaaccgttttgattccaaaatcatcagacccggatcgtttgaaagacattaataactggagacctatcacgatcggttccatcttgctgagactgttctccaggattgtaacagctaggctgagcaaagcgtgccccctgaacccaaggcaaagaggctttatcagagcggcgggatgctctgaaaacttaaaactcctgcaaactataatttggtcggccaaaagagaacacagaccactgggtgttgtattcgtggacatcgccaaggcttttgacaccgtaagccaccagcacatcattcatgctttgcagcaaagagaggtggatccccacatcgtcggtctggtgagcaatatgtacgagaacatcagtacgtatatcaccacaaagaggaacacacacacagacaaaatccagatccgggttggagtaaagcagggtgacccgatgtcgccccttttatttaacctggcaatggaccctctattatgcaagctggaagagagtggcaaaggataccaccgaggacagagcagcatcacagcgatggcatttgcagacgatctggttttgctgagcgactcctgggaaaatatgaatacaaatattagcatactggagaccttctgcaatctgaccggactcaaaacacaggggcaaaagtgccacggcttttacatcaagccgacaaaggactcttacaccatcaatgactgcgctgcctggactatcaacggcacacccctgaacatgatcgaccccggcgaatctgagaaatacctcggcctgcagtttgacccgtggattggaatagcaaggtccggtctctccacaaaactagatttttggcttcagcggatcgatcaagcaccacttaaacctctgcagaaaactgatattctcaaaacatacaccatccctcggctgatctacatagctgaccactcagaagtgaaaactgcactactcgaaacccttgaccagaagatccggacagcggtcaaggaatggcttcacctacctccgtgcacctgcgatgccatcctgtactcgagcacgagagacggcggtttgggcatcaccaaattggcaggactgatccccagcgtgcaggcccgtagactgcatcggatcgcacagtcatctgacgatacgatgaaatgcttcatggaaaaagagaaaatggaacagctgcataagaaattgtggattcaagctggaggggacagagagaacataccctcgatttgggaagcaccaccgtcgagtgaaccaccaaacaacgtgagcacaaattcggaatgggaagcaccgacccagaaagataaatttccaaagccttgcaattggaggaaaaacgaattcaaaaaatggaccaaattggcatcccaaggccgcggaattgtaaattttgaaagagacaaaattagtaaccattggatccaatactacagacgcatacctcacaggaaactcctcactgcactacaactcagggccaacgtttaccccacgagagaatttctagccaggggtagacaagaccaatacatcaaggcgtgtaggcactgcgatgcggacattgaatcctgcgcccacatcatcggcaactgcccagtgacacaggacgcccgaatcaagaggcacaattacatctgcgaactgcttctcgaggaggcgaagaagaaggactgggtagtgttcaaggaaccgcacataagggattccaacaaggaactgtacaaacctgacctgatatttgtgaaggatgcccgtgcacttgtcgtggatgtgacagtacggtatgaagcagccaaatcatcgctggaggaagccgctgcagagaaagtgagaaagtacaaacacctggaaacggaagtaagacatctcacgaatgcaaaggacgttacttttgtgggctttcccctaggagcgcgggggaaatggcaccaagataactttaaacttttgactgagcttggcctctccaaatcgaggcaagtgaaaatggcagagactttttccacagtagcgctcttttcatctgtggacattgtacatatgtttgccagtagggccagaaaatctatggttatgtgataataggctgccttctgcggggcttgccttctggccatgcccttcttctctcccttgcacctgtacctcttggtctttgaataaagcctgagtaggaaggaccggtagacatgataagatacattgatgagtttggacaaaccacaactagaatgcagtgaaaaaaatgctttatttgtgaaatttgtgatgctattgctttatttgtaaccattataagctgcaataaacaagttaacaacaacaaaaaaaaaaaaaaaaaaaaaaaaaaaaaaacgttgactaaaaaaaaaaaaaaaaaaaaaaaaaaaaaaaaaaaaaaaaaaaaaaaaaaaaaaaaaaaaaaaaaaaaaa

SEQ ID NO: 11443 - DNA, 4703 bp, synthetic construct
  source 1..4703: mol_type = other DNA
ggtctagttacaactgggcatcgctgcagagatcgcacctcctcgtggtcccgctggtagcccttcgaagggtgactaagtcgatctctgccccaggtacggagccgttgggactcaccagtccaacgtaactcctgcctaaattcggtgaaacaaattcctcggtaaaaagccccatggcttcttgcccgaaacctggccccccggtttcagcaggggcaatgagtttggaaagtggactgaccacccactccgttctcgccatcgaacgtggtcccaattcgttggcaaattccggatcagactttgggggggggggtctggggctaccgttacgcctattgagggtatcggtcggcactcagacctcccgctccgactgggtagacctggtgtcctggagccacccaggacccacgtctaagtcccagcaggttgacctggtgtctttatttcctaaacaccgggttgacctgttatccaaaaacgaccaggtagacctggtggctcaatttttaccatctaaatttccccccaatttggcagaaaatgatttggctttgctggtgaacttagagttctacagatcggatttgcatgtgtatgagtgtgttcattttgctgcacattgggagggattaagtggtttgcctgaggtgtatgaacaacttgcaccacaaccgtgtgtgggagaaactttacattctagcctcccacgagacagtgaactgtttgtgcctgaagaggggagcagcgagaaggagagcgaggacgcgccaaaaacatctcctccgacgcctgggaaacatggtttggaacagactggggaggaaaaagtgatggtgactgttcctgacaaaaatccaccttgtccttgctgtggtacccgggtaaactctgtgttgaatctgattgaacatctgaaagtgtcacacgggaaaaggggggtttgttttcggtgtgcaaaatgtggaaaggaaaatagtaactatcacagtgttgtttgtcattttaagaaatgcaggggtccagagacggagaaagccccagctggggagtggatttgtgaggtatgcaacagagattttacaaccaaaattggcctgggacaacacaagagattggcacacccagcagtgagaaatcaggaaaggatcgttgcttcccaaccgaaagaaacatcaaatagaggtgctcacaaaaggtgctggacaaaggaggaggaagaattactaataagactggaggctcagttcgagggaaacaaaaatattaataagcttattgcagaacacataaccaccaaaacagctaagcagatcagtgacaaaaggcgattgctgtccagaaagccagcagaggagccacgtgaggagcctggaacgtgtcatcacaccaggagagcagctgcgagcctgagaacggagcctgagatgagtcatcacgcccaggcagaggacagagataatggacctgggagacgccctctgccaggcagggcagctgccggagggagaacaatggacgagataagacgccaccctgataagggcaacggacagcagagacccaccaagcaaaaatcagaagaacagctgcaggcttactataaaaagacactagaggaacgactttcagctggggcacttaacaccttcccccgagcattcaagcaggtaatggaaggccgggatataaagctagtaatcaatcagacagcgcaggactgcttcggatgcctggaatccataagccaaataagaacggcaacccgagataaaaaggacacggtgacccgggagaaacacccaaagaaaccttttcagaagtggatgaagaagagagcaatcaaaaaaggtaattatcttcggttccagcgtttattttatcttgatagagggaaactggctaaaatcattttagatgatattgaatgcttgtcttgtgacataccactcagtgaaatttattcggtttttaaaacaagatgggaaacaactggtagctttaaaagccttggggactttaaaacttacgggaaggctgacaacactgccttcagagaattaattacggctaaagaaattgagaaaaatgtgcaggaaatgagcaaaggctcggctcccggtccagacgggattactcttggggacgtcgtaaagatggatcccgagttttcccggaccatggagattttcaatttatggttaacaactggtaaaatcccggacatggtgagggggtgcagaaccgttttgattccaaaatcatcaaagccggatcgtttgaaagacattaataactggagacctatcacgatcggttccatcttgctgagactgttctccaggattgtaacagctaggctgagcaaagcgtgccccctgaacccaaggcaaagaggctttatcagagcggcgggatgctctgaaaacttaaaactcctgcaaactataatttggtcggccaaaagagaacacagaccactgggtgttgtattcgtggacatcgccaaggcttttgacaccgtaagccaccagcacatcattcatgctttgcagcaaagagaggtggatccccacatcgtcggtctggtgagcaatatgtacgagaacatcagtacgtatatcaccacaaagaggaacacacacacagacaaaatccagatccgggttggagtaaagcagggtgacccgatgtcgccccttttatttaacctggcaatggaccctctattatgcaagctggaagagagtggcaaaggataccaccgaggacagagcagcatcacagcgatggcatttgcagacgatctggttttgctgagcgactcctgggaaaatatgaatacaaatattagcatactggagaccttctgcaatctgaccggactcaaaacacaggggcaaaagtgccacggcttttacatcaagccgacaaaggactcttacaccatcaatgactgcgctgcctggactatcaacggcacacccctgaacatgatcgaccccggcgaatctgagaaatacctcggcctgcagtttgacccgtggattggaatagcaaggtccggtctctccacaaaactagatttttggcttcagcggatcgatcaagcaccacttaaacctctgcagaaaactgatattctcaaaacatacaccatccctcggctgatctacatagctgaccactcagaagtgaaaactgcactactcgaaacccttgaccagaagatccggacagcggtcaaggaatggcttcacctacctccgtgcacctgcgatgccatcctgtactcgagcacgagagacggcggtttgggcatcaccaaattggcaggactgatccccagcgtgcaggcccgtagactgcatcggatcgcacagtcatctgacgatacgatgaaatgcttcatggaaaaagagaaaatggaacagctgcataagaaattgtggattcaagctggaggggacagagagaacataccctcgatttgggaagcaccaccgtcgagtgaaccaccaaacaacgtgagcacaaattcggaatgggaagcaccgacccagaaagataaatttccaaagccttgcaattggaggaaaaacgaattcaaaaaatggaccaaattggcatcccaaggccgcggaattgtaaattttgaaagagacaaaattagtaaccattggatccaatactacagacgcatacctcacaggaaactcctcactgcactacaactcagggccaacgtttaccccacgagagaatttctagccaggggtagacaagaccaatacatcaaggcgtgtaggcactgcgatgcggacattgaatcctgcgcccacatcatcggcaactgcccagtgacacaggacgcccgaatcaagaggcacaattacatctgcgaactgcttctcgaggaggcgaagaagaaggactgggtagtgttcaaggaaccgcacataagggattccaacaaggaactgtacaaacctgacctgatatttgtgaaggatgcccgtgcacttgtcgtggatgtgacagtacggtatgaagcagccaaatcatcgctggaggaagccgctgcagagaaagtgagaaagtacaaacacctggaaacggaagtaagacatctcacgaatgcaaaggacgttacttttgtgggctttcccctaggagcgcgggggaaatggcaccaagataactttaaacttttgactgagcttggcctctccaaatcgaggcaagtgaaaatggcagagactttttccacagtagcgctcttttcatctgtggacattgtacatatgtttgccagtagggccagaaaatctatggttatgtgataataggctgccttctgcggggcttgccttctggccatgcccttcttctctcccttgcacctgtacctcttggtctttgaataaagcctgagtaggaaggaccggtagacatgataagatacattgatgagtttggacaaaccacaactagaatgcagtgaaaaaaatgctttatttgtgaaatttgtgatgctattgctttatttgtaaccattataagctgcaataaacaagttaacaacaacaaaaaaaaaaaaaaaaaaaaaaaaaaaaaaacgttgactaaaaaaaaaaaaaaaaaaaaaaaaaaaaaaaaaaaaaaaaaaaaaaaaaaaaaaaaaaaaaaaaaaaaaa

SEQ ID NO: 11444 - DNA, 4703 bp, synthetic construct
  source 1..4703: mol_type = other DNA
ggtctagttacaactgggcatcgctgcagagatcgcacctcctcgtggtcccgctggtagcccttcgaagggtgactaagtcgatctctgccccaggtacggagccgttgggactcaccagtccaacgtaactcctgcctaaattcggtgaaacaaattcctcggtaaaaagccccatggcttcttgcccgaaacctggccccccggtttcagcaggggcaatgagtttggaaagtggactgaccacccactccgttctcgccatcgaacgtggtcccaattcgttggcaaattccggatcagactttgggggggggggtctggggctaccgttacgcctattgagggtatcggtcggcactcagacctcccgctccgactgggtagacctggtgtcctggagccacccaggacccacgtctaagtcccagcaggttgacctggtgtctttatttcctaaacaccgggttgacctgttatccaaaaacgaccaggtagacctggtggctcaatttttaccatctaaatttccccccaatttggcagaaaatgatttggctttgctggtgaacttagagttctacagatcggatttgcatgtgtatgagtgtgttcattttgctgcacattgggagggattaagtggtttgcctgaggtgtatgaacaacttgcaccacaaccgtgtgtgggagaaactttacattctagcctcccacgagacagtgaactgtttgtgcctgaagaggggagcagcgagaaggagagcgaggacgcgccaaaaacatctcctccgacgcctgggaaacatggtttggaacagactggggaggaaaaagtgatggtgactgttcctgacaaaaatccaccttgtccttgctgtggtacccgggtaaactctgtgttgaatctgattgaacatctgaaagtgtcacacgggaaaaggggggtttgttttcggtgtgcaaaatgtggaaaggaaaatagtaactatcacagtgttgtttgtcattttccaaaatgcaggggtccagagacggagaaagccccagctggggagtggatttgtgaggtatgcaacagagattttacaaccaaaattggcctgggacaacacaagagattggcacacccagcagtgagaaatcaggaaaggatcgttgcttcccaaccgaaagaaacatcaaatagaggtgctcacaaaaggtgctggacaaaggaggaggaagaattactaataagactggaggctcagttcgagggaaacaaaaatattaataagcttattgcagaacacataaccaccaaaacagctaagcagatcagtgacaaaaggcgattgctgtccagaaagccagcagaggagccacgtgaggagcctggaacgtgtcatcacaccaggagagcagctgcgagcctgagaacggagcctgagatgagtcatcacgcccaggcagaggacagagataatggacctgggagacgccctctgccaggcagggcagctgccggagggagaacaatggacgagataagacgccaccctgataagggcaacggacagcagagacccaccaagcaaaaatcagaagaacagctgcaggcttactataaaaagacactagaggaacgactttcagctggggcacttaacaccttcccccgagcattcaagcaggtaatggaaggccgggatataaagctagtaatcaatcagacagcgcaggactgcttcggatgcctggaatccataagccaaataagaacggcaacccgagataaaaaggacacggtgacccgggagaaacacccaaagaaaccttttcagaagtggatgaagaagagagcaatcaaaaaaggtaattatcttcggttccagcgtttattttatcttgatagagggaaactggctaaaatcattttagatgatattgaatgcttgtcttgtgacataccactcagtgaaatttattcggtttttaaaacaagatgggaaacaactggtagctttaaaagccttggggactttaaaacttacgggaaggctgacaacactgccttcagagaattaattacggctaaagaaattgagaaaaatgtgcaggaaatgagcaaaggctcggctcccggtccagacgggattactcttggggacgtcgtaaagatggatcccgagttttcccggaccatggagattttcaatttatggttaacaactggtaaaatcccggacatggtgagggggtgcagaaccgttttgattccaaaatcatcaaagccggatcgtttgaaagacattaataactggagacctatcacgatcggttccatcttgctgagactgttctccaggattgtaacagctaggctgagcaaagcgtgccccctgaacccaaggcaaagaggctttatcagagcggcgggatgctctgaaaacttaaaactcctgcaaactataatttggtcggccaaaagagaacacagaccactgggtgttgtattcgtggacatcgccaaggcttttgacaccgtaagccaccagcacatcattcatgctttgcagcaaagagaggtggatccccacatcgtcggtctggtgagcaatatgtacgagaacatcagtacgtatatcaccacaaagaggaacacacacacagacaaaatccagatccgggttggagtaaagcagggtgacccgatgtcgccccttttatttaacctggcaatggaccctctattatgcaagctggaagagagtggcaaaggataccaccgaggacagagcagcatcacagcgatggcatttgcagacgatctggttttgctgagcgactcctgggaaaatatgaatacaaatattagcatactggagaccttctgcaatctgaccggactcaaaacacaggggcaaaagtgccacggcttttacatcaagccgacaaaggactcttacaccatcaatgactgcgctgcctggactatcaacggcacacccctgaacatgatcgaccccggcgaatctgagaaatacctcggcctgcagtttgacccgtggattggaatagcaaggtccggtctctccacaaaactagatttttggcttcagcggatcgatcaagcaccacttaaacctctgcagaaactggatattctcaaaacatacaccatccctcggctgatctacatagctgaccactcagaagtgaaaactgcactactcgaaacccttgaccagaagatccggacagcggtcaaggaatggcttcacctacctccgtgcacctgcgatgccatcctgtactcgagcacgagagacggcggtttgggcatcaccaaattggcaggactgatccccagcgtgcaggcccgtagactgcatcggatcgcacagtcatctgacgatacgatgaaatgcttcatggaaaaagagaaaatggaacagctgcataagaaattgtggattcaagctggaggggacagagagaacataccctcgatttgggaagcaccaccgtcgagtgaaccaccaaacaacgtgagcacaaattcggaatgggaagcaccgacccagaaagataaatttccaaagccttgcaattggaggaaaaacgaattcaaaaaatggaccaaattggcatcccaaggccgcggaattgtaaattttgaaagagacaaaattagtaaccattggatccaatactacagacgcatacctcacaggaaactcctcactgcactacaactcagggccaacgtttaccccacgagagaatttctagccaggggtagacaagaccaatacatcaaggcgtgtaggcactgcgatgcggacattgaatcctgcgcccacatcatcggcaactgcccagtgacacaggacgcccgaatcaagaggcacaattacatctgcgaactgcttctcgaggaggcgaagaagaaggactgggtagtgttcaaggaaccgcacataagggattccaacaaggaactgtacaaacctgacctgatatttgtgaaggatgcccgtgcacttgtcgtggatgtgacagtacggtatgaagcagccaaatcatcgctggaggaagccgctgcagagaaagtgagaaagtacaaacacctggaaacggaagtaagacatctcacgaatgcaaaggacgttacttttgtgggctttcccctaggagcgcgggggaaatggcaccaagataactttaaacttttgactgagcttggcctctccaaatcgaggcaagtgaaaatggcagagactttttccacagtagcgctcttttcatctgtggacattgtacatatgtttgccagtagggccagaaaatctatggttatgtgataataggctgccttctgcggggcttgccttctggccatgcccttcttctctcccttgcacctgtacctcttggtctttgaataaagcctgagtaggaaggaccggtagacatgataagatacattgatgagtttggacaaaccacaactagaatgcagtgaaaaaaatgctttatttgtgaaatttgtgatgctattgctttatttgtaaccattataagctgcaataaacaagttaacaacaacaaaaaaaaaaaaaaaaaaaaaaaaaaaaaaacgttgactaaaaaaaaaaaaaaaaaaaaaaaaaaaaaaaaaaaaaaaaaaaaaaaaaaaaaaaaaaaaaaaaaaaaaa

SEQ ID NO: 11445 - DNA, 4703 bp, synthetic construct
  source 1..4703: mol_type = other DNA
ggtctagttacaactgggcatcgctgcagagatcgcacctcctcgtggtcccgctggtagcccttcgaagggtgactaagtcgatctctgccccaggtacggagccgttgggactcaccagtccaacgtaactcctgcctaaattcggtgaaacaaattcctcggtaaaaagccccatggcttcttgcccgaaacctggccccccggtttcagcaggggcaatgagtttggaaagtggactgaccacccactccgttctcgccatcgaacgtggtcccaattcgttggcaaattccggatcagactttgggggggggggtctggggctaccgttacgcctattgagggtatcggtcggcactcagacctcccgctccgactgggtagacctggtgtcctggagccacccaggacccacgtctaagtcccagcaggttgacctggtgtctttatttcctaaacaccgggttgacctgttatccaaaaacgaccaggtagacctggtggctcaatttttaccatctaaatttccccccaatttggcagaaaatgatttggctttgctggtgaacttagagttctacagatcggatttgcatgtgtatgagtgtgttcattttgctgcacattgggagggattaagtggtttgcctgaggtgtatgaacaacttgcaccacaaccgtgtgtgggagaaactttacattctagcctcccacgagacagtgaactgtttgtgcctgaagaggggagcagcgagaaggagagcgaggacgcgccaaaaacatctcctccgacgcctgggaaacatggtttggaacagactggggaggaaaaagtgatggtgactgttcctgacaaaaatccaccttgtccttgctgtggtacccgggtaaactctgtgttgaatctgattgaacatctgaaagtgtcacacgggaaaaggggggtttgttttcggtgtgcaaaatgtggaaaggaaaatagtaactatcacagtgttgtttgtcattttccaaaatgcaggggtccagagacggagaaagccccagctggggagtggatttgtgaggtatgcaacagagattttacaaccaaaattggcctgggacaacacaagagattggcacacccagcagtgagaaatcaggaaaggatcgttgcttcccaaccgaaagaaacatcaaatagaggtgctcacaaaaggtgctggacaaaggaggaggaagaattactaataagactggaggctcagttcgagggaaacaaaaatattaataagcttattgcagaacacataaccaccaaaacagctaagcagatcagtgacaaaaggcgattgctgtccagaaagccagcagaggagccacgtgaggagcctggaacgtgtcatcacaccaggagagcagctgcgagcctgagaacggagcctgagatgagtcatcacgcccaggcagaggacagagataatggacctgggagacgccctctgccaggcagggcagctgccggagggagaacaatggacgagataagacgccaccctgataagggcaacggacagcagagacccaccaagcaaaaatcagaagaacagctgcaggcttactataaaaagacactagaggaacgactttcagctggggcacttaacaccttcccccgagcattcaagcaggtaatggaaggccgggatataaagctagtaatcaatcagacagcgcaggactgcttcggatgcctggaatccataagccaaataagaacggcaacccgagataaaaaggacacggtgacccgggagaaacacccaaagaaaccttttcagaagtggatgaagaagagagcaatcaaaaaaggtaattatcttcggttccagcgtttattttatcttgatagagggaaactggctaaaatcattttagatgatattgaatgcttgtcttgtgacataccactcagtgaaatttattcggtttttaaaacaagatgggaaacaactggtagctttaaaagccttggggactttaaaacttacgggaaggctgacaacactgccttcagagaattaattacggctaaagaaattgagaaaaatgtgcaggaaatgagcaaaggctcggctcccggtccagacgggattactcttggggacgtcgtaaagatggatcccgagggctcccggaccatggagattttcaatttatggttaacaactggtaaaatcccggacatggtgagggggtgcagaaccgttttgattccaaaatcatcaaagccggatcgtttgaaagacattaataactggagacctatcacgatcggttccatcttgctgagactgttctccaggattgtaacagctaggctgagcaaagcgtgccccctgaacccaaggcaaagaggctttatcagagcggcgggatgctctgaaaacttaaaactcctgcaaactataatttggtcggccaaaagagaacacagaccactgggtgttgtattcgtggacatcgccaaggcttttgacaccgtaagccaccagcacatcattcatgctttgcagcaaagagaggtggatccccacatcgtcggtctggtgagcaatatgtacgagaacatcagtacgtatatcaccacaaagaggaacacacacacagacaaaatccagatccgggttggagtaaagcagggtgacccgatgtcgccccttttatttaacctggcaatggaccctctattatgcaagctggaagagagtggcaaaggataccaccgaggacagagcagcatcacagcgatggcatttgcagacgatctggttttgctgagcgactcctgggaaaatatgaatacaaatattagcatactggagaccttctgcaatctgaccggactcaaaacacaggggcaaaagtgccacggcttttacatcaagccgacaaaggactcttacaccatcaatgactgcgctgcctggactatcaacggcacacccctgaacatgatcgaccccggcgaatctgagaaatacctcggcctgcagtttgacccgtggattggaatagcaaggtccggtctctccacaaaactagatttttggcttcagcggatcgatcaagcaccacttaaacctctgcagaaaactgatattctcaaaacatacaccatccctcggctgatctacatagctgaccactcagaagtgaaaactgcactactcgaaacccttgaccagaagatccggacagcggtcaaggaatggcttcacctacctccgtgcacctgcgatgccatcctgtactcgagcacgagagacggcggtttgggcatcaccaaattggcaggactgatccccagcgtgcaggcccgtagactgcatcggatcgcacagtcatctgacgatacgatgaaatgcttcatggaaaaagagaaaatggaacagctgcataagaaattgtggattcaagctggaggggacagagagaacataccctcgatttgggaagcaccaccgtcgagtgaaccaccaaacaacgtgagcacaaattcggaatgggaagcaccgacccagaaagataaatttccaaagccttgcaattggaggaaaaacgaattcaaaaaatggaccaaattggcatcccaaggccgcggaattgtaaattttgaaagagacaaaattagtaaccattggatccaatactacagacgcatacctcacaggaaactcctcactgcactacaactcagggccaacgtttaccccacgagagaatttctagccaggggtagacaagaccaatacatcaaggcgtgtaggcactgcgatgcggacattgaatcctgcgcccacatcatcggcaactgcccagtgacacaggacgcccgaatcaagaggcacaattacatctgcgaactgcttctcgaggaggcgaagaagaaggactgggtagtgttcaaggaaccgcacataagggattccaacaaggaactgtacaaacctgacctgatatttgtgaaggatgcccgtgcacttgtcgtggatgtgacagtacggtatgaagcagccaaatcatcgctggaggaagccgctgcagagaaagtgagaaagtacaaacacctggaaacggaagtaagacatctcacgaatgcaaaggacgttacttttgtgggctttcccctaggagcgcgggggaaatggcaccaagataactttaaacttttgactgagcttggcctctccaaatcgaggcaagtgaaaatggcagagactttttccacagtagcgctcttttcatctgtggacattgtacatatgtttgccagtagggccagaaaatctatggttatgtgataataggctgccttctgcggggcttgccttctggccatgcccttcttctctcccttgcacctgtacctcttggtctttgaataaagcctgagtaggaaggaccggtagacatgataagatacattgatgagtttggacaaaccacaactagaatgcagtgaaaaaaatgctttatttgtgaaatttgtgatgctattgctttatttgtaaccattataagctgcaataaacaagttaacaacaacaaaaaaaaaaaaaaaaaaaaaaaaaaaaaaacgttgactaaaaaaaaaaaaaaaaaaaaaaaaaaaaaaaaaaaaaaaaaaaaaaaaaaaaaaaaaaaaaaaaaaaaaa

SEQ ID NO: 11446 - DNA, 4703 bp, synthetic construct
  source 1..4703: mol_type = other DNA
ggtctagttacaactgggcatcgctgcagagatcgcacctcctcgtggtcccgctggtagcccttcgaagggtgactaagtcgatctctgccccaggtacggagccgttgggactcaccagtccaacgtaactcctgcctaaattcggtgaaacaaattcctcggtaaaaagccccatggcttcttgcccgaaacctggccccccggtttcagcaggggcaatgagtttggaaagtggactgaccacccactccgttctcgccatcgaacgtggtcccaattcgttggcaaattccggatcagactttgggggggggggtctggggctaccgttacgcctattgagggtatcggtcggcactcagacctcccgctccgactgggtagacctggtgtcctggagccacccaggacccacgtctaagtcccagcaggttgacctggtgtctttatttcctaaacaccgggttgacctgttatccaaaaacgaccaggtagacctggtggctcaatttttaccatctaaatttccccccaatttggcagaaaatgatttggctttgctggtgaacttagagttctacagatcggatttgcatgtgtatgagtgtgttcattttgctgcacattgggagggattaagtggtttgcctgaggtgtatgaacaacttgcaccacaaccgtgtgtgggagaaactttacattctagcctcccacgagacagtgaactgtttgtgcctgaagaggggagcagcgagaaggagagcgaggacgcgccaaaaacatctcctccgacgcctgggaaacatggtttggaacagactggggaggaaaaagtgatggtgactgttcctgacaaaaatccaccttgtccttgctgtggtacccgggtaaactctgtgttgaatctgattgaacatctgaaagtgtcacacgggaaaaggggggtttgttttcggtgtgcaaaatgtggaaaggaaaatagtaactatcacagtgttgtttgtcattttccaaaatgcaggggtccagagacggagaaagccccagctggggagtggatttgtgaggtatgcaacagagattttacaaccaaaattggcctgggacaacacaagagattggcacacccagcagtgagaaatcaggaaaggatcgttgcttcccaaccgaaagaaacatcaaatagaggtgctcacaaaaggtgctggacaaaggaggaggaagaattactaataagactggaggctcagttcgagggaaacaaaaatattaataagcttattgcagaacacataaccaccaaaacagctaagcagatcagtgacaaaaggcgattgctgtccagaaagccagcagaggagccacgtgaggagcctggaacgtgtcatcacaccaggagagcagctgcgagcctgagaacggagcctgagatgagtcatcacgcccaggcagaggacagagataatggacctgggagacgccctctgccaggcagggcagctgccggagggagaacaatggacgagataagacgccaccctgataagggcaacggacagcagagacccaccaagcaaaaatcagaagaacagctgcaggcttactataaaaagacactagaggaacgactttcagctggggcacttaacaccttcccccgagcattcaagcaggtaatggaaggccgggatataaagctagtaatcaatcagacagcgcaggactgcttcggatgcctggaatccataagccaaataagaacggcaacccgagataaaaaggacacggtgacccggaagaaacacccaaagaaaccttttcagaagtggatgaagaagagagcaatcaaaaaaggtaattatcttcggttccagcgtttattttatcttgatagagggaaactggctaaaatcattttagatgatattgaatgcttgtcttgtgacataccactcagtgaaatttattcggtttttaaaacaagatgggaaacaactggtagctttaaaagccttggggactttaaaacttacgggaaggctgacaacactgccttcagagaattaattacggctaaagaaattgagaaaaatgtgcaggaaatgagcaaaggctcggctcccggtccagacgggattactcttggggacgtcgtaaagatggatcccgagttttcccggaccatggagattttcaatttatggttaacaactggtaaaatcccggacatggtgagggggtgcagaaccgttttgattccaaaatcatcaaagccggatcgtttgaaagacattaataactggagacctatcacgatcggttccatcttgctgagactgttctccaggattgtaacagctaggctgagcaaagcgtgccccctgaacccaaggcaaagaggctttatcagagcggcgggatgctctgaaaacttaaaactcctgcaaactataatttggtcggccaaaagagaacacagaccactgggtgttgtattcgtggacatcgccaaggcttttgacaccgtaagccaccagcacatcattcatgctttgcagcaaagagaggtggatccccacatcgtcggtctggtgagcaatatgtacgagaacatcagtacgtatatcaccacaaagaggaacacacacacagacaaaatccagatccgggttggagtaaagcagggtgacccgatgtcgccccttttatttaacctggcaatggaccctctattatgcaagctggaagagagtggcaaaggataccaccgaggacagagcagcatcacagcgatggcatttgcagacgatctggttttgctgagcgactcctgggaaaatatgaatacaaatattagcatactggagaccttctgcaatctgaccggactcaaaacacaggggcaaaagtgccacggcttttacatcaagccgacaaaggactcttacaccatcaatgactgcgctgcctggactatcaacggcacacccctgaacatgatcgaccccggcgaatctgagaaatacctcggcctgcagtttgacccgtggattggaatagcaaggtccggtctctccacaaaactagatttttggcttcagcggatcgatcaagcaccacttaaacctctgcagaaaactgatattctcaaaacatacaccatccctcggctgatctacatagctgaccactcagaagtgaaaactgcactactcgaaacccttgaccagaagatccggacagcggtcaaggaatggcttcacctacctccgtgcacctgcgatgccatcctgtactcgagcacgagagacggcggtttgggcatcaccaaattggcaggactgatccccagcgtgcaggcccgtagactgcatcggatcgcacagtcatctgacgatacgatgaaatgcttcatggaaaaagagaaaatggaacagctgcataagaaattgtggattcaagctggaggggacagagagaacataccctcgatttgggaagcaccaccgtcgagtgaaccaccaaacaacgtgagcacaaattcggaatgggaagcaccgacccagaaagataaatttccaaagccttgcaattggaggaaaaacgaattcaaaaaatggaccaaattggcatcccaaggccgcggaattgtaaattttgaaagagacaaaattagtaaccattggatccaatactacagacgcatacctcacaggaaactcctcactgcactacaactcagggccaacgtttaccccacgagagaatttctagccaggggtagacaagaccaatacatcaaggcgtgtaggcactgcgatgcggacattgaatcctgcgcccacatcatcggcaactgcccagtgacacaggacgcccgaatcaagaggcacaattacatctgcgaactgcttctcgaggaggcgaagaagaaggactgggtagtgttcaaggaaccgcacataagggattccaacaaggaactgtacaaacctgacctgatatttgtgaaggatgcccgtgcacttgtcgtggatgtgacagtacggtatgaagcagccaaatcatcgctggaggaagccgctgcagagaaagtgagaaagtacaaacacctggaaacggaagtaagacatctcacgaatgcaaaggacgttacttttgtgggctttcccctaggagcgcgggggaaatggcaccaagataactttaaacttttgactgagcttggcctctccaaatcgaggcaagtgaaaatggcagagactttttccacagtagcgctcttttcatctgtggacattgtacatatgtttgccagtagggccagaaaatctatggttatgtgataataggctgccttctgcggggcttgccttctggccatgcccttcttctctcccttgcacctgtacctcttggtctttgaataaagcctgagtaggaaggaccggtagacatgataagatacattgatgagtttggacaaaccacaactagaatgcagtgaaaaaaatgctttatttgtgaaatttgtgatgctattgctttatttgtaaccattataagctgcaataaacaagttaacaacaacaaaaaaaaaaaaaaaaaaaaaaaaaaaaaaacgttgactaaaaaaaaaaaaaaaaaaaaaaaaaaaaaaaaaaaaaaaaaaaaaaaaaaaaaaaaaaaaaaaaaaaaaa

SEQ ID NO: 11447 - DNA, 4703 bp, synthetic construct
  source 1..4703: mol_type = other DNA
ggtctagttacaactgggcatcgctgcagagatcgcacctcctcgtggtcccgctggtagcccttcgaagggtgactaagtcgatctctgccccaggtacggagccgttgggactcaccagtccaacgtaactcctgcctaaattcggtgaaacaaattcctcggtaaaaagccccatggcttcttgcccgaaacctggccccccggtttcagcaggggcaatgagtttggaaagtggactgaccacccactccgttctcgccatcgaacgtggtcccaattcgttggcaaattccggatcagactttgggggggggggtctggggctaccgttacgcctattgagggtatcggtcggcactcagacctcccgctccgactgggtagacctggtgtcctggagccacccaggacccacgtctaagtcccagcaggttgacctggtgtctttatttcctaaacaccgggttgacctgttatccaaaaacgaccaggtagacctggtggctcaatttttaccatctaaatttccccccaatttggcagaaaatgatttggctttgctggtgaacttagagttctacagatcggatttgcatgtgtatgagtgtgttcattttgctgcacattgggagggattaagtggtttgcctgaggtgtatgaacaacttgcaccacaaccgtgtgtgggagaaactttacattctagcctcccacgagacagtgaactgtttgtgcctgaagaggggagcagcgagaaggagagcgaggacgcgccaaaaacatctcctccgacgcctgggaaacatggtttggaacagactggggaggaaaaagtgatggtgactgttcctgacaaaaatccaccttgtccttgctgtggtacccgggtaaactctgtgttgaatctgattgaacatctgaaagtgtcacacgggaaaaggggggtttgttttcggtgtgcaaaatgtggaaaggaaaatagtaactatcacagtgttgtttgtcattttccaaaatgcaggggtccagagacggagaaagccccagctggggagtggatttgtgaggtatgcaacagagattttacaaccaaaattggcctgggacaacacaagagattggcacacccagcagtgagaaatcaggaaaggatcgttgcttcccaaccgaaagaaacatcaaatagaggtgctcacaaaaggtgctggacaaaggaggaggaagaattactaataagactggaggctcagttcgagggaaacaaaaatattaataagcttattgcagaacacataaccaccaaaacagctaagcagatcagtgacaaaaggcgattgctgtccagaaagccagcagaggagccacgtgaggagcctggaacgtgtcatcacaccaggagagcagctgcgagcctgagaacggagcctgagatgagtcatcacgcccaggcagaggacagagataatggacctgggagacgccctctgccaggcagggcagctgccggagggagaacaatggacgagataagacgccaccctgataagggcaacggacagcagagacccaccaagcaaaaatcagaagaacagctgcaggcttactataaaaagacactagaggaacgactttcagctggggcacttaacaccttcccccgagcattcaagcaggtaatggaaggccgggatataaagctagtaatcaatcagacagcgcaggactgcttcggatgcctggaatccataagccaaataagaacggcaacccgagataaaaaggacacggtgacccgggagaaacacccaaagaaaccttttcagaagtggatgaagaagagagcaatcaaaaaaggtaattatcttcggttccagcgtttattttatcttgatagagggaaactggctaaaatcattttagatgatattgaatgcttgtcttgtgacataccactcagtgaaatttattcggtttttaaaacaagatgggaaacaactggtagctttaaaagccttggggactttaaaacttacgggaaggctgacaacactgccttcagagaattaattacggctaaagaaattgagaaaaatgtgcaggaaatgagcaaaggctcggctcccggtccagacgggattactcttggggacgtcgtaaagatggatcccgagttttcccggaccatggagattttcaatttatggttaacaactggtaaaatcccggacatggtgagggggtgcagaaccgttttgattccaaaatcatcaaagccggatcgtttgaaagacattaataactggagacctatcacgatcggttccatcttgctgagactgttctccaggattgtaacagctaggctgagcaaagcgtgccccctgaacccaaggcaaagaggctttatcagagcggcgggatgctctgaaaacttaaaactcctgcaaactataatttggtcggccaaaagagaacacagaccactgggtgttgtattcgtggacatcgccaaggcttttgacaccgtaagccaccagcacatcattcatgctttgcagcaaagagaggtggatccccacatcgtcggtctggtgagcaatatgtacgagaacatcagtacgtatatcaccacaaagaggaacacacacacagacaaaatccagatccgggttggagtaaagcagggtgacccgatgtcgccccttttatttaacctggcaatggaccctctattatgcaagctggaagagagtggcaaaggataccaccgaggacagagcagcatcacagcgatggcatttgcagacgatctggttttgctgagcgactcctgggaaaatatgaatacaaatattagcatactggagaccttctgcaatctgaccggactcaaaacacaggggcaaaagtgccacggcttttacatcaagccgacaaagaagtcttacaccatcaatgactgcgctgcctggactatcaacggcacacccctgaacatgatcgaccccggcgaatctgagaaatacctcggcctgcagtttgacccgtggattggaatagcaaggtccggtctctccacaaaactagatttttggcttcagcggatcgatcaagcaccacttaaacctctgcagaaaactgatattctcaaaacatacaccatccctcggctgatctacatagctgaccactcagaagtgaaaactgcactactcgaaacccttgaccagaagatccggacagcggtcaaggaatggcttcacctacctccgtgcacctgcgatgccatcctgtactcgagcacgagagacggcggtttgggcatcaccaaattggcaggactgatccccagcgtgcaggcccgtagactgcatcggatcgcacagtcatctgacgatacgatgaaatgcttcatggaaaaagagaaaatggaacagctgcataagaaattgtggattcaagctggaggggacagagagaacataccctcgatttgggaagcaccaccgtcgagtgaaccaccaaacaacgtgagcacaaattcggaatgggaagcaccgacccagaaagataaatttccaaagccttgcaattggaggaaaaacgaattcaaaaaatggaccaaattggcatcccaaggccgcggaattgtaaattttgaaagagacaaaattagtaaccattggatccaatactacagacgcatacctcacaggaaactcctcactgcactacaactcagggccaacgtttaccccacgagagaatttctagccaggggtagacaagaccaatacatcaaggcgtgtaggcactgcgatgcggacattgaatcctgcgcccacatcatcggcaactgcccagtgacacaggacgcccgaatcaagaggcacaattacatctgcgaactgcttctcgaggaggcgaagaagaaggactgggtagtgttcaaggaaccgcacataagggattccaacaaggaactgtacaaacctgacctgatatttgtgaaggatgcccgtgcacttgtcgtggatgtgacagtacggtatgaagcagccaaatcatcgctggaggaagccgctgcagagaaagtgagaaagtacaaacacctggaaacggaagtaagacatctcacgaatgcaaaggacgttacttttgtgggctttcccctaggagcgcgggggaaatggcaccaagataactttaaacttttgactgagcttggcctctccaaatcgaggcaagtgaaaatggcagagactttttccacagtagcgctcttttcatctgtggacattgtacatatgtttgccagtagggccagaaaatctatggttatgtgataataggctgccttctgcggggcttgccttctggccatgcccttcttctctcccttgcacctgtacctcttggtctttgaataaagcctgagtaggaaggaccggtagacatgataagatacattgatgagtttggacaaaccacaactagaatgcagtgaaaaaaatgctttatttgtgaaatttgtgatgctattgctttatttgtaaccattataagctgcaataaacaagttaacaacaacaaaaaaaaaaaaaaaaaaaaaaaaaaaaaaacgttgactaaaaaaaaaaaaaaaaaaaaaaaaaaaaaaaaaaaaaaaaaaaaaaaaaaaaaaaaaaaaaaaaaaaaaa

SEQ ID NO: 11448 - DNA, 4703 bp, synthetic construct
  source 1..4703: mol_type = other DNA
ggtctagttacaactgggcatcgctgcagagatcgcacctcctcgtggtcccgctggtagcccttcgaagggtgactaagtcgatctctgccccaggtacggagccgttgggactcaccagtccaacgtaactcctgcctaaattcggtgaaacaaattcctcggtaaaaagccccatggcttcttgcccgaaacctggccccccggtttcagcaggggcaatgagtttggaaagtggactgaccacccactccgttctcgccatcgaacgtggtcccaattcgttggcaaattccggatcagactttgggggggggggtctggggctaccgttacgcctattgagggtatcggtcggcactcagacctcccgctccgactgggtagacctggtgtcctggagccacccaggacccacgtctaagtcccagcaggttgacctggtgtctttatttcctaaacaccgggttgacctgttatccaaaaacgaccaggtagacctggtggctcaatttttaccatctaaatttccccccaatttggcagaaaatgatttggctttgctggtgaacttagagttctacagatcggatttgcatgtgtatgagtgtgttcattttgctgcacattgggagggattaagtggtttgcctgaggtgtatgaacaacttgcaccacaaccgtgtgtgggagaaactttacattctagcctcccacgagacagtgaactgtttgtgcctgaagaggggagcagcgagaaggagagcgaggacgcgccaaaaacatctcctccgacgcctgggaaacatggtttggaacagactggggaggaaaaagtgatggtgactgttcctgacaaaaatccaccttgtccttgctgtggtacccgggtaaactctgtgttgaatctgattgaacatctgaaagtgtcacacgggaaaaggggggtttgttttcggtgtgcaaaatgtggaaaggaaaatagtaactatcacagtgttgtttgtcattttccaaaatgcaggggtccagagacggagaaagccccagctggggagtggatttgtgaggtatgcaacagagattttacaaccaaaattggcctgggacaacacaagagattggcacacccagcagtgagaaatcaggaaaggatcgttgcttcccaaccgaaagaaacatcaaatagaggtgctcacaaaaggtgctggacaaaggaggaggaagaattactaataagactggaggctcagttcgagggaaacaaaaatattaataagcttattgcagaacacataaccaccaaaacagctaagcagatcagtgacaaaaggcgattgctgtccagaaagccagcagaggagccacgtgaggagcctggaacgtgtcatcacaccaggagagcagctgcgagcctgagaacggagcctgagatgagtcatcacgcccaggcagaggacagagataatggacctgggagacgccctctgccaggcagggcagctgccggagggagaacaatggacgagataagacgccaccctgataagggcaacggacagcagagacccaccaagcaaaaatcagaagaacagctgcaggcttactataaaaagacactagaggaacgactttcagctggggcacttaacaccttcccccgagcattcaagcaggtaatggaaggccgggatataaagctagtaatcaatcagacagcgcaggactacttcggatgcctggaatccataagccaaataagaacggcaacccgagataaaaaggacacggtgacccgggagaaacacccaaagaaaccttttcagaagtggatgaaggacagagcaatcaaaaaaggtaattatcttcggttccagcgtttattttatcttgatagagggaaactggctaaaatcattttagatgatattgaatgcttgtcttgtgacataccactcagtgaaatttattcggtttttaaaacaagatgggaaacaactggtagctttaaaagccttggggactttaaaacttacgggaaggctgacaacactgccttcagagaattaattacggctaaagaaattgagaaaaatgtgcaggaaatgagcaaaggctcggctcccggtccagacgggattactcttggggacgtcgtaaagatggatcccgagttttcccggaccatggagattttcaatttatggttaacaactggtaaaatcccggacatggtgagggggtgcagaaccgttttgattccaaaatcatcagacccggatcgtttgaaagacattaataactggagacctatcacgatcggttccatcttgctgagactgttctccaggattgtaacagctaggctgagcaaagcgtgccccctgaacccaaggcaaagaggctttatcagagcggcgggatgctctgaaaacttaaaactcctgcaaactataatttggtcggccaaaagagaacacagaccactgggtgttgtattcgtggacatcgccaaggcttttgacaccgtaagccaccagcacatcattcatgctttgcagcaaagagaggtggatccccacatcgtcggtctggtgagcaatatgtacgagaacatcagtacgtatatcaccacaaagaggaacacacacacagacaaaatccagatccgggttggagtaaagcagggtgacccgatgtcgccccttttatttaacctggcaatggaccctctattatgcaagctggaagagagtggcaaaggataccaccgaggacagagcagcatcacagcgatggcatttgcagacgatctggttttgctgagcgactcctgggaaaatatgaatacaaatattagcatactggagaccttctgcaatctgaccggactcaaaacacaggggcaaaagtgccacggcttttacatcaagccgacaaaggactcttacaccatcaatgactgcgctgcctggactatcaacggcacacccctgaacatgatcgaccccggcgaatctgagaaatacctcggcctgcagtttgacccgtggattggaatagcaaggtccggtctctccacaaaactagatttttggcttcagcggatcgatcaagcaccacttaaacctctgcagaaaactgatattctcaaaacatacaccatccctcggctgatctacatagctgaccactcagaagtgaaaactgcactactcgaaacccttgaccagaagatccggacagcggtcaaggaatggcttcacctacctccgtgcacctgcgatgccatcctgtactcgagcacgagagacggcggtttgggcatcaccaaattggcaggactgatccccagcgtgcaggcccgtagactgcatcggatcgcacagtcatctgacgatacgatgaaatgcttcatggaaaaagagaaaatggaacagctgcataagaaattgtggattcaagctggaggggacagagagaacataccctcgatttgggaagcaccaccgtcgagtgaaccaccaaacaacgtgagcacaaattcggaatgggaagcaccgacccagaaagataaatttccaaagccttgcaattggaggaaaaacgaattcaaaaaatggaccaaattggcatcccaaggccgcggaattgtaaattttgaaagagacaaaattagtaaccattggatccaatactacagacgcatacctcacaggaaactcctcactgcactacaactcagggccaacgtttaccccacgagagaatttctagccaggggtagacaagaccaatacatcaaggcgtgtaggcactgcgatgcggacattgaatcctgcgcccacatcatcggcaactgcccagtgacacaggacgcccgaatcaagaggcacaattacatctgcgaactgcttctcgaggaggcgaagaagaaggactgggtagtgttcaaggaaccgcacataagggattccaacaaggaactgtacaaacctgacctgatatttgtgaaggatgcccgtgcacttgtcgtggatgtgacagtacggtatgaagcagccaaatcatcgctggaggaagccgctgcagagaaagtgagaaagtacaaacacctggaaacggaagtaagacatctcacgaatgcaaaggacgttacttttgtgggctttcccctaggagcgcgggggaaatggcaccaagataactttaaacttttgactgagcttggcctctccaaatcgaggcaagtgaaaatggcagagactttttccacagtagcgctcttttcatctgtggacattgtacatatgtttgccagtagggccagaaaatctatggttatgtgataataggctgccttctgcggggcttgccttctggccatgcccttcttctctcccttgcacctgtacctcttggtctttgaataaagcctgagtaggaaggaccggtagacatgataagatacattgatgagtttggacaaaccacaactagaatgcagtgaaaaaaatgctttatttgtgaaatttgtgatgctattgctttatttgtaaccattataagctgcaataaacaagttaacaacaacaaaaaaaaaaaaaaaaaaaaaaaaaaaaaaacgttgactaaaaaaaaaaaaaaaaaaaaaaaaaaaaaaaaaaaaaaaaaaaaaaaaaaaaaaaaaaaaaaaaaaaaaa

SEQ ID NO: 11449 - DNA, 4703 bp, synthetic construct
  source 1..4703: mol_type = other DNA
ggtctagttacaactgggcatcgctgcagagatcgcacctcctcgtggtcccgctggtagcccttcgaagggtgactaagtcgatctctgccccaggtacggagccgttgggactcaccagtccaacgtaactcctgcctaaattcggtgaaacaaattcctcggtaaaaagccccatggcttcttgcccgaaacctggccccccggtttcagcaggggcaatgagtttggaaagtggactgaccacccactccgttctcgccatcgaacgtggtcccaattcgttggcaaattccggatcagactttgggggggggggtctggggctaccgttacgcctattgagggtatcggtcggcactcagacctcccgctccgactgggtagacctggtgtcctggagccacccaggacccacgtctaagtcccagcaggttgacctggtgtctttatttcctaaacaccgggttgacctgttatccaaaaacgaccaggtagacctggtggctcaatttttaccatctaaatttccccccaatttggcagaaaatgatttggctttgctggtgaacttagagttctacagatcggatttgcatgtgtatgagtgtgttcattttgctgcacattgggagggattaagtggtttgcctgaggtgtatgaacaacttgcaccacaaccgtgtgtgggagaaactttacattctagcctcccacgagacagtgaactgtttgtgcctgaagaggggagcagcgagaaggagagcgaggacgcgccaaaaacatctcctccgacgcctgggaaacatggtttggaacagactggggaggaaaaagtgatggtgactgttcctgacaaaaatccaccttgtccttgctgtggtacccgggtaaactctgtgttgaatctgattgaacatctgaaagtgtcacacgggaaaaggggggtttgttttcggtgtgcaaaatgtggaaaggaaaatagtaactatcacagtgttgtttgtcattttccaaaatgcaggggtccagagacggagaaagccccagctggggagtggatttgtgaggtatgcaacagagattttacaaccaaaattggcctgggacaacacaagagattggcacacccagcagtgagaaatcaggaaaggatcgttgcttcccaaccgaaagaaacatcaaatagaggtgctcacaaaaggtgctggacaaaggaggaggaagaattactaataagactggaggctcagttcgagggaaacaaaaatattaataagcttattgcagaacacataaccaccaaaacagctaagcagatcagtgacaaaaggcgattgctgtccagaaagccagcagaggagccacgtgaggagcctggaacgtgtcatcacaccaggagagcagctgcgagcctgagaacggagcctgagatgagtcatcacgcccaggcagaggacagagataatggacctgggagacgccctctgccaggcagggcagctgccggagggagaacaatggacgagataagacgccaccctgataagggcaacggacagcagagacccaccaagcaaaaatcagaagaacagctgcaggcttactataaaaagacactagaggaacgactttcagctggggcacttaacaccttcccccgagcattcaagcaggtaatggaaggccgggatataaagctagtaatcaatcagacagcgcaggactgcttcggatgcctggaatccataagccaaataagaacggcaacccgagataaaaaggacacggtgacccgggagaaacacccaaagaaaccttttcagaagtggatgaaggacagagcaatcaaaaaaggtaattatcttcggttccagcgtttattttatcttgatagagggaaactggctaaaatcattttagatgatattgaatgcttgtcttgtgacataccactcagtgaaatttattcggtttttaaaacaagatgggaaacaactggtagctttaaaagccttggggactttaaaacttacgggaaggctgacaacactgccttcagagaattaattacggctaaagaaattgagaaaaatgtgcaggaaatgagcaaaggctcggctcccggtccagacgggattactcttggggacgtcgtaaagatggatcccgagttttcccggaccatggagattttcaatttatggttaacaactggtaaaatcccggacatggtgagggggtgcagaaccgttttgattccaaaatcatcagacccggatcgtttgaaagacattaataactggagacctatcacgatcggttccatcttgctgagactgttctccaggattgtaacagctaggctgagcaaagcgtgccccctgaacccaaggcaaagaggctttatcagagcggcgggatgctctgaaaacttaaaactcctgcaaactataatttggtcggccaaaagagaacacagaccactgggtgttgtattcgtggacatcgccaaggcttttgacaccgtaagccaccagcacatcattcatgctttgcagcaaagagaggtggatccccacatcgtcggtctggtgagcaatatgtacgagaacatcagtacgtatatcaccacaaagaggaacacacacacagacaaaatccagatccgggttggagtaaagcagggtgacccgatgtcgccccttttatttaacctggcaatggaccctctattatgcaagctggaagagagtggcaaaggataccaccgaggacagagcagcatcacagcgatggcatttgcagacgatctggttttgctgagcgactcctgggaaggcatgaatacaaatattagcatactggagaccttctgcaatctgaccggactcaaaacacaggggcaaaagtgccacggcttttacatcaagccgacaaaggactcttacaccatcaatgactgcgctgcctggactatcaacggcacacccctgaacatgatcgaccccggcgaatctgagaaatacctcggcctgcagtttgacccgtggattggaatagcaaggtccggtctctccacaaaactagatttttggcttcagcggatcgatcaagcaccacttaaacctctgcagaaaactgatattctcaaaacatacaccatccctcggctgatctacatagctgaccactcagaagtgaaaactgcactactcgaaacccttgaccagaagatccggacagcggtcaaggaatggcttcacctacctccgtgcacctgcgatgccatcctgtactcgagcacgagagacggcggtttgggcatcaccaaattggcaggactgatccccagcgtgcaggcccgtagactgcatcggatcgcacagtcatctgacgatacgatgaaatgcttcatggaaaaagagaaaatggaacagctgcataagaaattgtggattcaagctggaggggacagagagaacataccctcgatttgggaagcaccaccgtcgagtgaaccaccaaacaacgtgagcacaaattcggaatgggaagcaccgacccagaaagataaatttccaaagccttgcaattggaggaaaaacgaattcaaaaaatggaccaaattggcatcccaaggccgcggaattgtaaattttgaaagagacaaaattagtaaccattggatccaatactacagacgcatacctcacaggaaactcctcactgcactacaactcagggccaacgtttaccccacgagagaatttctagccaggggtagacaagaccaatacatcaaggcgtgtaggcactgcgatgcggacattgaatcctgcgcccacatcatcggcaactgcccagtgacacaggacgcccgaatcaagaggcacaattacatctgcgaactgcttctcgaggaggcgaagaagaaggactgggtagtgttcaaggaaccgcacataagggattccaacaaggaactgtacaaacctgacctgatatttgtgaaggatgcccgtgcacttgtcgtggatgtgacagtacggtatgaagcagccaaatcatcgctggaggaagccgctgcagagaaagtgagaaagtacaaacacctggaaacggaagtaagacatctcacgaatgcaaaggacgttacttttgtgggctttcccctaggagcgcgggggaaatggcaccaagataactttaaacttttgactgagcttggcctctccaaatcgaggcaagtgaaaatggcagagactttttccacagtagcgctcttttcatctgtggacattgtacatatgtttgccagtagggccagaaaatctatggttatgtgataataggctgccttctgcggggcttgccttctggccatgcccttcttctctcccttgcacctgtacctcttggtctttgaataaagcctgagtaggaaggaccggtagacatgataagatacattgatgagtttggacaaaccacaactagaatgcagtgaaaaaaatgctttatttgtgaaatttgtgatgctattgctttatttgtaaccattataagctgcaataaacaagttaacaacaacaaaaaaaaaaaaaaaaaaaaaaaaaaaaaaacgttgactaaaaaaaaaaaaaaaaaaaaaaaaaaaaaaaaaaaaaaaaaaaaaaaaaaaaaaaaaaaaaaaaaaaaaa

SEQ ID NO: 11450 - DNA, 4703 bp, synthetic construct
  source 1..4703: mol_type = other DNA
ggtctagttacaactgggcatcgctgcagagatcgcacctcctcgtggtcccgctggtagcccttcgaagggtgactaagtcgatctctgccccaggtacggagccgttgggactcaccagtccaacgtaactcctgcctaaattcggtgaaacaaattcctcggtaaaaagccccatggcttcttgcccgaaacctggccccccggtttcagcaggggcaatgagtttggaaagtggactgaccacccactccgttctcgccatcgaacgtggtcccaattcgttggcaaattccggatcagactttgggggggggggtctggggctaccgttacgcctattgagggtatcggtcggcactcagacctcccgctccgactgggtagacctggtgtcctggagccacccaggacccacgtctaagtcccagcaggttgacctggtgtctttatttcctaaacaccgggttgacctgttatccaaaaacgaccaggtagacctggtggctcaatttttaccatctaaatttccccccaatttggcagaaaatgatttggctttgctggtgaacttagagttctacagatcggatttgcatgtgtatgagtgtgttcattttgctgcacattgggagggattaagtggtttgcctgaggtgtatgaacaacttgcaccacaaccgtgtgtgggagaaactttacattctagcctcccacgagacagtgaactgtttgtgcctgaagaggggagcagcgagaaggagagcgaggacgcgccaaaaacatctcctccgacgcctgggaaacatggtttggaacagactggggaggaaaaagtgatggtgactgttcctgacaaaaatccaccttgtccttgctgtggtacccgggtaaactctgtgttgaatctgattgaacatctgaaagtgtcacacgggaaaaggggggtttgttttcggtgtgcaaaatgtggaaaggaaaatagtaactatcacagtgttgtttgtcattttccaaaatgcaggggtccagagacggagaaagccccagctggggagtggatttgtgaggtatgcaacagagattttacaaccaaaattggcctgggacaacacaagagattggcacacccagcagtgagaaatcaggaaaggatcgttgcttcccaaccgaaagaaacatcaaatagaggtgctcacaaaaggtgctggacaaaggaggaggaagaattactaataagactggaggctcagttcgagggaaacaaaaatattaataagcttattgcagaacacataaccaccaaaacagctaagcagatcagtgacaaaaggcgattgctgtccagaaagccagcagaggagccacgtgaggagcctggaacgtgtcatcacaccaggagagcagctgcgagcctgagaacggagcctgagatgagtcatcacgcccaggcagaggacagagataatggacctgggagacgccctctgccaggcagggcagctgccggagggagaacaatggacgagataagacgccaccctgataagggcaacggacagcagagacccaccaagcaaaaatcagaagaacagctgcaggcttactataaaaagacactagaggaacgactttcagctggggcacttaacaccttcccccgagcattcaagcaggtaatggaaggccgggatataaagctagtaatcaatcagacagcgcaggactgcttcggatgcctggaatccataagccaaataagaacggcaacccgagataaaaaggacacggtgacccgggagaaacacccaaagaaaccttttcagaagtggatgaaggacagagcaatcaaaaaaggtaattatcttcggttccagcgtttattttatcttgatagagggaaactggctaaaatcattttagatgatattgaatgcttgtcttgtgacataccactcagtgaaatttattcggtttttaaaacaagatgggaaacaactggtagctttaaaagccttggggactttaaaacttacgggaaggctgacaacactgccttcagagaattaattacggctaaagaaattgagaaaaatgtgcaggaaatgagcaaaggctcggctcccggtccagacgggattactcttggggacgtcgtaaagatggatcccgagttttcccggaccatggagattttcaatttatggttaacaactggtaaaatcccggacatggtgagggggtgcagaaccgttttgattccaaaatcatcagacccggatcgtttgaaagacattaataactggagacctatcacgatcggttccatcttgctgagactgttctccaggattgtaacagctaggctgagcaaagcgtgccccctgaacccaaggcaaagaggctttatcagagcggcgggatgctctgaaaacttaaaactcctgcaaactataatttggtcggccaaaagagaacacagaccactgggtgttgtattcgtggacatcgccaaggcttttgacaccgtaagccaccagcacatcattcatgctttgcagcaaagagaggtggatccccacatcgtcggtctggtgagcaatatgtacgagaacatcagtacgtatatcaccacaaagaggaacacacacacagacaaaatccagatccgggttggagtaaagcagggtgacccgatgtcgccccttttatttaacctggcaatggaccctctattatgcaagctggaagagagtggcaaaggataccaccgaggacagagcagcatcacagcgatggcatttgcagacgatctggttttgctgagcgactcctgggaaaatatgaatacaaatattagcatactggagaccttctgcaatctgaccggactcaaaacacaggggcaaaagtgccacggcttttacatcaagccgacaaaggactcttacaccatcaatgactgcgctgcctggactatcaacggcacacccctgaacatgatcgaccccggcgaatctgagaaatacctcggcctgcagtttgacccgtggattggaatagcaaggtccggtctctccacaaaactagatttttggcttcagcggatcgatcaagcaccacttaaacctctgcagaaactggatattctcaaaacatacaccatccctcggctgatctacatagctgaccactcagaagtgaaaactgcactactcgaaacccttgaccagaagatccggacagcggtcaaggaatggcttcacctacctccgtgcacctgcgatgccatcctgtactcgagcacgagagacggcggtttgggcatcaccaaattggcaggactgatccccagcgtgcaggcccgtagactgcatcggatcgcacagtcatctgacgatacgatgaaatgcttcatggaaaaagagaaaatggaacagctgcataagaaattgtggattcaagctggaggggacagagagaacataccctcgatttgggaagcaccaccgtcgagtgaaccaccaaacaacgtgagcacaaattcggaatgggaagcaccgacccagaaagataaatttccaaagccttgcaattggaggaaaaacgaattcaaaaaatggaccaaattggcatcccaaggccgcggaattgtaaattttgaaagagacaaaattagtaaccattggatccaatactacagacgcatacctcacaggaaactcctcactgcactacaactcagggccaacgtttaccccacgagagaatttctagccaggggtagacaagaccaatacatcaaggcgtgtaggcactgcgatgcggacattgaatcctgcgcccacatcatcggcaactgcccagtgacacaggacgcccgaatcaagaggcacaattacatctgcgaactgcttctcgaggaggcgaagaagaaggactgggtagtgttcaaggaaccgcacataagggattccaacaaggaactgtacaaacctgacctgatatttgtgaaggatgcccgtgcacttgtcgtggatgtgacagtacggtatgaagcagccaaatcatcgctggaggaagccgctgcagagaaagtgagaaagtacaaacacctggaaacggaagtaagacatctcacgaatgcaaaggacgttacttttgtgggctttcccctaggagcgcgggggaaatggcaccaagataactttaaacttttgactgagcttggcctctccaaatcgaggcaagtgaaaatggcagagactttttccacagtagcgctcttttcatctgtggacattgtacatatgtttgccagtagggccagaaaatctatggttatgtgataataggctgccttctgcggggcttgccttctggccatgcccttcttctctcccttgcacctgtacctcttggtctttgaataaagcctgagtaggaaggaccggtagacatgataagatacattgatgagtttggacaaaccacaactagaatgcagtgaaaaaaatgctttatttgtgaaatttgtgatgctattgctttatttgtaaccattataagctgcaataaacaagttaacaacaacaaaaaaaaaaaaaaaaaaaaaaaaaaaaaaacgttgactaaaaaaaaaaaaaaaaaaaaaaaaaaaaaaaaaaaaaaaaaaaaaaaaaaaaaaaaaaaaaaaaaaaaaa

SEQ ID NO: 11451 - DNA, 4703 bp, synthetic construct
  source 1..4703: mol_type = other DNA
ggtctagttacaactgggcatcgctgcagagatcgcacctcctcgtggtcccgctggtagcccttcgaagggtgactaagtcgatctctgccccaggtacggagccgttgggactcaccagtccaacgtaactcctgcctaaattcggtgaaacaaattcctcggtaaaaagccccatggcttcttgcccgaaacctggccccccggtttcagcaggggcaatgagtttggaaagtggactgaccacccactccgttctcgccatcgaacgtggtcccaattcgttggcaaattccggatcagactttgggggggggggtctggggctaccgttacgcctattgagggtatcggtcggcactcagacctcccgctccgactgggtagacctggtgtcctggagccacccaggacccacgtctaagtcccagcaggttgacctggtgtctttatttcctaaacaccgggttgacctgttatccaaaaacgaccaggtagacctggtggctcaatttttaccatctaaatttccccccaatttggcagaaaatgatttggctttgctggtgaacttagagttctacagatcggatttgcatgtgtatgagtgtgttcattttgctgcacattgggagggattaagtggtttgcctgaggtgtatgaacaacttgcaccacaaccgtgtgtgggagaaactttacattctagcctcccacgagacagtgaactgtttgtgcctgaagaggggagcagcgagaaggagagcgaggacgcgccaaaaacatctcctccgacgcctgggaaacatggtttggaacagactggggaggaaaaagtgatggtgactgttcctgacaaaaatccaccttgtccttgctgtggtacccgggtaaactctgtgttgaatctgattgaacatctgaaagtgtcacacgggaaaaggggggtttgttttcggtgtgcaaaatgtggaaaggaaaatagtaactatcacagtgttgtttgtcattttaagaaatgcaggggtccagagacggagaaagccccagctggggagtggatttgtgaggtatgcaacagagattttacaaccaaaattggcctgggacaacacaagagattggcacacccagcagtgagaaatcaggaaaggatcgttgcttcccaaccgaaagaaacatcaaatagaggtgctcacaaaaggtgctggacaaaggaggaggaagaattactaataagactggaggctcagttcgagggaaacaaaaatattaataagcttattgcagaacacataaccaccaaaacagctaagcagatcagtgacaaaaggcgattgctgtccagaaagccagcagaggagccacgtgaggagcctggaacgtgtcatcacaccaggagagcagctgcgagcctgagaacggagcctgagatgagtcatcacgcccaggcagaggacagagataatggacctgggagacgccctctgccaggcagggcagctgccggagggagaacaatggacgagataagacgccaccctgataagggcaacggacagcagagacccaccaagcaaaaatcagaagaacagctgcaggcttactataaaaagacactagaggaacgactttcagctggggcacttaacaccttcccccgagcattcaagcaggtaatggaaggccgggatataaagctagtaatcaatcagacagcgcaggactgcttcggatgcctggaatccataagccaaataagaacggcaacccgagataaaaaggacacggtgacccggaagaaacacccaaagaaaccttttcagaagtggatgaaggacagagcaatcaaaaaaggtaattatcttcggttccagcgtttattttatcttgatagagggaaactggctaaaatcattttagatgatattgaatgcttgtcttgtgacataccactcagtgaaatttattcggtttttaaaacaagatgggaaacaactggtagctttaaaagccttggggactttaaaacttacgggaaggctgacaacactgccttcagagaattaattacggctaaagaaattgagaaaaatgtgcaggaaatgagcaaaggctcggctcccggtccagacgggattactcttggggacgtcgtaaagatggatcccgagttttcccggaccatggagattttcaatttatggttaacaactggtaaaatcccggacatggtgagggggtgcagaaccgttttgattccaaaatcatcaaagccggatcgtttgaaagacattaataactggagacctatcacgatcggttccatcttgctgagactgttctccaggattgtaacagctaggctgagcaaagcgtgccccctgaacccaaggcaaagaggctttatcagagcggcgggatgctctgaaaacttaaaactcctgcaaactataatttggtcggccaaaagagaacacagaccactgggtgttgtattcgtggacatcgccaaggcttttgacaccgtaagccaccagcacatcattcatgctttgcagcaaagagaggtggatccccacatcgtcggtctggtgagcaatatgtacgagaacatcagtacgtatatcaccacaaagaggaacacacacacagacaaaatccagatccgggttggagtaaagcagggtgacccgatgtcgccccttttatttaacctggcaatggaccctctattatgcaagctggaagagagtggcaaaggataccaccgaggacagagcagcatcacagcgatggcatttgcagacgatctggttttgctgagcgactcctgggaaaatatgaatacaaatattagcatactggagaccttctgcaatctgaccggactcaaaacacaggggcaaaagtgccacggcttttacatcaagccgacaaaggactcttacaccatcaatgactgcgctgcctggactatcaacggcacacccctgaacatgatcgaccccggcgaatctgagaaatacctcggcctgcagtttgacccgtggattggaatagcaaggtccggtctctccacaaaactagatttttggcttcagcggatcgatcaagcaccacttaaacctctgcagaaaactgatattctcaaaacatacaccatccctcggctgatctacatagctgaccactcagaagtgaaaactgcactactcgaaacccttgaccagaagatccggacagcggtcaaggaatggcttcacctacctccgtgcacctgcgatgccatcctgtactcgagcacgagagacggcggtttgggcatcaccaaattggcaggactgatccccagcgtgcaggcccgtagactgcatcggatcgcacagtcatctgacgatacgatgaaatgcttcatggaaaaagagaaaatggaacagctgcataagaaattgtggattcaagctggaggggacagagagaacataccctcgatttgggaagcaccaccgtcgagtgaaccaccaaacaacgtgagcacaaattcggaatgggaagcaccgacccagaaagataaatttccaaagccttgcaattggaggaaaaacgaattcaaaaaatggaccaaattggcatcccaaggccgcggaattgtaaattttgaaagagacaaaattagtaaccattggatccaatactacagacgcatacctcacaggaaactcctcactgcactacaactcagggccaacgtttaccccacgagagaatttctagccaggggtagacaagaccaatacatcaaggcgtgtaggcactgcgatgcggacattgaatcctgcgcccacatcatcggcaactgcccagtgacacaggacgcccgaatcaagaggcacaattacatctgcgaactgcttctcgaggaggcgaagaagaaggactgggtagtgttcaaggaaccgcacataagggattccaacaaggaactgtacaaacctgacctgatatttgtgaaggatgcccgtgcacttgtcgtggatgtgacagtacggtatgaagcagccaaatcatcgctggaggaagccgctgcagagaaagtgagaaagtacaaacacctggaaacggaagtaagacatctcacgaatgcaaaggacgttacttttgtgggctttcccctaggagcgcgggggaaatggcaccaagataactttaaacttttgactgagcttggcctctccaaatcgaggcaagtgaaaatggcagagactttttccacagtagcgctcttttcatctgtggacattgtacatatgtttgccagtagggccagaaaatctatggttatgtgataataggctgccttctgcggggcttgccttctggccatgcccttcttctctcccttgcacctgtacctcttggtctttgaataaagcctgagtaggaaggaccggtagacatgataagatacattgatgagtttggacaaaccacaactagaatgcagtgaaaaaaatgctttatttgtgaaatttgtgatgctattgctttatttgtaaccattataagctgcaataaacaagttaacaacaacaaaaaaaaaaaaaaaaaaaaaaaaaaaaaaacgttgactaaaaaaaaaaaaaaaaaaaaaaaaaaaaaaaaaaaaaaaaaaaaaaaaaaaaaaaaaaaaaaaaaaaaaa

SEQ ID NO: 11452 - DNA, 4703 bp, synthetic construct
  source 1..4703: mol_type = other DNA
ggtctagttacaactgggcatcgctgcagagatcgcacctcctcgtggtcccgctggtagcccttcgaagggtgactaagtcgatctctgccccaggtacggagccgttgggactcaccagtccaacgtaactcctgcctaaattcggtgaaacaaattcctcggtaaaaagccccatggcttcttgcccgaaacctggccccccggtttcagcaggggcaatgagtttggaaagtggactgaccacccactccgttctcgccatcgaacgtggtcccaattcgttggcaaattccggatcagactttgggggggggggtctggggctaccgttacgcctattgagggtatcggtcggcactcagacctcccgctccgactgggtagacctggtgtcctggagccacccaggacccacgtctaagtcccagcaggttgacctggtgtctttatttcctaaacaccgggttgacctgttatccaaaaacgaccaggtagacctggtggctcaatttttaccatctaaatttccccccaatttggcagaaaatgatttggctttgctggtgaacttagagttctacagatcggatttgcatgtgtatgagtgtgttcattttgctgcacattgggagggattaagtggtttgcctgaggtgtatgaacaacttgcaccacaaccgtgtgtgggagaaactttacattctagcctcccacgagacagtgaactgtttgtgcctgaagaggggagcagcgagaaggagagcgaggacgcgccaaaaacatctcctccgacgcctgggaaacatggtttggaacagactggggaggaaaaagtgatggtgactgttcctgacaaaaatccaccttgtccttgctgtggtacccgggtaaactctgtgttgaatctgattgaacatctgaaagtgtcacacgggaaaaggggggtttgttttcggtgtgcaaaatgtggaaaggaaaatagtaactatcacagtgttgtttgtcattttccaaaatgcaggggtccagagacggagaaagccccagctggggagtggatttgtgaggtatgcaacagagattttacaaccaaaattggcctgggacaacacaagagattggcacacccagcagtgagaaatcaggaaaggatcgttgcttcccaaccgaaagaaacatcaaatagaggtgctcacaaaaggtgctggacaaaggaggaggaagaattactaataagactggaggctcagttcgagggaaacaaaaatattaataagcttattgcagaacacataaccaccaaaacagctaagcagatcagtgacaaaaggcgattgctgtccagaaagccagcagaggagccacgtgaggagcctggaacgtgtcatcacaccaggagagcagctgcgagcctgagaacggagcctgagatgagtcatcacgcccaggcagaggacagagataatggacctgggagacgccctctgccaggcagggcagctgccggagggagaacaatggacgagataagacgccaccctgataagggcaacggacagcagagacccaccaagcaaaaatcagaagaacagctgcaggcttactataaaaagacactagaggaacgactttcagctggggcacttaacaccttcccccgagcattcaagcaggtaatggaaggccgggatataaagctagtaatcaatcagacagcgcaggactacttcggatgcctggaatccataagccaaataagaacggcaacccgagataaaaaggacacggtgacccgggagaaacacccaaagaaaccttttcagaagtggatgaaggacagagcaatcaaaaaaggtaattatcttcggttccagcgtttattttatcttgatagagggaaactggctaaaatcattttagatgatattgaatgcttgtcttgtgacataccactcagtgaaatttattcggtttttaaaacaagatgggaaacaactggtagctttaaaagccttggggactttaaaacttacgggaaggctgacaacactgccttcagagaattaattacggctaaagaaattgagaaaaatgtgcaggaaatgagcaaaggctcggctcccggtccagacgggattactcttggggacgtcgtaaagatggatcccgagttttcccggaccatggagattttcaatttatggttaacaactggtaaaatcccggacatggtgagggggtgcagaaccgttttgattccaaaatcatcaaagccggatcgtttgaaagacattaataactggagacctatcacgatcggttccatcttgctgagactgttctccaggattgtaacagctaggctgagcaaagcgtgccccctgaacccaaggcaaagaggctttatcagagcggcgggatgctctgaaaacttaaaactcctgcaaactataatttggtcggccaaaagagaacacagaccactgggtgttgtattcgtggacatcgccaaggcttttgacaccgtaagccaccagcacatcattcatgctttgcagcaaagagaggtggatccccacatcgtcggtctggtgagcaatatgtacgagaacatcagtacgtatatcaccacaaagaggaacacacacacagacaaaatccagatccgggttggagtaaagcagggtgacccgatgtcgccccttttatttaacctggcaatggaccctctattatgcaagctggaagagagtggcaaaggataccaccgaggacagagcagcatcacagcgatggcatttgcagacgatctggttttgctgagcgactcctgggaaaatatgaatacaaatattagcatactggagaccttctgcaatctgaccggactcaaaacacaggggcaaaagtgccacggcttttacatcaagccgacaaaggactcttacaccatcaatgactgcgctgcctggactatcaacggcacacccctgaacatgatcgaccccggcgaatctgagaaatacctcggcctgcagtttgacccgtggattggaatagcaaggtccggtctctccacaaaactagatttttggcttcagcggatcgatcaagcaccacttaaacctctgcagaaaactgatattctcaaaacatacaccatccctcggctgatctacatagctgaccactcagaagtgaaaactgcactactcgaaacccttgaccagaagatccggacagcggtcaaggaatggcttcacctacctccgtgcacctgcgatgccatcctgtactcgagcacgagagacggcggtttgggcatcaccaaattggcaggactgatccccagcgtgcaggcccgtagactgcatcggatcgcacagtcatctgacgatacgatgaaatgcttcatggaaaaagagaaaatggaacagctgcataagaaattgtggattcaagctggaggggacagagagaacataccctcgatttgggaagcaccaccgtcgagtgaaccaccaaacaacgtgagcacaaattcggaatgggaagcaccgacccagaaagataaatttccaaagccttgcaattggaggaaaaacgaattcaaaaaatggaccaaattggcatcccaaggccgcggaattgtaaattttgaaagagacaaaattagtaaccattggatccaatactacagacgcatacctcacaggaaactcctcactgcactacaactcagggccaacgtttaccccacgagagaatttctagccaggggtagacaagaccaatacatcaaggcgtgtaggcactgcgatgcggacattgaatcctgcgcccacatcatcggcaactgcccagtgacacaggacgcccgaatcaagaggcacaataagatctgcgaactgcttctcgaggaggcgaagaagaaggactgggtagtgttcaaggaaccgcacataagggattccaacaaggaactgtacaaacctgacctgatatttgtgaaggatgcccgtgcacttgtcgtggatgtgacagtacggtatgaagcagccaaatcatcgctggaggaagccgctgcagagaaagtgagaaagtacaaacacctggaaacggaagtaagacatctcacgaatgcaaaggacgttacttttgtgggctttcccctaggagcgcgggggaaatggcaccaagataactttaaacttttgactgagcttggcctctccaaatcgaggcaagtgaaaatggcagagactttttccacagtagcgctcttttcatctgtggacattgtacatatgtttgccagtagggccagaaaatctatggttatgtgataataggctgccttctgcggggcttgccttctggccatgcccttcttctctcccttgcacctgtacctcttggtctttgaataaagcctgagtaggaaggaccggtagacatgataagatacattgatgagtttggacaaaccacaactagaatgcagtgaaaaaaatgctttatttgtgaaatttgtgatgctattgctttatttgtaaccattataagctgcaataaacaagttaacaacaacaaaaaaaaaaaaaaaaaaaaaaaaaaaaaaacgttgactaaaaaaaaaaaaaaaaaaaaaaaaaaaaaaaaaaaaaaaaaaaaaaaaaaaaaaaaaaaaaaaaaaaaaa

SEQ ID NO: 11453 - DNA, 4703 bp, synthetic construct
  source 1..4703: mol_type = other DNA
ggtctagttacaactgggcatcgctgcagagatcgcacctcctcgtggtcccgctggtagcccttcgaagggtgactaagtcgatctctgccccaggtacggagccgttgggactcaccagtccaacgtaactcctgcctaaattcggtgaaacaaattcctcggtaaaaagccccatggcttcttgcccgaaacctggccccccggtttcagcaggggcaatgagtttggaaagtggactgaccacccactccgttctcgccatcgaacgtggtcccaattcgttggcaaattccggatcagactttgggggggggggtctggggctaccgttacgcctattgagggtatcggtcggcactcagacctcccgctccgactgggtagacctggtgtcctggagccacccaggacccacgtctaagtcccagcaggttgacctggtgtctttatttcctaaacaccgggttgacctgttatccaaaaacgaccaggtagacctggtggctcaatttttaccatctaaatttccccccaatttggcagaaaatgatttggctttgctggtgaacttagagttctacagatcggatttgcatgtgtatgagtgtgttcattttgctgcacattgggagggattaagtggtttgcctgaggtgtatgaacaacttgcaccacaaccgtgtgtgggagaaactttacattctagcctcccacgagacagtgaactgtttgtgcctgaagaggggagcagcgagaaggagagcgaggacgcgccaaaaacatctcctccgacgcctgggaaacatggtttggaacagactggggaggaaaaagtgatggtgactgttcctgacaaaaatccaccttgtccttgctgtggtacccgggtaaactctgtgttgaatctgattgaacatctgaaagtgtcacacgggaaaaggggggtttgttttcggtgtgcaaaatgtggaaaggaaaatagtaactatcacagtgttgtttgtcattttccaaaatgcaggggtccagagacggagaaagccccagctggggagtggatttgtgaggtatgcaacagagattttacaaccaaaattggcctgggacaacacaagagattggcacacccagcagtgagaaatcaggaaaggatcgttgcttcccaaccgaaagaaacatcaaatagaggtgctcacaaaaggtgctggacaaaggaggaggaagaattactaataagactggaggctcagttcgagggaaacaaaaatattaataagcttattgcagaacacataaccaccaaaacagctaagcagatcagtgacaaaaggcgattgctgtccagaaagccagcagaggagccacgtgaggagcctggaacgtgtcatcacaccaggagagcagctgcgagcctgagaacggagcctgagatgagtcatcacgcccaggcagaggacagagataatggacctgggagacgccctctgccaggcagggcagctgccggagggagaacaatggacgagataagacgccaccctgataagggcaacggacagcagagacccaccaagcaaaaatcagaagaacagctgcaggcttactataaaaagacactagaggaacgactttcagctggggcacttaacaccttcccccgagcattcaagcaggtaatggaaggccgggatataaagctagtaatcaatcagacagcgcaggactacttcggatgcctggaatccataagccaaataagaacggcaacccgagataaaaaggacacggtgacccggaagaaacacccaaagaaaccttttcagaagtggatgaaggacagagcaatcaaaaaaggtaattatcttcggttccagcgtttattttatcttgatagagggaaactggctaaaatcattttagatgatattgaatgcttgtcttgtgacataccactcagtgaaatttattcggtttttaaaacaagatgggaaacaactggtagctttaaaagccttggggactttaaaacttacgggaaggctgacaacactgccttcagagaattaattacggctaaagaaattgagaaaaatgtgcaggaaatgagcaaaggctcggctcccggtccagacgggattactcttggggacgtcgtaaagatggatcccgagttttcccggaccatggagattttcaatttatggttaacaactggtaaaatcccggacatggtgagggggtgcagaaccgttttgattccaaaatcatcaaagccggatcgtttgaaagacattaataactggagacctatcacgatcggttccatcttgctgagactgttctccaggattgtaacagctaggctgagcaaagcgtgccccctgaacccaaggcaaagaggctttatcagagcggcgggatgctctgaaaacttaaaactcctgcaaactataatttggtcggccaaaagagaacacagaccactgggtgttgtattcgtggacatcgccaaggcttttgacaccgtaagccaccagcacatcattcatgctttgcagcaaagagaggtggatccccacatcgtcggtctggtgagcaatatgtacgagaacatcagtacgtatatcaccacaaagaggaacacacacacagacaaaatccagatccgggttggagtaaagcagggtgacccgatgtcgccccttttatttaacctggcaatggaccctctattatgcaagctggaagagagtggcaaaggataccaccgaggacagagcagcatcacagcgatggcatttgcagacgatctggttttgctgagcgactcctgggaaaatatgaatacaaatattagcatactggagaccttctgcaatctgaccggactcaaaacacaggggcaaaagtgccacggcttttacatcaagccgacaaaggactcttacaccatcaatgactgcgctgcctggactatcaacggcacacccctgaacatgatcgaccccggcgaatctgagaaatacctcggcctgcagtttgacccgtggattggaatagcaaggtccggtctctccacaaaactagatttttggcttcagcggatcgatcaagcaccacttaaacctctgcagaaaactgatattctcaaaacatacaccatccctcggctgatctacatagctgaccactcagaagtgaaaactgcactactcgaaacccttgaccagaagatccggacagcggtcaaggaatggcttcacctacctccgtgcacctgcgatgccatcctgtactcgagcacgagagacggcggtttgggcatcaccaaattggcaggactgatccccagcgtgcaggcccgtagactgcatcggatcgcacagtcatctgacgatacgatgaaatgcttcatggaaaaagagaaaatggaacagctgcataagaaattgtggattcaagctggaggggacagagagaacataccctcgatttgggaagcaccaccgtcgagtgaaccaccaaacaacgtgagcacaaattcggaatgggaagcaccgacccagaaagataaatttccaaagccttgcaattggaggaaaaacgaattcaaaaaatggaccaaattggcatcccaaggccgcggaattgtaaattttgaaagagacaaaattagtaaccattggatccaatactacagacgcatacctcacaggaaactcctcactgcactacaactcagggccaacgtttaccccacgagagaatttctagccaggggtagacaagaccaatacatcaaggcgtgtaggcactgcgatgcggacattgaatcctgcgcccacatcatcggcaactgcccagtgacacaggacgcccgaatcaagaggcacaattacatctgcgaactgcttctcgaggaggcgaagaagaaggactgggtagtgttcaaggaaccgcacataagggattccaacaaggaactgtacaaacctgacctgatatttgtgaaggatgcccgtgcacttgtcgtggatgtgacagtacggtatgaagcagccaaatcatcgctggaggaagccgctgcagagaaagtgagaaagtacaaacacctggaaacggaagtaagacatctcacgaatgcaaaggacgttacttttgtgggctttcccctaggagcgcgggggaaatggcaccaagataactttaaacttttgactgagcttggcctctccaaatcgaggcaagtgaaaatggcagagactttttccacagtagcgctcttttcatctgtggacattgtacatatgtttgccagtagggccagaaaatctatggttatgtgataataggctgccttctgcggggcttgccttctggccatgcccttcttctctcccttgcacctgtacctcttggtctttgaataaagcctgagtaggaaggaccggtagacatgataagatacattgatgagtttggacaaaccacaactagaatgcagtgaaaaaaatgctttatttgtgaaatttgtgatgctattgctttatttgtaaccattataagctgcaataaacaagttaacaacaacaaaaaaaaaaaaaaaaaaaaaaaaaaaaaaacgttgactaaaaaaaaaaaaaaaaaaaaaaaaaaaaaaaaaaaaaaaaaaaaaaaaaaaaaaaaaaaaaaaaaaaaaa

SEQ ID NO: 11454 - DNA, 4703 bp, synthetic construct
  source 1..4703: mol_type = other DNA
ggtctagttacaactgggcatcgctgcagagatcgcacctcctcgtggtcccgctggtagcccttcgaagggtgactaagtcgatctctgccccaggtacggagccgttgggactcaccagtccaacgtaactcctgcctaaattcggtgaaacaaattcctcggtaaaaagccccatggcttcttgcccgaaacctggccccccggtttcagcaggggcaatgagtttggaaagtggactgaccacccactccgttctcgccatcgaacgtggtcccaattcgttggcaaattccggatcagactttgggggggggggtctggggctaccgttacgcctattgagggtatcggtcggcactcagacctcccgctccgactgggtagacctggtgtcctggagccacccaggacccacgtctaagtcccagcaggttgacctggtgtctttatttcctaaacaccgggttgacctgttatccaaaaacgaccaggtagacctggtggctcaatttttaccatctaaatttccccccaatttggcagaaaatgatttggctttgctggtgaacttagagttctacagatcggatttgcatgtgtatgagtgtgttcattttgctgcacattgggagggattaagtggtttgcctgaggtgtatgaacaacttgcaccacaaccgtgtgtgggagaaactttacattctagcctcccacgagacagtgaactgtttgtgcctgaagaggggagcagcgagaaggagagcgaggacgcgccaaaaacatctcctccgacgcctgggaaacatggtttggaacagactggggaggaaaaagtgatggtgactgttcctgacaaaaatccaccttgtccttgctgtggtacccgggtaaactctgtgttgaatctgattgaacatctgaaagtgtcacacgggaaaaggggggtttgttttcggtgtgcaaaatgtggaaaggaaaatagtaactatcacagtgttgtttgtcattttaagaaatgcaggggtccagagacggagaaagccccagctggggagtggatttgtgaggtatgcaacagagattttacaaccaaaattggcctgggacaacacaagagattggcacacccagcagtgagaaatcaggaaaggatcgttgcttcccaaccgaaagaaacatcaaatagaggtgctcacaaaaggtgctggacaaaggaggaggaagaattactaataagactggaggctcagttcgagggaaacaaaaatattaataagcttattgcagaacacataaccaccaaaacagctaagcagatcagtgacaaaaggcgattgctgtccagaaagccagcagaggagccacgtgaggagcctggaacgtgtcatcacaccaggagagcagctgcgagcctgagaacggagcctgagatgagtcatcacgcccaggcagaggacagagataatggacctgggagacgccctctgccaggcagggcagctgccggagggagaacaatggacgagataagacgccaccctgataagggcaacggacagcagagacccaccaagcaaaaatcagaagaacagctgcaggcttactataaaaagacactagaggaacgactttcagctggggcacttaacaccttcccccgagcattcaagcaggtaatggaaggccgggatataaagctagtaatcaatcagacagcgcaggactgcttcggatgcctggaatccataagccaaataagaacggcaacccgagataaaaaggacacggtgacccgggagaaacacccaaagaaaccttttcagaagtggatgaagaagagagcaatcaaaaaaggtaattatcttcggttccagcgtttattttatcttgatagagggaaactggctaaaatcattttagatgatattgaatgcttgtcttgtgacataccactcagtgaaatttattcggtttttaaaacaagatgggaaacaactggtagctttaaaagccttggggactttaaaacttacgggaaggctgacaacactgccttcagagaattaattacggctaaagaaattgagaaaaatgtgcaggaaatgagcaaaggctcggctcccggtccagacgggattactcttggggacgtcgtaaagatggatcccgagttttcccggaccatggagattttcaatttatggttaacaactggtaaaatcccggacatggtgagggggtgcagaaccgttttgattccaaaatcatcagacccggatcgtttgaaagacattaataactggagacctatcacgatcggttccatcttgctgagactgttctccaggattgtaacagctaggctgagcaaagcgtgccccctgaacccaaggcaaagaggctttatcagagcggcgggatgctctgaaaacttaaaactcctgcaaactataatttggtcggccaaaagagaacacagaccactgggtgttgtattcgtggacatcgccaaggcttttgacaccgtaagccaccagcacatcattcatgctttgcagcaaagagaggtggatccccacatcgtcggtctggtgagcaatatgtacgagaacatcagtacgtatatcaccacaaagaggaacacacacacagacaaaatccagatccgggttggagtaaagcagggtgacccgatgtcgccccttttatttaacctggcaatggaccctctattatgcaagctggaagagagtggcaaaggataccaccgaggacagagcagcatcacagcgatggcatttgcagacgatctggttttgctgagcgactcctgggaaaatatgaatacaaatattagcatactggagaccttctgcaatctgaccggactcaaaacacaggggcaaaagtgccacggcttttacatcaagccgacaaaggactcttacaccatcaatgactgcgctgcctggactatcaacggcacacccctgaacatgatcgaccccggcgaatctgagaaatacctcggcctgcagtttgacccgtggattggaatagcaaggtccggtctctccacaaaactagatttttggcttcagcggatcgatcaagcaccacttaaacctctgcagaaaactgatattctcaaaacatacaccatccctcggctgatctacatagctgaccactcagaagtgaaaactgcactactcgaaacccttgaccagaagatccggacagcggtcaaggaatggcttcacctacctccgtgcacctgcgatgccatcctgtactcgagcacgagagacggcggtttgggcatcaccaaattggcaggactgatccccagcgtgcaggcccgtagactgcatcggatcgcacagtcatctgacgatacgatgaaatgcttcatggaaaaagagaaaatggaacagctgcataagaaattgtggattcaagctggaggggacagagagaacataccctcgatttgggaagcaccaccgtcgagtgaaccaccaaacaacgtgagcacaaattcggaatgggaagcaccgacccagaaagataaatttccaaagccttgcaattggaggaaaaacgaattcaaaaaatggaccaaattggcatcccaaggccgcggaattgtaaattttgaaagagacaaaattagtaaccattggatccaatactacagacgcatacctcacaggaaactcctcactgcactacaactcagggccaacgtttaccccacgagagaatttctagccaggggtagacaagaccaatacatcaaggcgtgtaggcactgcgatgcggacattgaatcctgcgcccacatcatcggcaactgcccagtgacacaggacgcccgaatcaagaggcacaattacatctgcgaactgcttctcgaggaggcgaagaagaaggactgggtagtgttcaaggaaccgcacataagggattccaacaaggaactgtacaaacctgacctgatatttgtgaaggatgcccgtgcacttgtcgtggatgtgacagtacggtatgaagcagccaaatcatcgctggaggaagccgctgcagagaaagtgagaaagtacaaacacctggaaacggaagtaagacatctcacgaatgcaaaggacgttacttttgtgggctttcccctaggagcgcgggggaaatggcaccaagataactttaaacttttgactgagcttggcctctccaaatcgaggcaagtgaaaatggcagagactttttccacagtagcgctcttttcatctgtggacattgtacatatgtttgccagtagggccagaaaatctatggttatgtgataataggctgccttctgcggggcttgccttctggccatgcccttcttctctcccttgcacctgtacctcttggtctttgaataaagcctgagtaggaaggaccggtagacatgataagatacattgatgagtttggacaaaccacaactagaatgcagtgaaaaaaatgctttatttgtgaaatttgtgatgctattgctttatttgtaaccattataagctgcaataaacaagttaacaacaacaaaaaaaaaaaaaaaaaaaaaaaaaaaaaaacgttgactaaaaaaaaaaaaaaaaaaaaaaaaaaaaaaaaaaaaaaaaaaaaaaaaaaaaaaaaaaaaaaaaaaaaaa

SEQ ID NO: 11455 - DNA, 4703 bp, synthetic construct
  source 1..4703: mol_type = other DNA
ggtctagttacaactgggcatcgctgcagagatcgcacctcctcgtggtcccgctggtagcccttcgaagggtgactaagtcgatctctgccccaggtacggagccgttgggactcaccagtccaacgtaactcctgcctaaattcggtgaaacaaattcctcggtaaaaagccccatggcttcttgcccgaaacctggccccccggtttcagcaggggcaatgagtttggaaagtggactgaccacccactccgttctcgccatcgaacgtggtcccaattcgttggcaaattccggatcagactttgggggggggggtctggggctaccgttacgcctattgagggtatcggtcggcactcagacctcccgctccgactgggtagacctggtgtcctggagccacccaggacccacgtctaagtcccagcaggttgacctggtgtctttatttcctaaacaccgggttgacctgttatccaaaaacgaccaggtagacctggtggctcaatttttaccatctaaatttccccccaatttggcagaaaatgatttggctttgctggtgaacttagagttctacagatcggatttgcatgtgtatgagtgtgttcattttgctgcacattgggagggattaagtggtttgcctgaggtgtatgaacaacttgcaccacaaccgtgtgtgggagaaactttacattctagcctcccacgagacagtgaactgtttgtgcctgaagaggggagcagcgagaaggagagcgaggacgcgccaaaaacatctcctccgacgcctgggaaacatggtttggaacagactggggaggaaaaagtgatggtgactgttcctgacaaaaatccaccttgtccttgctgtggtacccgggtaaactctgtgttgaatctgattgaacatctgaaagtgtcacacgggaaaaggggggtttgttttcggtgtgcaaaatgtggaaaggaaaatagtaactatcacagtgttgtttgtcattttccaaaatgcaggggtccagagacggagaaagccccagctggggagtggatttgtgaggtatgcaacagagattttacaaccaaaattggcctgggacaacacaagagattggcacacccagcagtgagaaatcaggaaaggatcgttgcttcccaaccgaaagaaacatcaaatagaggtgctcacaaaaggtgctggacaaaggaggaggaagaattactaataagactggaggctcagttcgagggaaacaaaaatattaataagcttattgcagaacacataaccaccaaaacagctaagcagatcagtgacaaaaggcgattgctgtccagaaagccagcagaggagccacgtgaggagcctggaacgtgtcatcacaccaggagagcagctgcgagcctgagaacggagcctgagatgagtcatcacgcccaggcagaggacagagataatggacctgggagacgccctctgccaggcagggcagctgccggagggagaacaatggacgagataagacgccaccctgataagggcaacggacagcagagacccaccaagcaaaaatcagaagaacagctgcaggcttactataaaaagacactagaggaacgactttcagctggggcacttaacaccttcccccgagcattcaagcaggtaatggaaggccgggatataaagctagtaatcaatcagacagcgcaggactgcttcggatgcctggaatccataagccaaataagaacggcaacccgagataaaaaggacacggtgacccgggagaaacacccaaagaaaccttttcagaagtggatgaagaagagagcaatcaaaaaaggtaattatcttcggttccagcgtttattttatcttgatagagggaaactggctaaaatcattttagatgatattgaatgcttgtcttgtgacataccactcagtgaaatttattcggtttttaaaacaagatgggaaacaactggtagctttaaaagccttggggactttaaaacttacgggaaggctgacaacactgccttcagagaattaattacggctaaagaaattgagaaaaatgtgcaggaaatgagcaaaggctcggctcccggtccagacgggattactcttggggacgtcgtaaagatggatcccgagttttcccggaccatggagattttcaatttatggttaacaactggtaaaatcccggacatggtgagggggtgcagaaccgttttgattccaaaatcatcaaagccggatcgtttgaaagacattaataactggagacctatcacgatcggttccatcttgctgagactgttctccaggattgtaacagctaggctgagcaaagcgtgccccctgaacccaaggcaaagaggctttatcagagcggcgggatgctctgaaaacttaaaactcctgcaaactataatttggtcggccaaaagagaacacagaccactgggtgttgtattcgtggacatcgccaaggcttttgacaccgtaagccaccagcacatcattcatgctttgcagcaaagagaggtggatccccacatcgtcggtctggtgagcaatatgtacgagaacatcagtacgtatatcaccacaaagaggaacacacacacagacaaaatccagatccgggttggagtaaagcagggtgacccgatgtcgccccttttatttaacctggcaatggaccctctattatgcaagctggaagagagtggcaaaggataccaccgaggacagagcagcatcacagcgatggcatttgcagacgatctggttttgctgagcgactcctgggaaaatatgaatacaaatattagcatactggagaccttctgcaatctgaccggactcaaaacacaggggcaaaagtgccacggcttttacatcaagccgacaaaggactcttacaccatcaatgactgcgctgcctggactatcaacggcacacccctgaacatgatcgaccccggcgaatctgagaaatacctcggcctgcagtttgacccgtggattggaatagcaaggtccggtctctccacaaaactagatttttggcttcagcggatcgatcaagcaccacttaaacctctgcagaaaactgatattctcaaaacatacaccatccctcggctgatctacatagctgaccactcagaagtgaaaactgcactactcgaaacccttgaccagaagatccggacagcggtcaaggaatggcttcacctacctccgtgcacctgcgatgccatcctgtactcgagcacgagagacggcggtttgggcatcaccaaattggcaggactgatccccagcgtgcaggcccgtagactgcatcggatcgcacagtcatctgacgatacgatgaaatgcttcatggaaaaagagaaaatggaacagctgcataagaaattgtggattcaagctggaggggacagagagaacataccctcgatttgggaagcaccaccgtcgagtgaaccaccaaacaacgtgagcacaaattcggaatgggaagcaccgacccagaaagataaatttccaaagccttgcaattggaggaaaaacgaattcaaaaaatggaccaaattggcatcccaaggccgcggaattgtaaattttgaaagagacaaaattagtaaccattggatccaatactacagacgcatacctcacaggaaactcctcactgcactacaactcagggccaacgtttaccccacgagagaatttctagccaggggtagacaagaccaatacatcaaggcgtgtaggcactgcgatgcggacattgaatcctgcgcccacatcatcggcaactgcccagtgacacaggacgcccgaatcaagaggcacaattacatctgcgaactgcttctcgaggaggcgaagaagaaggactgggtagtgttcaaggaaccgcacataagggattccaacaaggaactgtacaaacctgacctgatatttgtgaaggatgcccgtgcacttgtcgtggatgtgacagtacggtatgaagcagccaaatcatcgctggaggaagccgctgcagagaaagtgagaaagtacaaacacctggaaacggaagtaagacatctcacgaatgcaaaggacgttacttttgtgggctttcccctaggagcgcgggggaaatggcaccaagataactttaaacttttgactgagcttggcctctccaaatcgaggcaagtgaaaatggcagagactttttccacagtagcgctcttttcatctgtggacattgtacatatgtttgccagtagggccagaaaatctatggttatgtgataataggctgccttctgcggggcttgccttctggccatgcccttcttctctcccttgcacctgtacctcttggtctttgaataaagcctgagtaggaaggaccggtagacatgataagatacattgatgagtttggacaaaccacaactagaatgcagtgaaaaaaatgctttatttgtgaaatttgtgatgctattgctttatttgtaaccattataagctgcaataaacaagttaacaacaacaaaaaaaaaaaaaaaaaaaaaaaaaaaaaaacgttgactaaaaaaaaaaaaaaaaaaaaaaaaaaaaaaaaaaaaaaaaaaaaaaaaaaaaaaaaaaaaaaaaaaaaaa

SEQ ID NO: 11456 - DNA, 4703 bp, synthetic construct
  source 1..4703: mol_type = other DNA
ggtctagttacaactgggcatcgctgcagagatcgcacctcctcgtggtcccgctggtagcccttcgaagggtgactaagtcgatctctgccccaggtacggagccgttgggactcaccagtccaacgtaactcctgcctaaattcggtgaaacaaattcctcggtaaaaagccccatggcttcttgcccgaaacctggccccccggtttcagcaggggcaatgagtttggaaagtggactgaccacccactccgttctcgccatcgaacgtggtcccaattcgttggcaaattccggatcagactttgggggggggggtctggggctaccgttacgcctattgagggtatcggtcggcactcagacctcccgctccgactgggtagacctggtgtcctggagccacccaggacccacgtctaagtcccagcaggttgacctggtgtctttatttcctaaacaccgggttgacctgttatccaaaaacgaccaggtagacctggtggctcaatttttaccatctaaatttccccccaatttggcagaaaatgatttggctttgctggtgaacttagagttctacagatcggatttgcatgtgtatgagtgtgttcattttgctgcacattgggagggattaagtggtttgcctgaggtgtatgaacaacttgcaccacaaccgtgtgtgggagaaactttacattctagcctcccacgagacagtgaactgtttgtgcctgaagaggggagcagcgagaaggagagcgaggacgcgccaaaaacatctcctccgacgcctgggaaacatggtttggaacagactggggaggaaaaagtgatggtgactgttcctgacaaaaatccaccttgtccttgctgtggtacccgggtaaactctgtgttgaatctgattgaacatctgaaagtgtcacacgggaaaaggggggtttgttttcggtgtgcaaaatgtggaaaggaaaatagtaactatcacagtgttgtttgtcattttccaaaatgcaggggtccagagacggagaaagccccagctggggagtggatttgtgaggtatgcaacagagattttacaaccaaaattggcctgggacaacacaagagattggcacacccagcagtgagaaatcaggaaaggatcgttgcttcccaaccgaaagaaacatcaaatagaggtgctcacaaaaggtgctggacaaaggaggaggaagaattactaataagactggaggctcagttcgagggaaacaaaaatattaataagcttattgcagaacacataaccaccaaaacagctaagcagatcagtgacaaaaggcgattgctgtccagaaagccagcagaggagccacgtgaggagcctggaacgtgtcatcacaccaggagagcagctgcgagcctgagaacggagcctgagatgagtcatcacgcccaggcagaggacagagataatggacctgggagacgccctctgccaggcagggcagctgccggagggagaacaatggacgagataagacgccaccctgataagggcaacggacagcagagacccaccaagcaaaaatcagaagaacagctgcaggcttactataaaaagacactagaggaacgactttcagctggggcacttaacaccttcccccgagcattcaagcaggtaatggaaggccgggatataaagctagtaatcaatcagacagcgcaggactgcttcggatgcctggaatccataagccaaataagaacggcaacccgagataaaaaggacacggtgacccgggagaaacacccaaagaaaccttttcagaagtggatgaaggacagagcaatcaaaaaaggtaattatcttcggttccagcgtttattttatcttgatagagggaaactggctaaaatcattttagatgatattgaatgcttgtcttgtgacataccactcagtgaaatttattcggtttttaaaacaagatgggaaacaactggtagctttaaaagccttggggactttaaaacttacgggaaggctgacaacactgccttcagagaattaattacggctaaagaaattgagaaaaatgtgcaggaaatgagcaaaggctcggctcccggtccagacgggattactcttggggacgtcgtaaagatggatcccgagttttcccggaccatggagattttcaatttatggttaacaactggtaaaatcccggacatggtgagggggtgcagaaccgttttgattccaaaatcatcagacccggatcgtttgaaagacattaataactggagacctatcacgatcggttccatcttgctgagactgttctccaggattgtaacagctaggctgagcaaagcgtgccccctgaacccaaggcaaagaggctttatcagagcggcgggatgctctgaaaacttaaaactcctgcaaactataatttggtcggccaaaagagaacacagaccactgggtgttgtattcgtggacatcgccaaggcttttgacaccgtaagccaccagcacatcattcatgctttgcagcaaagagaggtggatccccacatcgtcggtctggtgagcaatatgtacgagaacatcagtacgtatatcaccacaaagaggaacacacacacagacaaaatccagatccgggttggagtaaagcagggtgacccgatgtcgccccttttatttaacctggcaatggaccctctattatgcaagctggaagagagtggcaaaggataccaccgaggacagagcagcatcacagcgatggcatttgcagacgatctggttttgctgagcgactcctgggaaaatatgaatacaaatattagcatactggagaccttctgcaatctgaccggactcaaaacacaggggcaaaagtgccacggcttttacatcaagccgacaaaggactcttacaccatcaatgactgcgctgcctggactatcaacggcacacccctgaacatgatcgaccccggcgaatctgagaaatacctcggcctgcagtttgacccgtggattggaatagcaaggtccggtctctccacaaaactagatttttggcttcagcggatcgatcaagcaccacttaaacctctgcagaaaactgatattctcaaaacatacaccatccctcggctgatctacatagctgaccactcagaagtgaaaactgcactactcgaaacccttgaccagaagatccggacagcggtcaaggaatggcttcacctacctccgtgcacctgcgatgccatcctgtactcgagcacgagagacggcggtttgggcatcaccaaattggcaggactgatccccagcgtgcaggcccgtagactgcatcggatcgcacagtcatctgacgatacgatgaaatgcttcatggaaaaagagaaaatggaacagctgcataagaaattgtggattcaagctggaggggacagagagaacataccctcgatttgggaagcaccaccgtcgagtgaaccaccaaacaacgtgagcacaaattcggaatgggaagcaccgacccagaaagataaatttccaaagccttgcaattggaggaaaaacgaattcaaaaaatggaccaaattggcatcccaaggccgcggaattgtaaattttgaaagagacaaaattagtaaccattggatccaatactacagacgcatacctcacaggaaactcctcactgcactacaactcagggccaacgtttaccccacgagagaatttctagccaggggtagacaagaccaatacatcaaggcgtgtaggcactgcgatgcggacattgaatcctgcgcccacatcatcggcaactgcccagtgacacaggacgcccgaatcaagaggcacaattacatctgcgaactgcttctcgaggaggcgaagaagaaggactgggtagtgttcaaggaaccgcacataagggattccaacaaggaactgtacaaacctgacctgatatttgtgaaggatgcccgtgcacttgtcgtggatgtgacagtacggtatgaagcagccaaatcatcgctggaggaagccgctgcagagaaagtgagaaagtacaaacacctggaaacggaagtaagacatctcacgaatgcaaaggacgttacttttgtgggctttcccctaggagcgcgggggaaatggcaccaagataactttaaacttttgactgagcttggcctctccaaatcgaggcaagtgaaaatggcagagactttttccacagtagcgctcttttcatctgtggacattgtacatatgtttgccagtagggccagaaaatctatggttatgtgataataggctgccttctgcggggcttgccttctggccatgcccttcttctctcccttgcacctgtacctcttggtctttgaataaagcctgagtaggaaggaccggtagacatgataagatacattgatgagtttggacaaaccacaactagaatgcagtgaaaaaaatgctttatttgtgaaatttgtgatgctattgctttatttgtaaccattataagctgcaataaacaagttaacaacaacaaaaaaaaaaaaaaaaaaaaaaaaaaaaaaacgttgactaaaaaaaaaaaaaaaaaaaaaaaaaaaaaaaaaaaaaaaaaaaaaaaaaaaaaaaaaaaaaaaaaaaaaa

SEQ ID NO: 11457 - DNA, 4703 bp, synthetic construct
  source 1..4703: mol_type = other DNA
ggtctagttacaactgggcatcgctgcagagatcgcacctcctcgtggtcccgctggtagcccttcgaagggtgactaagtcgatctctgccccaggtacggagccgttgggactcaccagtccaacgtaactcctgcctaaattcggtgaaacaaattcctcggtaaaaagccccatggcttcttgcccgaaacctggccccccggtttcagcaggggcaatgagtttggaaagtggactgaccacccactccgttctcgccatcgaacgtggtcccaattcgttggcaaattccggatcagactttgggggggggggtctggggctaccgttacgcctattgagggtatcggtcggcactcagacctcccgctccgactgggtagacctggtgtcctggagccacccaggacccacgtctaagtcccagcaggttgacctggtgtctttatttcctaaacaccgggttgacctgttatccaaaaacgaccaggtagacctggtggctcaatttttaccatctaaatttccccccaatttggcagaaaatgatttggctttgctggtgaacttagagttctacagatcggatttgcatgtgtatgagtgtgttcattttgctgcacattgggagggattaagtggtttgcctgaggtgtatgaacaacttgcaccacaaccgtgtgtgggagaaactttacattctagcctcccacgagacagtgaactgtttgtgcctgaagaggggagcagcgagaaggagagcgaggacgcgccaaaaacatctcctccgacgcctgggaaacatggtttggaacagactggggaggaaaaagtgatggtgactgttcctgacaaaaatccaccttgtccttgctgtggtacccgggtaaactctgtgttgaatctgattgaacatctgaaagtgtcacacgggaaaaggggggtttgttttcggtgtgcaaaatgtggaaaggaaaatagtaactatcacagtgttgtttgtcattttaagaaatgcaggggtccagagacggagaaagccccagctggggagtggatttgtgaggtatgcaacagagattttacaaccaaaattggcctgggacaacacaagagattggcacacccagcagtgagaaatcaggaaaggatcgttgcttcccaaccgaaagaaacatcaaatagaggtgctcacaaaaggtgctggacaaaggaggaggaagaattactaataagactggaggctcagttcgagggaaacaaaaatattaataagcttattgcagaacacataaccaccaaaacagctaagcagatcagtgacaaaaggcgattgctgtccagaaagccagcagaggagccacgtgaggagcctggaacgtgtcatcacaccaggagagcagctgcgagcctgagaacggagcctgagatgagtcatcacgcccaggcagaggacagagataatggacctgggagacgccctctgccaggcagggcagctgccggagggagaacaatggacgagataagacgccaccctgataagggcaacggacagcagagacccaccaagcaaaaatcagaagaacagctgcaggcttactataaaaagacactagaggaacgactttcagctggggcacttaacaccttcccccgagcattcaagcaggtaatggaaggccgggatataaagctagtaatcaatcagacagcgcaggactgcttcggatgcctggaatccataagccaaataagaacggcaacccgagataaaaaggacacggtgacccgggagaaacacccaaagaaaccttttcagaagtggatgaaggacagagcaatcaaaaaaggtaattatcttcggttccagcgtttattttatcttgatagagggaaactggctaaaatcattttagatgatattgaatgcttgtcttgtgacataccactcagtgaaatttattcggtttttaaaacaagatgggaaacaactggtagctttaaaagccttggggactttaaaacttacgggaaggctgacaacactgccttcagagaattaattacggctaaagaaattgagaaaaatgtgcaggaaatgagcaaaggctcggctcccggtccagacgggattactcttggggacgtcgtaaagatggatcccgagttttcccggaccatggagattttcaatttatggttaacaactggtaaaatcccggacatggtgagggggtgcagaaccgttttgattccaaaatcatcaaagccggatcgtttgaaagacattaataactggagacctatcacgatcggttccatcttgctgagactgttctccaggattgtaacagctaggctgagcaaagcgtgccccctgaacccaaggcaaagaggctttatcagagcggcgggatgctctgaaaacttaaaactcctgcaaactataatttggtcggccaaaagagaacacagaccactgggtgttgtattcgtggacatcgccaaggcttttgacaccgtaagccaccagcacatcattcatgctttgcagcaaagagaggtggatccccacatcgtcggtctggtgagcaatatgtacgagaacatcagtacgtatatcaccacaaagaggaacacacacacagacaaaatccagatccgggttggagtaaagcagggtgacccgatgtcgccccttttatttaacctggcaatggaccctctattatgcaagctggaagagagtggcaaaggataccaccgaggacagagcagcatcacagcgatggcatttgcagacgatctggttttgctgagcgactcctgggaaaatatgaatacaaatattagcatactggagaccttctgcaatctgaccggactcaaaacacaggggcaaaagtgccacggcttttacatcaagccgacaaaggactcttacaccatcaatgactgcgctgcctggactatcaacggcacacccctgaacatgatcgaccccggcgaatctgagaaatacctcggcctgcagtttgacccgtggattggaatagcaaggtccggtctctccacaaaactagatttttggcttcagcggatcgatcaagcaccacttaaacctctgcagaaaactgatattctcaaaacatacaccatccctcggctgatctacatagctgaccactcagaagtgaaaactgcactactcgaaacccttgaccagaagatccggacagcggtcaaggaatggcttcacctacctccgtgcacctgcgatgccatcctgtactcgagcacgagagacggcggtttgggcatcaccaaattggcaggactgatccccagcgtgcaggcccgtagactgcatcggatcgcacagtcatctgacgatacgatgaaatgcttcatggaaaaagagaaaatggaacagctgcataagaaattgtggattcaagctggaggggacagagagaacataccctcgatttgggaagcaccaccgtcgagtgaaccaccaaacaacgtgagcacaaattcggaatgggaagcaccgacccagaaagataaatttccaaagccttgcaattggaggaaaaacgaattcaaaaaatggaccaaattggcatcccaaggccgcggaattgtaaattttgaaagagacaaaattagtaaccattggatccaatactacagacgcatacctcacaggaaactcctcactgcactacaactcagggccaacgtttaccccacgagagaatttctagccaggggtagacaagaccaatacatcaaggcgtgtaggcactgcgatgcggacattgaatcctgcgcccacatcatcggcaactgcccagtgacacaggacgcccgaatcaagaggcacaattacatctgcgaactgcttctcgaggaggcgaagaagaaggactgggtagtgttcaaggaaccgcacataagggattccaacaaggaactgtacaaacctgacctgatatttgtgaaggatgcccgtgcacttgtcgtggatgtgacagtacggtatgaagcagccaaatcatcgctggaggaagccgctgcagagaaagtgagaaagtacaaacacctggaaacggaagtaagacatctcacgaatgcaaaggacgttacttttgtgggctttcccctaggagcgcgggggaaatggcaccaagataactttaaacttttgactgagcttggcctctccaaatcgaggcaagtgaaaatggcagagactttttccacagtagcgctcttttcatctgtggacattgtacatatgtttgccagtagggccagaaaatctatggttatgtgataataggctgccttctgcggggcttgccttctggccatgcccttcttctctcccttgcacctgtacctcttggtctttgaataaagcctgagtaggaaggaccggtagacatgataagatacattgatgagtttggacaaaccacaactagaatgcagtgaaaaaaatgctttatttgtgaaatttgtgatgctattgctttatttgtaaccattataagctgcaataaacaagttaacaacaacaaaaaaaaaaaaaaaaaaaaaaaaaaaaaaacgttgactaaaaaaaaaaaaaaaaaaaaaaaaaaaaaaaaaaaaaaaaaaaaaaaaaaaaaaaaaaaaaaaaaaaaaa

SEQ ID NO: 11458 - DNA, 4703 bp, synthetic construct
  source 1..4703: mol_type = other DNA
ggtctagttacaactgggcatcgctgcagagatcgcacctcctcgtggtcccgctggtagcccttcgaagggtgactaagtcgatctctgccccaggtacggagccgttgggactcaccagtccaacgtaactcctgcctaaattcggtgaaacaaattcctcggtaaaaagccccatggcttcttgcccgaaacctggccccccggtttcagcaggggcaatgagtttggaaagtggactgaccacccactccgttctcgccatcgaacgtggtcccaattcgttggcaaattccggatcagactttgggggggggggtctggggctaccgttacgcctattgagggtatcggtcggcactcagacctcccgctccgactgggtagacctggtgtcctggagccacccaggacccacgtctaagtcccagcaggttgacctggtgtctttatttcctaaacaccgggttgacctgttatccaaaaacgaccaggtagacctggtggctcaatttttaccatctaaatttccccccaatttggcagaaaatgatttggctttgctggtgaacttagagttctacagatcggatttgcatgtgtatgagtgtgttcattttgctgcacattgggagggattaagtggtttgcctgaggtgtatgaacaacttgcaccacaaccgtgtgtgggagaaactttacattctagcctcccacgagacagtgaactgtttgtgcctgaagaggggagcagcgagaaggagagcgaggacgcgccaaaaacatctcctccgacgcctgggaaacatggtttggaacagactggggaggaaaaagtgatggtgactgttcctgacaaaaatccaccttgtccttgctgtggtacccgggtaaactctgtgttgaatctgattgaacatctgaaagtgtcacacgggaaaaggggggtttgttttcggtgtgcaaaatgtggaaaggaaaatagtaactatcacagtgttgtttgtcattttaagaaatgcaggggtccagagacggagaaagccccagctggggagtggatttgtgaggtatgcaacagagattttacaaccaaaattggcctgggacaacacaagagattggcacacccagcagtgagaaatcaggaaaggatcgttgcttcccaaccgaaagaaacatcaaatagaggtgctcacaaaaggtgctggacaaaggaggaggaagaattactaataagactggaggctcagttcgagggaaacaaaaatattaataagcttattgcagaacacataaccaccaaaacagctaagcagatcagtgacatgaggcgattgctgtccagaaagccagcagaggagccacgtgaggagcctggaacgtgtcatcacaccaggagagcagctgcgagcctgagaacggagcctgagatgagtcatcacgcccaggcagaggacagagataatggacctgggagacgccctctgccaggcagggcagctgccggagggagaacaatggacgagataagacgccaccctgataagggcaacggacagcagagacccaccaagcaaaaatcagaagaacagctgcaggcttactataaaaagacactagaggaacgactttcagctggggcacttaacaccttcccccgagcattcaagcaggtaatggaaggccgggatataaagctagtaatcaatcagacagcgcaggactgcttcggatgcctggaatccataagccaaataagaacggcaacccgagataaaaaggacacggtgacccgggagaaacacccaaagaaaccttttcagaagtggatgaaggacagagcaatcaaaaaaggtaattatcttcggttccagcgtttattttatcttgatagagggaaactggctaaaatcattttagatgatattgaatgcttgtcttgtgacataccactcagtgaaatttattcggtttttaaaacaagatgggaaacaactggtagctttaaaagccttggggactttaaaacttacgggaaggctgacaacactgccttcagagaattaattacggctaaagaaattgagaaaaatgtgcaggaaatgagcaaaggctcggctcccggtccagacgggattactcttggggacgtcgtaaagatggatcccgagttttcccggaccatggagattttcaatttatggttaacaactggtaaaatcccggacatggtgagggggtgcagaaccgttttgattccaaaatcatcaaagccggatcgtttgaaagacattaataactggagacctatcacgatcggttccatcttgctgagactgttctccaggattgtaacagctaggctgagcaaagcgtgccccctgaacccaaggcaaagaggctttatcagagcggcgggatgctctgaaaacttaaaactcctgcaaactataatttggtcggccaaaagagaacacagaccactgggtgttgtattcgtggacatcgccaaggcttttgacaccgtaagccaccagcacatcattcatgctttgcagcaaagagaggtggatccccacatcgtcggtctggtgagcaatatgtacgagaacatcagtacgtatatcaccacaaagaggaacacacacacagacaaaatccagatccgggttggagtaaagcagggtgacccgatgtcgccccttttatttaacctggcaatggaccctctattatgcaagctggaagagagtggcaaaggataccaccgaggacagagcagcatcacagcgatggcatttgcagacgatctggttttgctgagcgactcctgggaaaatatgaatacaaatattagcatactggagaccttctgcaatctgaccggactcaaaacacaggggcaaaagtgccacggcttttacatcaagccgacaaaggactcttacaccatcaatgactgcgctgcctggactatcaacggcacacccctgaacatgatcgaccccggcgaatctgagaaatacctcggcctgcagtttgacccgtggattggaatagcaaggtccggtctctccacaaaactagatttttggcttcagcggatcgatcaagcaccacttaaacctctgcagaaaactgatattctcaaaacatacaccatccctcggctgatctacatagctgaccactcagaagtgaaaactgcactactcgaaacccttgaccagaagatccggacagcggtcaaggaatggcttcacctacctccgtgcacctgcgatgccatcctgtactcgagcacgagagacggcggtttgggcatcaccaaattggcaggactgatccccagcgtgcaggcccgtagactgcatcggatcgcacagtcatctgacgatacgatgaaatgcttcatggaaaaagagaaaatggaacagctgcataagaaattgtggattcaagctggaggggacagagagaacataccctcgatttgggaagcaccaccgtcgagtgaaccaccaaacaacgtgagcacaaattcggaatgggaagcaccgacccagaaagataaatttccaaagccttgcaattggaggaaaaacgaattcaaaaaatggaccaaattggcatcccaaggccgcggaattgtaaattttgaaagagacaaaattagtaaccattggatccaatactacagacgcatacctcacaggaaactcctcactgcactacaactcagggccaacgtttaccccacgagagaatttctagccaggggtagacaagaccaatacatcaaggcgtgtaggcactgcgatgcggacattgaatcctgcgcccacatcatcggcaactgcccagtgacacaggacgcccgaatcaagaggcacaattacatctgcgaactgcttctcgaggaggcgaagaagaaggactgggtagtgttcaaggaaccgcacataagggattccaacaaggaactgtacaaacctgacctgatatttgtgaaggatgcccgtgcacttgtcgtggatgtgacagtacggtatgaagcagccaaatcatcgctggaggaagccgctgcagagaaagtgagaaagtacaaacacctggaaacggaagtaagacatctcacgaatgcaaaggacgttacttttgtgggctttcccctaggagcgcgggggaaatggcaccaagataactttaaacttttgactgagcttggcctctccaaatcgaggcaagtgaaaatggcagagactttttccacagtagcgctcttttcatctgtggacattgtacatatgtttgccagtagggccagaaaatctatggttatgtgataataggctgccttctgcggggcttgccttctggccatgcccttcttctctcccttgcacctgtacctcttggtctttgaataaagcctgagtaggaaggaccggtagacatgataagatacattgatgagtttggacaaaccacaactagaatgcagtgaaaaaaatgctttatttgtgaaatttgtgatgctattgctttatttgtaaccattataagctgcaataaacaagttaacaacaacaaaaaaaaaaaaaaaaaaaaaaaaaaaaaaacgttgactaaaaaaaaaaaaaaaaaaaaaaaaaaaaaaaaaaaaaaaaaaaaaaaaaaaaaaaaaaaaaaaaaaaaaa

SEQ ID NO: 11459 - skipped

SEQ ID NO: 11460 - DNA, 4703 bp, synthetic construct
  source 1..4703: mol_type = other DNA
ggtctagttacaactgggcatcgctgcagagatcgcacctcctcgtggtcccgctggtagcccttcgaagggtgactaagtcgatctctgccccaggtacggagccgttgggactcaccagtccaacgtaactcctgcctaaattcggtgaaacaaattcctcggtaaaaagccccatggcttcttgcccgaaacctggccccccggtttcagcaggggcaatgagtttggaaagtggactgaccacccactccgttctcgccatcgaacgtggtcccaattcgttggcaaattccggatcagactttgggggggggggtctggggctaccgttacgcctattgagggtatcggtcggcactcagacctcccgctccgactgggtagacctggtgtcctggagccacccaggacccacgtctaagtcccagcaggttgacctggtgtctttatttcctaaacaccgggttgacctgttatccaaaaacgaccaggtagacctggtggctcaatttttaccatctaaatttccccccaatttggcagaaaatgatttggctttgctggtgaacttagagttctacagatcggatttgcatgtgtatgagtgtgttcattttgctgcacattgggagggattaagtggtttgcctgaggtgtatgaacaacttgcaccacaaccgtgtgtgggagaaactttacattctagcctcccacgagacagtgaactgtttgtgcctgaagaggggagcagcgagaaggagagcgaggacgcgccaaaaacatctcctccgacgcctgggaaacatggtttggaacagactggggaggaaaaagtgatggtgactgttcctgacaaaaatccaccttgtccttgctgtggtacccgggtaaactctgtgttgaatctgattgaacatctgaaagtgtcacacgggaaaaggggggtttgttttcggtgtgcaaaatgtggaaaggaaaatagtaactatcacagtgttgtttgtcattttccaaaatgcaggggtccagagacggagaaagccccagctggggagtggatttgtgaggtatgcaacagagattttacaaccaaaattggcctgggacaacacaagagattggcacacccagcagtgagaaatcaggaaaggatcgttgcttcccaaccgaaagaaacatcaaatagaggtgctcacaaaaggtgctggacaaaggaggaggaagaattactaataagactggaggctcagttcgagggaaacaaaaatattaataagcttattgcagaacacataaccaccaaaacagctaagcagatcagtgacaaaaggcgattgctgtccagaaagccagcagaggagccacgtgaggagcctggaacgtgtcatcacaccaggagagcagctgcgagcctgagaacggagcctgagatgagtcatcacgcccaggcagaggacagagataatggacctgggagacgccctctgccaggcagggcagctgccggagggagaacaatggacgagataagacgccaccctgataagggcaacggacagcagagacccaccaagcaaaaatcagaagaacagctgcaggcttactataaaaagacactagaggaacgactttcagctggggcacttaacaccttcccccgagcattcaagcaggtaatggaaggccgggatataaagctagtaatcaatcagacagcgcaggactgcttcggatgcctggaatccataagccaaataagaacggcaacccgagataaaaaggacacggtgacccgggagaaacacccaaagaaaccttttcagaagtggatgaaggacagagcaatcaaaaaaggtaattatcttcggttccagcgtttattttatcttgatagagggaaactggctaaaatcattttagatgatattgaatgcttgtcttgtgacataccactcagtgaaatttattcggtttttaaaacaagatgggaaacaactggtagctttaaaagccttggggactttaaaacttacgggaaggctgacaacactgccttcagagaattaattacggctaaagaaattgagaaaaatgtgcaggaaatgagcaaaggctcggctcccggtccagacgggattactcttggggacgtcgtaaagatggatcccgagttttcccggaccatggagattttcaatttatggttaacaactggtaaaatcccggacatggtgagggggtgcagaaccgttttgattccaaaatcatcagacccggatcgtttgaaagacattaataactggagacctatcacgatcggttccatcttgctgagactgttctccaggattgtaacagctaggctgagcaaagcgtgccccctgaacccaaggcaaagaggctttatcagagcggcgggatgctctgaaaacttaaaactcctgcaaactataatttggtcggccaaaagagaacacagaccactgggtgttgtattcgtggacatcgccaaggcttttgacaccgtaagccaccagcacatcattcatgctttgcagcaaagagaggtggatccccacatcgtcggtctggtgagcaatatgtacgagaacatcagtacgtatatcaccacaaagaggaacacacacacagacaaaatccagatccgggttggagtaaagcagggtgacccgatgtcgccccttttatttaacctggcaatggaccctctattatgcaagctggaagagagtggcaaaggataccaccgaggacagagcagcatcacagcgatggcatttgcagacgatctggttttgctgagcgactcctgggaaaatatgaatacaaatattagcatactggagaccttctgcaatctgaccggactcaaaacacaggggcaaaagtgccacggcttttacatcaagccgacaaaggactcttacaccatcaatgactgcgctgcctggactatcaacggcacacccctgaacatgatcgaccccggcgaatctgagaaatacctcggcctgcagtttgacccgtggattggaatagcaaggtccggtctctccacaaaactagatttttggcttcagcggatcgatcaagcaccacttaaacctctgcagaaaactgatattctcaaaacatacaccatccctcggctgatctacatagctgaccactcagaagtgaaaactgcactactcgaaacccttgaccagaagatccggacagcggtcaaggaatggcttcacctacctccgtgcacctgcgatgccatcctgtactcgagcacgagagacggcggtttgggcatcaccaaattggcaggactgatccccagcgtgcaggcccgtagactgcatcggatcgcacagtcatctgacgatacgatgaaatgcttcatggaaaaagagaaaatggaacagctgcataagaaattgtggattcaagctggaggggacagagagaacataccctcgatttgggaagcaccaccgtcgagtgaaccaccaaacaacgtgagcacaaattcggaatgggaagcaccgacccagaaagataaatttccaaagccttgcaattggaggaaaaacgaattcaaaaaatggaccaaattggcatcccaaggccgcggaattgtaaattttgaaagagacaaaattagtaaccattggatccaatactacagacgcatacctcacaggaaactcctcactgcactacaactcagggccaacgtttaccccacgagagaatttctagccaggggtagacaagaccaatacatcaaggcgtgtaggcactgcgatgcggacattgaatcctgcgcccacatcatcggcaactgcccagtgacacaggacgcccgaatcaagaggcacaataagatctgcgaactgcttctcgaggaggcgaagaagaaggactgggtagtgttcaaggaaccgcacataagggattccaacaaggaactgtacaaacctgacctgatatttgtgaaggatgcccgtgcacttgtcgtggatgtgacagtacggtatgaagcagccaaatcatcgctggaggaagccgctgcagagaaagtgagaaagtacaaacacctggaaacggaagtaagacatctcacgaatgcaaaggacgttacttttgtgggctttcccctaggagcgcgggggaaatggcaccaagataactttaaacttttgactgagcttggcctctccaaatcgaggcaagtgaaaatggcagagactttttccacagtagcgctcttttcatctgtggacattgtacatatgtttgccagtagggccagaaaatctatggttatgtgataataggctgccttctgcggggcttgccttctggccatgcccttcttctctcccttgcacctgtacctcttggtctttgaataaagcctgagtaggaaggaccggtagacatgataagatacattgatgagtttggacaaaccacaactagaatgcagtgaaaaaaatgctttatttgtgaaatttgtgatgctattgctttatttgtaaccattataagctgcaataaacaagttaacaacaacaaaaaaaaaaaaaaaaaaaaaaaaaaaaaaacgttgactaaaaaaaaaaaaaaaaaaaaaaaaaaaaaaaaaaaaaaaaaaaaaaaaaaaaaaaaaaaaaaaaaaaaaa

SEQ ID NO: 11461 - DNA, 4703 bp, synthetic construct
  source 1..4703: mol_type = other DNA
ggtctagttacaactgggcatcgctgcagagatcgcacctcctcgtggtcccgctggtagcccttcgaagggtgactaagtcgatctctgccccaggtacggagccgttgggactcaccagtccaacgtaactcctgcctaaattcggtgaaacaaattcctcggtaaaaagccccatggcttcttgcccgaaacctggccccccggtttcagcaggggcaatgagtttggaaagtggactgaccacccactccgttctcgccatcgaacgtggtcccaattcgttggcaaattccggatcagactttgggggggggggtctggggctaccgttacgcctattgagggtatcggtcggcactcagacctcccgctccgactgggtagacctggtgtcctggagccacccaggacccacgtctaagtcccagcaggttgacctggtgtctttatttcctaaacaccgggttgacctgttatccaaaaacgaccaggtagacctggtggctcaatttttaccatctaaatttccccccaatttggcagaaaatgatttggctttgctggtgaacttagagttctacagatcggatttgcatgtgtatgagtgtgttcattttgctgcacattgggagggattaagtggtttgcctgaggtgtatgaacaacttgcaccacaaccgtgtgtgggagaaactttacattctagcctcccacgagacagtgaactgtttgtgcctgaagaggggagcagcgagaaggagagcgaggacgcgccaaaaacatctcctccgacgcctgggaaacatggtttggaacagactggggaggaaaaagtgatggtgactgttcctgacaaaaatccaccttgtccttgctgtggtacccgggtaaactctgtgttgaatctgattgaacatctgaaagtgtcacacgggaaaaggggggtttgttttcggtgtgcaaaatgtggaaaggaaaatagtaactatcacagtgttgtttgtcattttccaaaatgcaggggtccagagacggagaaagccccagctggggagtggatttgtgaggtatgcaacagagattttacaaccaaaattggcctgggacaacacaagagattggcacacccagcagtgagaaatcaggaaaggatcgttgcttcccaaccgaaagaaacatcaaatagaggtgctcacaaaaggtgctggacaaaggaggaggaagaattactaataagactggaggctcagttcgagggaaacaaaaatattaataagcttattgcagaacacataaccaccaaaacagctaagcagatcagtgacaaaaggcgattgctgtccagaaagccagcagaggagccacgtgaggagcctggaacgtgtcatcacaccaggagagcagctgcgagcctgagaacggagcctgagatgagtcatcacgcccaggcagaggacagagataatggacctgggagacgccctctgccaggcagggcagctgccggagggagaacaatggacgagataagacgccaccctgataagggcaacggacagcagagacccaccaagcaaaaatcagaagaacagctgcaggcttactataaaaagacactagaggaacgactttcagctggggcacttaacaccttcccccgagcattcaagcaggtaatggaaggccgggatataaagctagtaatcaatcagacagcgcaggactgcttcggatgcctggaatccataagccaaataagaacggcaacccgagataaaaaggacacggtgacccgggagaaacacccaaagaaaccttttcagaagtggatgaaggacagagcaatcaaaaaaggtaattatcttcggttccagcgtttattttatcttgatagagggaaactggctaaaatcattttagatgatattgaatgcttgtcttgtgacataccactcagtgaaatttattcggtttttaaaacaagatgggaaacaactggtagctttaaaagccttggggactttaaaacttacgggaaggctgacaacactgccttcagagaattaattacggctaaagaaattgagaaaaatgtgcaggaaatgagcaaaggctcggctcccggtccagacgggattactcttggggacgtcgtaaagatggatcccgagggctcccggaccatggagattttcaatttatggttaacaactggtaaaatcccggacatggtgagggggtgcagaaccgttttgattccaaaatcatcagacccggatcgtttgaaagacattaataactggagacctatcacgatcggttccatcttgctgagactgttctccaggattgtaacagctaggctgagcaaagcgtgccccctgaacccaaggcaaagaggctttatcagagcggcgggatgctctgaaaacttaaaactcctgcaaactataatttggtcggccaaaagagaacacagaccactgggtgttgtattcgtggacatcgccaaggcttttgacaccgtaagccaccagcacatcattcatgctttgcagcaaagagaggtggatccccacatcgtcggtctggtgagcaatatgtacgagaacatcagtacgtatatcaccacaaagaggaacacacacacagacaaaatccagatccgggttggagtaaagcagggtgacccgatgtcgccccttttatttaacctggcaatggaccctctattatgcaagctggaagagagtggcaaaggataccaccgaggacagagcagcatcacagcgatggcatttgcagacgatctggttttgctgagcgactcctgggaaaatatgaatacaaatattagcatactggagaccttctgcaatctgaccggactcaaaacacaggggcaaaagtgccacggcttttacatcaagccgacaaaggactcttacaccatcaatgactgcgctgcctggactatcaacggcacacccctgaacatgatcgaccccggcgaatctgagaaatacctcggcctgcagtttgacccgtggattggaatagcaaggtccggtctctccacaaaactagatttttggcttcagcggatcgatcaagcaccacttaaacctctgcagaaaactgatattctcaaaacatacaccatccctcggctgatctacatagctgaccactcagaagtgaaaactgcactactcgaaacccttgaccagaagatccggacagcggtcaaggaatggcttcacctacctccgtgcacctgcgatgccatcctgtactcgagcacgagagacggcggtttgggcatcaccaaattggcaggactgatccccagcgtgcaggcccgtagactgcatcggatcgcacagtcatctgacgatacgatgaaatgcttcatggaaaaagagaaaatggaacagctgcataagaaattgtggattcaagctggaggggacagagagaacataccctcgatttgggaagcaccaccgtcgagtgaaccaccaaacaacgtgagcacaaattcggaatgggaagcaccgacccagaaagataaatttccaaagccttgcaattggaggaaaaacgaattcaaaaaatggaccaaattggcatcccaaggccgcggaattgtaaattttgaaagagacaaaattagtaaccattggatccaatactacagacgcatacctcacaggaaactcctcactgcactacaactcagggccaacgtttaccccacgagagaatttctagccaggggtagacaagaccaatacatcaaggcgtgtaggcactgcgatgcggacattgaatcctgcgcccacatcatcggcaactgcccagtgacacaggacgcccgaatcaagaggcacaattacatctgcgaactgcttctcgaggaggcgaagaagaaggactgggtagtgttcaaggaaccgcacataagggattccaacaaggaactgtacaaacctgacctgatatttgtgaaggatgcccgtgcacttgtcgtggatgtgacagtacggtatgaagcagccaaatcatcgctggaggaagccgctgcagagaaagtgagaaagtacaaacacctggaaacggaagtaagacatctcacgaatgcaaaggacgttacttttgtgggctttcccctaggagcgcgggggaaatggcaccaagataactttaaacttttgactgagcttggcctctccaaatcgaggcaagtgaaaatggcagagactttttccacagtagcgctcttttcatctgtggacattgtacatatgtttgccagtagggccagaaaatctatggttatgtgataataggctgccttctgcggggcttgccttctggccatgcccttcttctctcccttgcacctgtacctcttggtctttgaataaagcctgagtaggaaggaccggtagacatgataagatacattgatgagtttggacaaaccacaactagaatgcagtgaaaaaaatgctttatttgtgaaatttgtgatgctattgctttatttgtaaccattataagctgcaataaacaagttaacaacaacaaaaaaaaaaaaaaaaaaaaaaaaaaaaaaacgttgactaaaaaaaaaaaaaaaaaaaaaaaaaaaaaaaaaaaaaaaaaaaaaaaaaaaaaaaaaaaaaaaaaaaaaa

SEQ ID NO: 11462 - DNA, 4703 bp, synthetic construct
  source 1..4703: mol_type = other DNA
ggtctagttacaactgggcatcgctgcagagatcgcacctcctcgtggtcccgctggtagcccttcgaagggtgactaagtcgatctctgccccaggtacggagccgttgggactcaccagtccaacgtaactcctgcctaaattcggtgaaacaaattcctcggtaaaaagccccatggcttcttgcccgaaacctggccccccggtttcagcaggggcaatgagtttggaaagtggactgaccacccactccgttctcgccatcgaacgtggtcccaattcgttggcaaattccggatcagactttgggggggggggtctggggctaccgttacgcctattgagggtatcggtcggcactcagacctcccgctccgactgggtagacctggtgtcctggagccacccaggacccacgtctaagtcccagcaggttgacctggtgtctttatttcctaaacaccgggttgacctgttatccaaaaacgaccaggtagacctggtggctcaatttttaccatctaaatttccccccaatttggcagaaaatgatttggctttgctggtgaacttagagttctacagatcggatttgcatgtgtatgagtgtgttcattttgctgcacattgggagggattaagtggtttgcctgaggtgtatgaacaacttgcaccacaaccgtgtgtgggagaaactttacattctagcctcccacgagacagtgaactgtttgtgcctgaagaggggagcagcgagaaggagagcgaggacgcgccaaaaacatctcctccgacgcctgggaaacatggtttggaacagactggggaggaaaaagtgatggtgactgttcctgacaaaaatccaccttgtccttgctgtggtacccgggtaaactctgtgttgaatctgattgaacatctgaaagtgtcacacgggaaaaggggggtttgttttcggtgtgcaaaatgtggaaaggaaaatagtaactatcacagtgttgtttgtcattttccaaaatgcaggggtccagagacggagaaagccccagctggggagtggatttgtgaggtatgcaacagagattttacaaccaaaattggcctgggacaacacaagagattggcacacccagcagtgagaaatcaggaaaggatcgttgcttcccaaccgaaagaaacatcaaatagaggtgctcacaaaaggtgctggacaaaggaggaggaagaattactaataagactggaggctcagttcgagggaaacaaaaatattaataagcttattgcagaacacataaccaccaaaacagctaagcagatcagtgacaaaaggcgattgctgtccagaaagccagcagaggagccacgtgaggagcctggaacgtgtcatcacaccaggagagcagctgcgagcctgagaacggagcctgagatgagtcatcacgcccaggcagaggacagagataatggacctgggagacgccctctgccaggcagggcagctgccggagggagaacaatggacgagataagacgccaccctgataagggcaacggacagcagagacccaccaagcaaaaatcagaagaacagctgcaggcttactataaaaagacactagaggaacgactttcagctggggcacttaacaccttcccccgagcattcaagcaggtaatggaaggccgggatataaagctagtaatcaatcagacagcgcaggactgcttcggatgcctggaatccataagccaaataagaacggcaacccgagataaaaaggacacggtgacccgggagaaacacccaaagaaaccttttcagaagtggatgaaggacagagcaatcaaaaaaggtaattatcttcggttccagcgtttattttatcttgatagagggaaactggctaaaatcattttagatgatattgaatgcttgtcttgtgacataccactcagtgaaatttattcggtttttaaaacaagatgggaaacaactggtagctttaaaagccttggggactttaaaacttacgggaaggctgacaacactgccttcagagaattaattacggctaaagaaattgagaaaaatgtgcaggaaatgagcaaaggctcggctcccggtccagacgggattactcttggggacgtcgtaaagatggatcccgagttttcccggaccatggagattttcaatttatggttaacaactggtaaaatcccggacatggtgagggggtgcagaaccgttttgattccaaaatcatcagacccggatcgtttgaaagacattaataactggagacctatcacgatcggttccatcttgctgagactgttctccaggattgtaacagctaggctgagcaaagcgtgccccctgaacccaaggcaaagaggctttatcagagcggcgggatgctctgaaaacttaaaactcctgcaaactataatttggtcggccaaaagagaacacagaccactgggtgttgtattcgtggacatcgccaaggcttttgacaccgtaagccaccagcacatcattcatgctttgcagcaaagagaggtggatccccacatcgtcggtctggtgagcaatatgtacgagaacatcagtacgtatatcaccacaaagaggaacacacacacagacaaaatccagatccgggttggagtaaagcagggtgacccgatgtcgccccttttatttaacctggcaatggaccctctattatgcaagctggaagagagtggcaaaggataccaccgaggacagagcagcatcacagcgatggcatttgcagacgatctggttttgctgagcgactcctgggaaaatatgaatacaaatattagcatactggagaccttctgcaatctgaccggactcaaaacacaggggcaaaagtgccacggcttttacatcaagccgacaaagaagtcttacaccatcaatgactgcgctgcctggactatcaacggcacacccctgaacatgatcgaccccggcgaatctgagaaatacctcggcctgcagtttgacccgtggattggaatagcaaggtccggtctctccacaaaactagatttttggcttcagcggatcgatcaagcaccacttaaacctctgcagaaaactgatattctcaaaacatacaccatccctcggctgatctacatagctgaccactcagaagtgaaaactgcactactcgaaacccttgaccagaagatccggacagcggtcaaggaatggcttcacctacctccgtgcacctgcgatgccatcctgtactcgagcacgagagacggcggtttgggcatcaccaaattggcaggactgatccccagcgtgcaggcccgtagactgcatcggatcgcacagtcatctgacgatacgatgaaatgcttcatggaaaaagagaaaatggaacagctgcataagaaattgtggattcaagctggaggggacagagagaacataccctcgatttgggaagcaccaccgtcgagtgaaccaccaaacaacgtgagcacaaattcggaatgggaagcaccgacccagaaagataaatttccaaagccttgcaattggaggaaaaacgaattcaaaaaatggaccaaattggcatcccaaggccgcggaattgtaaattttgaaagagacaaaattagtaaccattggatccaatactacagacgcatacctcacaggaaactcctcactgcactacaactcagggccaacgtttaccccacgagagaatttctagccaggggtagacaagaccaatacatcaaggcgtgtaggcactgcgatgcggacattgaatcctgcgcccacatcatcggcaactgcccagtgacacaggacgcccgaatcaagaggcacaattacatctgcgaactgcttctcgaggaggcgaagaagaaggactgggtagtgttcaaggaaccgcacataagggattccaacaaggaactgtacaaacctgacctgatatttgtgaaggatgcccgtgcacttgtcgtggatgtgacagtacggtatgaagcagccaaatcatcgctggaggaagccgctgcagagaaagtgagaaagtacaaacacctggaaacggaagtaagacatctcacgaatgcaaaggacgttacttttgtgggctttcccctaggagcgcgggggaaatggcaccaagataactttaaacttttgactgagcttggcctctccaaatcgaggcaagtgaaaatggcagagactttttccacagtagcgctcttttcatctgtggacattgtacatatgtttgccagtagggccagaaaatctatggttatgtgataataggctgccttctgcggggcttgccttctggccatgcccttcttctctcccttgcacctgtacctcttggtctttgaataaagcctgagtaggaaggaccggtagacatgataagatacattgatgagtttggacaaaccacaactagaatgcagtgaaaaaaatgctttatttgtgaaatttgtgatgctattgctttatttgtaaccattataagctgcaataaacaagttaacaacaacaaaaaaaaaaaaaaaaaaaaaaaaaaaaaaacgttgactaaaaaaaaaaaaaaaaaaaaaaaaaaaaaaaaaaaaaaaaaaaaaaaaaaaaaaaaaaaaaaaaaaaaaa

SEQ ID NO: 11463 - DNA, 4703 bp, synthetic construct
  source 1..4703: mol_type = other DNA
ggtctagttacaactgggcatcgctgcagagatcgcacctcctcgtggtcccgctggtagcccttcgaagggtgactaagtcgatctctgccccaggtacggagccgttgggactcaccagtccaacgtaactcctgcctaaattcggtgaaacaaattcctcggtaaaaagccccatggcttcttgcccgaaacctggccccccggtttcagcaggggcaatgagtttggaaagtggactgaccacccactccgttctcgccatcgaacgtggtcccaattcgttggcaaattccggatcagactttgggggggggggtctggggctaccgttacgcctattgagggtatcggtcggcactcagacctcccgctccgactgggtagacctggtgtcctggagccacccaggacccacgtctaagtcccagcaggttgacctggtgtctttatttcctaaacaccgggttgacctgttatccaaaaacgaccaggtagacctggtggctcaatttttaccatctaaatttccccccaatttggcagaaaatgatttggctttgctggtgaacttagagttctacagatcggatttgcatgtgtatgagtgtgttcattttgctgcacattgggagggattaagtggtttgcctgaggtgtatgaacaacttgcaccacaaccgtgtgtgggagaaactttacattctagcctcccacgagacagtgaactgtttgtgcctgaagaggggagcagcgagaaggagagcgaggacgcgccaaaaacatctcctccgacgcctgggaaacatggtttggaacagactggggaggaaaaagtgatggtgactgttcctgacaaaaatccaccttgtccttgctgtggtacccgggtaaactctgtgttgaatctgattgaacatctgaaagtgtcacacgggaaaaggggggtttgttttcggtgtgcaaaatgtggaaaggaaaatagtaactatcacagtgttgtttgtcattttaagaaatgcaggggtccagagacggagaaagccccagctggggagtggatttgtgaggtatgcaacagagattttacaaccaaaattggcctgggacaacacaagagattggcacacccagcagtgagaaatcaggaaaggatcgttgcttcccaaccgaaagaaacatcaaatagaggtgctcacaaaaggtgctggacaaaggaggaggaagaattactaataagactggaggctcagttcgagggaaacaaaaatattaataagcttattgcagaacacataaccaccaaaacagctaagcagatcagtgacaaaaggcgattgctgtccagaaagccagcagaggagccacgtgaggagcctggaacgtgtcatcacaccaggagagcagctgcgagcctgagaacggagcctgagatgagtcatcacgcccaggcagaggacagagataatggacctgggagacgccctctgccaggcagggcagctgccggagggagaacaatggacgagataagacgccaccctgataagggcaacggacagcagagacccaccaagcaaaaatcagaagaacagctgcaggcttactataaaaagacactagaggaacgactttcagctggggcacttaacaccttcccccgagcattcaagcaggtaatggaaggccgggatataaagctagtaatcaatcagacagcgcaggactacttcggatgcctggaatccataagccaaataagaacggcaacccgagataaaaaggacacggtgacccgggagaaacacccaaagaaaccttttcagaagtggatgaaggacagagcaatcaaaaaaggtaattatcttcggttccagcgtttattttatcttgatagagggaaactggctaaaatcattttagatgatattgaatgcttgtcttgtgacataccactcagtgaaatttattcggtttttaaaacaagatgggaaacaactggtagctttaaaagccttggggactttaaaacttacgggaaggctgacaacactgccttcagagaattaattacggctaaagaaattgagaaaaatgtgcaggaaatgagcaaaggctcggctcccggtccagacgggattactcttggggacgtcgtaaagatggatcccgagttttcccggaccatggagattttcaatttatggttaacaactggtaaaatcccggacatggtgagggggtgcagaaccgttttgattccaaaatcatcaaagccggatcgtttgaaagacattaataactggagacctatcacgatcggttccatcttgctgagactgttctccaggattgtaacagctaggctgagcaaagcgtgccccctgaacccaaggcaaagaggctttatcagagcggcgggatgctctgaaaacttaaaactcctgcaaactataatttggtcggccaaaagagaacacagaccactgggtgttgtattcgtggacatcgccaaggcttttgacaccgtaagccaccagcacatcattcatgctttgcagcaaagagaggtggatccccacatcgtcggtctggtgagcaatatgtacgagaacatcagtacgtatatcaccacaaagaggaacacacacacagacaaaatccagatccgggttggagtaaagcagggtgacccgatgtcgccccttttatttaacctggcaatggaccctctattatgcaagctggaagagagtggcaaaggataccaccgaggacagagcagcatcacagcgatggcatttgcagacgatctggttttgctgagcgactcctgggaaaatatgaatacaaatattagcatactggagaccttctgcaatctgaccggactcaaaacacaggggcaaaagtgccacggcttttacatcaagccgacaaaggactcttacaccatcaatgactgcgctgcctggactatcaacggcacacccctgaacatgatcgaccccggcgaatctgagaaatacctcggcctgcagtttgacccgtggattggaatagcaaggtccggtctctccacaaaactagatttttggcttcagcggatcgatcaagcaccacttaaacctctgcagaaaactgatattctcaaaacatacaccatccctcggctgatctacatagctgaccactcagaagtgaaaactgcactactcgaaacccttgaccagaagatccggacagcggtcaaggaatggcttcacctacctccgtgcacctgcgatgccatcctgtactcgagcacgagagacggcggtttgggcatcaccaaattggcaggactgatccccagcgtgcaggcccgtagactgcatcggatcgcacagtcatctgacgatacgatgaaatgcttcatggaaaaagagaaaatggaacagctgcataagaaattgtggattcaagctggaggggacagagagaacataccctcgatttgggaagcaccaccgtcgagtgaaccaccaaacaacgtgagcacaaattcggaatgggaagcaccgacccagaaagataaatttccaaagccttgcaattggaggaaaaacgaattcaaaaaatggaccaaattggcatcccaaggccgcggaattgtaaattttgaaagagacaaaattagtaaccattggatccaatactacagacgcatacctcacaggaaactcctcactgcactacaactcagggccaacgtttaccccacgagagaatttctagccaggggtagacaagaccaatacatcaaggcgtgtaggcactgcgatgcggacattgaatcctgcgcccacatcatcggcaactgcccagtgacacaggacgcccgaatcaagaggcacaattacatctgcgaactgcttctcgaggaggcgaagaagaaggactgggtagtgttcaaggaaccgcacataagggattccaacaaggaactgtacaaacctgacctgatatttgtgaaggatgcccgtgcacttgtcgtggatgtgacagtacggtatgaagcagccaaatcatcgctggaggaagccgctgcagagaaagtgagaaagtacaaacacctggaaacggaagtaagacatctcacgaatgcaaaggacgttacttttgtgggctttcccctaggagcgcgggggaaatggcaccaagataactttaaacttttgactgagcttggcctctccaaatcgaggcaagtgaaaatggcagagactttttccacagtagcgctcttttcatctgtggacattgtacatatgtttgccagtagggccagaaaatctatggttatgtgataataggctgccttctgcggggcttgccttctggccatgcccttcttctctcccttgcacctgtacctcttggtctttgaataaagcctgagtaggaaggaccggtagacatgataagatacattgatgagtttggacaaaccacaactagaatgcagtgaaaaaaatgctttatttgtgaaatttgtgatgctattgctttatttgtaaccattataagctgcaataaacaagttaacaacaacaaaaaaaaaaaaaaaaaaaaaaaaaaaaaaacgttgactaaaaaaaaaaaaaaaaaaaaaaaaaaaaaaaaaaaaaaaaaaaaaaaaaaaaaaaaaaaaaaaaaaaaaa

SEQ ID NO: 11464 - skipped

SEQ ID NO: 11465 - DNA, 4414 bp, synthetic construct; identical to SEQ ID NO: 10252
  source 1..4414: mol_type = other DNA

SEQ ID NO: 11466 - skipped

SEQ ID NO: 11467 - DNA, 4703 bp, synthetic construct
  source 1..4703: mol_type = other DNA
ggtctagttacaactgggcatcgctgcagagatcgcacctcctcgtggtcccgctggtagcccttcgaagggtgactaagtcgatctctgccccaggtacggagccgttgggactcaccagtccaacgtaactcctgcctaaattcggtgaaacaaattcctcggtaaaaagccccatggcttcttgcccgaaacctggccccccggtttcagcaggggcaatgagtttggaaagtggactgaccacccactccgttctcgccatcgaacgtggtcccaattcgttggcaaattccggatcagactttgggggggggggtctggggctaccgttacgcctattgagggtatcggtcggcactcagacctcccgctccgactgggtagacctggtgtcctggagccacccaggacccacgtctaagtcccagcaggttgacctggtgtctttatttcctaaacaccgggttgacctgttatccaaaaacgaccaggtagacctggtggctcaatttttaccatctaaatttccccccaatttggcagaaaatgatttggctttgctggtgaacttagagttctacagatcggatttgcatgtgtatgagtgtgttcattttgctgcacattgggagggattaagtggtttgcctgaggtgtatgaacaacttgcaccacaaccgtgtgtgggagaaactttacattctagcctcccacgagacagtgaactgtttgtgcctgaagaggggagcagcgagaaggagagcgaggacgcgccaaaaacatctcctccgacgcctgggaaacatggtttggaacagactggggaggaaaaagtgatggtgactgttcctgacaaaaatccaccttgtccttgctgtggtacccgggtaaactctgtgttgaatctgattgaacatctgaaagtgtcacacgggaaaaggggggtttgttttcggtgtgcaaaatgtggaaaggaaaatagtaactatcacagtgttgtttgtcattttaagaaatgcaggggtccagagacggagaaagccccagctggggagtggatttgtgaggtatgcaacagagattttacaaccaaaattggcctgggacaacacaagagattggcacacccagcagtgagaaatcaggaaaggatcgttgcttcccaaccgaaagaaacatcaaatagaggtgctcacaaaaggtgctggacaaaggaggaggaagaattactaataagactggaggctcagttcgagggaaacaaaaatattaataagcttattgcagaacacataaccaccaaaacagctaagcagatcagtgacaaaaggcgattgctgtccagaaagccagcagaggagccacgtgaggagcctggaacgtgtcatcacaccaggagagcagctgcgagcctgagaacggagcctgagatgagtcatcacgcccaggcagaggacagagataatggacctgggagacgccctctgccaggcagggcagctgccggagggagaacaatggacgagataagacgccaccctgataagggcaacggacagcagagacccaccaagcaaaaatcagaagaacagctgcaggcttactataaaaagacactagaggaacgactttcagctggggcacttaacaccttcccccgagcattcaagcaggtaatggaaggccgggatataaagctagtaatcaatcagacagcgcaggactacttcggatgcctggaatccataagccaaataagaacggcaacccgagataaaaaggacacggtgacccgggagaaacacccaaagaaaccttttcagaagtggatgaaggacagagcaatcaaaaaaggtaattatcttcggttccagcgtttattttatcttgatagagggaaactggctaaaatcattttagatgatattgaatgcttgtcttgtgacataccactcagtgaaatttattcggtttttaaaacaagatgggaaacaactggtagctttaaaagccttggggactttaaaacttacgggaaggctgacaacactgccttcagagaattaattacggctaaagaaattgagaaaaatgtgcaggaaatgagcaaaggctcggctcccggtccagacgggattactcttggggacgtcgtaaagatggatcccgagttttcccggaccatggagattttcaatttatggttaacaactggtaaaatcccggacatggtgagggggtgcagaaccgttttgattccaaaatcatcagacccggatcgtttgaaagacattaataactggagacctatcacgatcggttccatcttgctgagactgttctccaggattgtaacagctaggctgagcaaagcgtgccccctgaacccaaggcaaagaggctttatcagagcggcgggatgctctgaaaacttaaaactcctgcaaactataatttggtcggccaaaagagaacacagaccactgggtgttgtattcgtggacatcgccaaggcttttgacaccgtaagccaccagcacatcattcatgctttgcagcaaagagaggtggatccccacatcgtcggtctggtgagcaatatgtacgagaacatcagtacgtatatcaccacaaagaggaacacacacacagacaaaatccagatccgggttggagtaaagcagggtgacccgatgtcgccccttttatttaacctggcaatggaccctctattatgcaagctggaagagagtggcaaaggataccaccgaggacagagcagcatcacagcgatggcatttgcagacgatctggttttgctgagcgactcctgggaaaatatgaatacaaatattagcatactggagaccttctgcaatctgaccggactcaaaacacaggggcaaaagtgccacggcttttacatcaagccgacaaaggactcttacaccatcaatgactgcgctgcctggactatcaacggcacacccctgaacatgatcgaccccggcgaatctgagaaatacctcggcctgcagtttgacccgtggattggaatagcaaggtccggtctctccacaaaactagatttttggcttcagcggatcgatcaagcaccacttaaacctctgcagaaaactgatattctcaaaacatacaccatccctcggctgatctacatagctgaccactcagaagtgaaaactgcactactcgaaacccttgaccagaagatccggacagcggtcaaggaatggcttcacctacctccgtgcacctgcgatgccatcctgtactcgagcacgagagacggcggtttgggcatcaccaaattggcaggactgatccccagcgtgcaggcccgtagactgcatcggatcgcacagtcatctgacgatacgatgaaatgcttcatggaaaaagagaaaatggaacagctgcataagaaattgtggattcaagctggaggggacagagagaacataccctcgatttgggaagcaccaccgtcgagtgaaccaccaaacaacgtgagcacaaattcggaatgggaagcaccgacccagaaagataaatttccaaagccttgcaattggaggaaaaacgaattcaaaaaatggaccaaattggcatcccaaggccgcggaattgtaaattttgaaagagacaaaattagtaaccattggatccaatactacagacgcatacctcacaggaaactcctcactgcactacaactcagggccaacgtttaccccacgagagaatttctagccaggggtagacaagaccaatacatcaaggcgtgtaggcactgcgatgcggacattgaatcctgcgcccacatcatcggcaactgcccagtgacacaggacgcccgaatcaagaggcacaattacatctgcgaactgcttctcgaggaggcgaagaagaaggactgggtagtgttcaaggaaccgcacataagggattccaacaaggaactgtacaaacctgacctgatatttgtgaaggatgcccgtgcacttgtcgtggatgtgacagtacggtatgaagcagccaaatcatcgctggaggaagccgctgcagagaaagtgagaaagtacaaacacctggaaacggaagtaagacatctcacgaatgcaaaggacgttacttttgtgggctttcccctaggagcgcgggggaaatggcaccaagataactttaaacttttgactgagcttggcctctccaaatcgaggcaagtgaaaatggcagagactttttccacagtagcgctcttttcatctgtggacattgtacatatgtttgccagtagggccagaaaatctatggttatgtgataataggctgccttctgcggggcttgccttctggccatgcccttcttctctcccttgcacctgtacctcttggtctttgaataaagcctgagtaggaaggaccggtagacatgataagatacattgatgagtttggacaaaccacaactagaatgcagtgaaaaaaatgctttatttgtgaaatttgtgatgctattgctttatttgtaaccattataagctgcaataaacaagttaacaacaacaaaaaaaaaaaaaaaaaaaaaaaaaaaaaaacgttgactaaaaaaaaaaaaaaaaaaaaaaaaaaaaaaaaaaaaaaaaaaaaaaaaaaaaaaaaaaaaaaaaaaaaaa

SEQ ID NO: 11468 - DNA, 4703 bp, synthetic construct
  source 1..4703: mol_type = other DNA
ggtctagttacaactgggcatcgctgcagagatcgcacctcctcgtggtcccgctggtagcccttcgaagggtgactaagtcgatctctgccccaggtacggagccgttgggactcaccagtccaacgtaactcctgcctaaattcggtgaaacaaattcctcggtaaaaagccccatggcttcttgcccgaaacctggccccccggtttcagcaggggcaatgagtttggaaagtggactgaccacccactccgttctcgccatcgaacgtggtcccaattcgttggcaaattccggatcagactttgggggggggggtctggggctaccgttacgcctattgagggtatcggtcggcactcagacctcccgctccgactgggtagacctggtgtcctggagccacccaggacccacgtctaagtcccagcaggttgacctggtgtctttatttcctaaacaccgggttgacctgttatccaaaaacgaccaggtagacctggtggctcaatttttaccatctaaatttccccccaatttggcagaaaatgatttggctttgctggtgaacttagagttctacagatcggatttgcatgtgtatgagtgtgttcattttgctgcacattgggagggattaagtggtttgcctgaggtgtatgaacaacttgcaccacaaccgtgtgtgggagaaactttacattctagcctcccacgagacagtgaactgtttgtgcctgaagaggggagcagcgagaaggagagcgaggacgcgccaaaaacatctcctccgacgcctgggaaacatggtttggaacagactggggaggaaaaagtgatggtgactgttcctgacaaaaatccaccttgtccttgctgtggtacccgggtaaactctgtgttgaatctgattgaacatctgaaagtgtcacacgggaaaaggggggtttgttttcggtgtgcaaaatgtggaaaggaaaatagtaactatcacagtgttgtttgtcattttaagaaatgcaggggtccagagacggagaaagccccagctggggagtggatttgtgaggtatgcaacagagattttacaaccaaaattggcctgggacaacacaagagattggcacacccagcagtgagaaatcaggaaaggatcgttgcttcccaaccgaaagaaacatcaaatagaggtgctcacaaaaggtgctggacaaaggaggaggaagaattactaataagactggaggctcagttcgagggaaacaaaaatattaataagcttattgcagaacacataaccaccaaaacagctaagcagatcagtgacaaaaggcgattgctgtccagaaagccagcagaggagccacgtgaggagcctggaacgtgtcatcacaccaggagagcagctgcgagcctgagaacggagcctgagatgagtcatcacgcccaggcagaggacagagataatggacctgggagacgccctctgccaggcagggcagctgccggagggagaacaatggacgagataagacgccaccctgataagggcaacggacagcagagacccaccaagcaaaaatcagaagaacagctgcaggcttactataaaaagacactagaggaacgactttcagctggggcacttaacaccttcccccgagcattcaagcaggtaatggaaggccgggatataaagctagtaatcaatcagacagcgcaggactacttcggatgcctggaatccataagccaaataagaacggcaacccgagataaaaaggacacggtgacccgggagaaacacccaaagaaaccttttcagaagtggatgaaggacagagcaatcaaaaaaggtaattatcttcggttccagcgtttattttatcttgatagagggaaactggctaaaatcattttagatgatattgaatgcttgtcttgtgacataccactcagtgaaatttattcggtttttaaaacaagatgggaaacaactggtagctttaaaagccttggggactttaaaacttacgggaaggctgacaacactgccttcagagaattaattacggctaaagaaattgagaaaaatgtgcaggaaatgagcaaaggctcggctcccggtccagacgggattactcttggggacgtcgtaaagatggatcccgagttttcccggaccatggagattttcaatttatggttaacaactggtaaaatcccggacatggtgagggggtgcagaaccgttttgattccaaaatcatcagacccggatcgtttgaaagacattaataactggagacctatcacgatcggttccatcttgctgagactgttctccaggattgtaacagctaggctgagcaaagcgtgccccctgaacccaaggcaaagaggctttatcagagcggcgggatgctctgaaaacttaaaactcctgcaaactataatttggtcggccaaaagagaacacagaccactgggtgttgtattcgtggacatcgccaaggcttttgacaccgtaagccaccagcacatcattcatgctttgcagcaaagagaggtggatccccacatcgtcggtctggtgagcaatatgtacgagaacatcagtacgtatatcaccacaaagaggaacacacacacagacaaaatccagatccgggttggagtaaagcagggtgacccgatgtcgccccttttatttaacctggcaatggaccctctattatgcaagctggaagagagtggcaaaggataccaccgaggacagagcagcatcacagcgatggcatttgcagacgatctggttttgctgagcgactcctgggaaaatatgaatacaaatattagcatactggagaccttctgcaatctgaccggactcaaaacacaggggcaaaagtgccacggcttttacatcaagccgacaaaggactcttacaccatcaatgactgcgctgcctggactatcaacggcacacccctgaacatgatcgaccccggcgaatctgagaaatacctcggcctgcagtttgacccgtggattggaatagcaaggtccggtctctccacaaaactagatttttggcttcagcggatcgatcaagcaccacttaaacctctgcagaaaactgatattctcaaaacatacaccatccctcggctgatctacatagctgaccactcagaagtgaaaactgcactactcgaaacccttgaccagaagatccggacagcggtcaaggaatggcttcacctacctccgtgcacctgcgatgccatcctgtactcgagcacgagagacggcggtttgggcatcaccaaattggcaggactgatccccagcgtgcaggcccgtagactgcatcggatcgcacagtcatctgacgatacgatgaaatgcttcatggaaaaagagaaaatggaacagctgcataagaaattgtggattcaagctggaggggacagagagaacataccctcgatttgggaagcaccaccgtcgagtgaaccaccaaacaacgtgagcacaaattcggaatgggaagcaccgacccagaaagataaatttccaaagccttgcaattggaggaaaaacgaattcaaaaaatggaccaaattggcatcccaaggccgcggaattgtaaattttgaaagagacaaaattagtaaccattggatccaatactacagacgcatacctcacaggaaactcctcactgcactacaactcagggccaacgtttaccccacgagagaatttctagccaggggtagacaagaccaatacatcaaggcgtgtaggcactgcgatgcggacattgaatcctgcgcccacatcatcggcaactgcccagtgacacaggacgcccgaatcaagaggcacaataagatctgcgaactgcttctcgaggaggcgaagaagaaggactgggtagtgttcaaggaaccgcacataagggattccaacaaggaactgtacaaacctgacctgatatttgtgaaggatgcccgtgcacttgtcgtggatgtgacagtacggtatgaagcagccaaatcatcgctggaggaagccgctgcagagaaagtgagaaagtacaaacacctggaaacggaagtaagacatctcacgaatgcaaaggacgttacttttgtgggctttcccctaggagcgcgggggaaatggcaccaagataactttaaacttttgactgagcttggcctctccaaatcgaggcaagtgaaaatggcagagactttttccacagtagcgctcttttcatctgtggacattgtacatatgtttgccagtagggccagaaaatctatggttatgtgataataggctgccttctgcggggcttgccttctggccatgcccttcttctctcccttgcacctgtacctcttggtctttgaataaagcctgagtaggaaggaccggtagacatgataagatacattgatgagtttggacaaaccacaactagaatgcagtgaaaaaaatgctttatttgtgaaatttgtgatgctattgctttatttgtaaccattataagctgcaataaacaagttaacaacaacaaaaaaaaaaaaaaaaaaaaaaaaaaaaaaacgttgactaaaaaaaaaaaaaaaaaaaaaaaaaaaaaaaaaaaaaaaaaaaaaaaaaaaaaaaaaaaaaaaaaaaaaa

SEQ ID NO: 11469 - skipped

SEQ ID NO: 11470 - DNA, 4703 bp, synthetic construct
  source 1..4703: mol_type = other DNA
ggtctagttacaactgggcatcgctgcagagatcgcacctcctcgtggtcccgctggtagcccttcgaagggtgactaagtcgatctctgccccaggtacggagccgttgggactcaccagtccaacgtaactcctgcctaaattcggtgaaacaaattcctcggtaaaaagccccatggcttcttgcccgaaacctggccccccggtttcagcaggggcaatgagtttggaaagtggactgaccacccactccgttctcgccatcgaacgtggtcccaattcgttggcaaattccggatcagactttgggggggggggtctggggggcccgttacgcctattgagggtatcggtcggcactcagacctcccgctccgactgggtagacctggtgtcctggagccacccaggacccacgtctaagtcccagcaggttgacctggtgtctttatttcctaaacaccgggttgacctgttatccaaaaacgaccaggtagacctggtggctcaatttttaccatctaaatttccccccaatttggcagaaaatgatttggctttgctggtgaacttagagttctacagatcggatttgcatgtgtatgagtgtgttcattttgctgcacattgggagggattaagtggtttgcctgaggtgtatgaacaacttgcaccacaaccgtgtgtgggagaaactttacattctagcctcccacgagacagtgaactgtttgtgcctgaagaggggagcagcgagaaggagagcgaggacgcgccaaaaacatctcctccgacgcctgggaaacatggtttggaacagactggggaggaaaaagtgatggtgactgttcctgacaaaaatccaccttgtccttgctgtggtacccgggtaaactctgtgttgaatctgattgaacatctgaaagtgtcacacgggaaaaggggggtttgttttcggtgtgcaaaatgtggaaaggaaaatagtaactatcacagtgttgtttgtcattttaagaaatgcaggggtccagagacggagaaagccccagctggggagtggatttgtgaggtatgcaacagagattttacaaccaaaattggcctgggacaacacaagagattggcacacccagcagtgagaaatcaggaaaggatcgttgcttcccaaccgaaagaaacatcaaatagaggtgctcacaaaaggtgctggacaaaggaggaggaagaattactaataagactggaggctcagttcgagggaaacaaaaatattaataagcttattgcagaacacataaccaccaaaacagctaagcagatcagtgacatgaggcgattgctgtccagaaagccagcagaggagccacgtgaggagcctggaacgtgtcatcacaccaggagagcagctgcgagcctgagaacggagcctgagatgagtcatcacgcccaggcagaggacagagataatggacctgggagacgccctctgccaggcagggcagctgccggagggagaacaatggacgagataagacgccaccctgataagggcaacggacagcagagacccaccaagcaaaaatcagaagaacagctgcaggcttactataaaaagacactagaggaacgactttcagctggggcacttaacaccttcccccgagcattcaagcaggtaatggaaggccgggatataaagctagtaatcaatcagacagcgcaggactgcttcggatgcctggaatccataagccaaataagaacggcaacccgagataaaaaggacacggtgacccgggagaaacacccaaagaaaccttttcagaagtggatgaaggacagagcaatcaaaaaaggtaattatcttcggttccagcgtttattttatcttgatagagggaaactggctaaaatcattttagatgatattgaatgcttgtcttgtgacataccactcagtgaaatttattcggtttttaaaacaagatgggaaacaactggtagctttaaaagccttggggactttaaaacttacgggaaggctgacaacactgccttcagagaattaattacggctaaagaaattgagaaaaatgtgcaggaaatgagcaaaggctcggctcccggtccagacgggattactcttggggacgtcgtaaagatggatcccgagttttcccggaccatggagattttcaatttatggttaacaactggtaaaatcccggacatggtgagggggtgcagaaccgttttgattccaaaatcatcaaagccggatcgtttgaaagacattaataactggagacctatcacgatcggttccatcttgctgagactgttctccaggattgtaacagctaggctgagcaaagcgtgccccctgaacccaaggcaaagaggctttatcagagcggcgggatgctctgaaaacttaaaactcctgcaaactataatttggtcggccaaaagagaacacagaccactgggtgttgtattcgtggacatcgccaaggcttttgacaccgtaagccaccagcacatcattcatgctttgcagcaaagagaggtggatccccacatcgtcggtctggtgagcaatatgtacgagaacatcagtacgtatatcaccacaaagaggaacacacacacagacaaaatccagatccgggttggagtaaagcagggtgacccgatgtcgccccttttatttaacctggcaatggaccctctattatgcaagctggaagagagtggcaaaggataccaccgaggacagagcagcatcacagcgatggcatttgcagacgatctggttttgctgagcgactcctgggaaaatatgaatacaaatattagcatactggagaccttctgcaatctgaccggactcaaaacacaggggcaaaagtgccacggcttttacatcaagccgacaaaggactcttacaccatcaatgactgcgctgcctggactatcaacggcacacccctgaacatgatcgaccccggcgaatctgagaaatacctcggcctgcagtttgacccgtggattggaatagcaaggtccggtctctccacaaaactagatttttggcttcagcggatcgatcaagcaccacttaaacctctgcagaaaactgatattctcaaaacatacaccatccctcggctgatctacatagctgaccactcagaagtgaaaactgcactactcgaaacccttgaccagaagatccggacagcggtcaaggaatggcttcacctacctccgtgcacctgcgatgccatcctgtactcgagcacgagagacggcggtttgggcatcaccaaattggcaggactgatccccagcgtgcaggcccgtagactgcatcggatcgcacagtcatctgacgatacgatgaaatgcttcatggaaaaagagaaaatggaacagctgcataagaaattgtggattcaagctggaggggacagagagaacataccctcgatttgggaagcaccaccgtcgagtgaaccaccaaacaacgtgagcacaaattcggaatgggaagcaccgacccagaaagataaatttccaaagccttgcaattggaggaaaaacgaattcaaaaaatggaccaaattggcatcccaaggccgcggaattgtaaattttgaaagagacaaaattagtaaccattggatccaatactacagacgcatacctcacaggaaactcctcactgcactacaactcagggccaacgtttaccccacgagagaatttctagccaggggtagacaagaccaatacatcaaggcgtgtaggcactgcgatgcggacattgaatcctgcgcccacatcatcggcaactgcccagtgacacaggacgcccgaatcaagaggcacaattacatctgcgaactgcttctcgaggaggcgaagaagaaggactgggtagtgttcaaggaaccgcacataagggattccaacaaggaactgtacaaacctgacctgatatttgtgaaggatgcccgtgcacttgtcgtggatgtgacagtacggtatgaagcagccaaatcatcgctggaggaagccgctgcagagaaagtgagaaagtacaaacacctggaaacggaagtaagacatctcacgaatgcaaaggacgttacttttgtgggctttcccctaggagcgcgggggaaatggcaccaagataactttaaacttttgactgagcttggcctctccaaatcgaggcaagtgaaaatggcagagactttttccacagtagcgctcttttcatctgtggacattgtacatatgtttgccagtagggccagaaaatctatggttatgtgataataggctgccttctgcggggcttgccttctggccatgcccttcttctctcccttgcacctgtacctcttggtctttgaataaagcctgagtaggaaggaccggtagacatgataagatacattgatgagtttggacaaaccacaactagaatgcagtgaaaaaaatgctttatttgtgaaatttgtgatgctattgctttatttgtaaccattataagctgcaataaacaagttaacaacaacaaaaaaaaaaaaaaaaaaaaaaaaaaaaaaacgttgactaaaaaaaaaaaaaaaaaaaaaaaaaaaaaaaaaaaaaaaaaaaaaaaaaaaaaaaaaaaaaaaaaaaaaa

SEQ ID NO: 11471 - DNA, 4703 bp, synthetic construct
  source 1..4703: mol_type = other DNA
ggtctagttacaactgggcatcgctgcagagatcgcacctcctcgtggtcccgctggtagcccttcgaagggtgactaagtcgatctctgccccaggtacggagccgttgggactcaccagtccaacgtaactcctgcctaaattcggtgaaacaaattcctcggtaaaaagccccatggcttcttgcccgaaacctggccccccggtttcagcaggggcaatgagtttggaaagtggactgaccacccactccgttctcgccatcgaacgtggtcccaattcgttggcaaattccggatcagactttgggggggggggtctggggggcccgttacgcctattgagggtatcggtcggcactcagacctcccgctccgactgggtagacctggtgtcctggagccacccaggacccacgtctaagtcccagcaggttgacctggtgtctttatttcctaaacaccgggttgacctgttatccaaaaacgaccaggtagacctggtggctcaatttttaccatctaaatttccccccaatttggcagaaaatgatttggctttgctggtgaacttagagttctacagatcggatttgcatgtgtatgagtgtgttcattttgctgcacattgggagggattaagtggtttgcctgaggtgtatgaacaacttgcaccacaaccgtgtgtgggagaaactttacattctagcctcccacgagacagtgaactgtttgtgcctgaagaggggagcagcgagaaggagagcgaggacgcgccaaaaacatctcctccgacgcctgggaaacatggtttggaacagactggggaggaaaaagtgatggtgactgttcctgacaaaaatccaccttgtccttgctgtggtacccgggtaaactctgtgttgaatctgattgaacatctgaaagtgtcacacgggaaaaggggggtttgttttcggtgtgcaaaatgtggaaaggaaaatagtaactatcacagtgttgtttgtcattttaagaaatgcaggggtccagagacggagaaagccccagctggggagtggatttgtgaggtatgcaacagagattttacaaccaaaattggcctgggacaacacaagagattggcacacccagcagtgagaaatcaggaaaggatcgttgcttcccaaccgaaagaaacatcaaatagaggtgctcacaaaaggtgctggacaaaggaggaggaagaattactaataagactggaggctcagttcgagggaaacaaaaatattaataagcttattgcagaacacataaccaccaaaacagctaagcagatcagtgacatgaggcgattgctgtccagaaagccagcagaggagccacgtgaggagcctggaacgtgtcatcacaccaggagagcagctgcgagcctgagaacggagcctgagatgagtcatcacgcccaggcagaggacagagataatggacctgggagacgccctctgccaggcagggcagctgccggagggagaacaatggacgagataagacgccaccctgataagggcaacggacagcagagacccaccaagcaaaaatcagaagaacagctgcaggcttactataaaaagacactagaggaacgactttcagctggggcacttaacaccttcccccgagcattcaagcaggtaatggaaggccgggatataaagctagtaatcaatcagacagcgcaggactacttcggatgcctggaatccataagccaaataagaacggcaacccgagataaaaaggacacggtgacccgggagaaacacccaaagaaaccttttcagaagtggatgaaggacagagcaatcaaaaaaggtaattatcttcggttccagcgtttattttatcttgatagagggaaactggctaaaatcattttagatgatattgaatgcttgtcttgtgacataccactcagtgaaatttattcggtttttaaaacaagatgggaaacaactggtagctttaaaagccttggggactttaaaacttacgggaaggctgacaacactgccttcagagaattaattacggctaaagaaattgagaaaaatgtgcaggaaatgagcaaaggctcggctcccggtccagacgggattactcttggggacgtcgtaaagatggatcccgagttttcccggaccatggagattttcaatttatggttaacaactggtaaaatcccggacatggtgagggggtgcagaaccgttttgattccaaaatcatcaaagccggatcgtttgaaagacattaataactggagacctatcacgatcggttccatcttgctgagactgttctccaggattgtaacagctaggctgagcaaagcgtgccccctgaacccaaggcaaagaggctttatcagagcggcgggatgctctgaaaacttaaaactcctgcaaactataatttggtcggccaaaagagaacacagaccactgggtgttgtattcgtggacatcgccaaggcttttgacaccgtaagccaccagcacatcattcatgctttgcagcaaagagaggtggatccccacatcgtcggtctggtgagcaatatgtacgagaacatcagtacgtatatcaccacaaagaggaacacacacacagacaaaatccagatccgggttggagtaaagcagggtgacccgatgtcgccccttttatttaacctggcaatggaccctctattatgcaagctggaagagagtggcaaaggataccaccgaggacagagcagcatcacagcgatggcatttgcagacgatctggttttgctgagcgactcctgggaaaatatgaatacaaatattagcatactggagaccttctgcaatctgaccggactcaaaacacaggggcaaaagtgccacggcttttacatcaagccgacaaaggactcttacaccatcaatgactgcgctgcctggactatcaacggcacacccctgaacatgatcgaccccggcgaatctgagaaatacctcggcctgcagtttgacccgtggattggaatagcaaggtccggtctctccacaaaactagatttttggcttcagcggatcgatcaagcaccacttaaacctctgcagaaaactgatattctcaaaacatacaccatccctcggctgatctacatagctgaccactcagaagtgaaaactgcactactcgaaacccttgaccagaagatccggacagcggtcaaggaatggcttcacctacctccgtgcacctgcgatgccatcctgtactcgagcacgagagacggcggtttgggcatcaccaaattggcaggactgatccccagcgtgcaggcccgtagactgcatcggatcgcacagtcatctgacgatacgatgaaatgcttcatggaaaaagagaaaatggaacagctgcataagaaattgtggattcaagctggaggggacagagagaacataccctcgatttgggaagcaccaccgtcgagtgaaccaccaaacaacgtgagcacaaattcggaatgggaagcaccgacccagaaagataaatttccaaagccttgcaattggaggaaaaacgaattcaaaaaatggaccaaattggcatcccaaggccgcggaattgtaaattttgaaagagacaaaattagtaaccattggatccaatactacagacgcatacctcacaggaaactcctcactgcactacaactcagggccaacgtttaccccacgagagaatttctagccaggggtagacaagaccaatacatcaaggcgtgtaggcactgcgatgcggacattgaatcctgcgcccacatcatcggcaactgcccagtgacacaggacgcccgaatcaagaggcacaattacatctgcgaactgcttctcgaggaggcgaagaagaaggactgggtagtgttcaaggaaccgcacataagggattccaacaaggaactgtacaaacctgacctgatatttgtgaaggatgcccgtgcacttgtcgtggatgtgacagtacggtatgaagcagccaaatcatcgctggaggaagccgctgcagagaaagtgagaaagtacaaacacctggaaacggaagtaagacatctcacgaatgcaaaggacgttacttttgtgggctttcccctaggagcgcgggggaaatggcaccaagataactttaaacttttgactgagcttggcctctccaaatcgaggcaagtgaaaatggcagagactttttccacagtagcgctcttttcatctgtggacattgtacatatgtttgccagtagggccagaaaatctatggttatgtgataataggctgccttctgcggggcttgccttctggccatgcccttcttctctcccttgcacctgtacctcttggtctttgaataaagcctgagtaggaaggaccggtagacatgataagatacattgatgagtttggacaaaccacaactagaatgcagtgaaaaaaatgctttatttgtgaaatttgtgatgctattgctttatttgtaaccattataagctgcaataaacaagttaacaacaacaaaaaaaaaaaaaaaaaaaaaaaaaaaaaaacgttgactaaaaaaaaaaaaaaaaaaaaaaaaaaaaaaaaaaaaaaaaaaaaaaaaaaaaaaaaaaaaaaaaaaaaaa

SEQ ID NO: 11472 - DNA, 4439 bp, synthetic construct
  source 1..4439: mol_type = other DNA
gaaataagagagaaaagaagagtaagaagaaatataagagaattcgccaccatggcttcttgcccgaaacctggccccccggtttcagcaggggcaatgagtttggaaagtggactgaccacccactccgttctcgccatcgaacgtggtcccaattcgttggcaaattccggatcagactttgggggggggggtctggggctaccgttacgcctattgagggtatcggtcggcactcagacctcccgctccgactgggtagacctggtgtcctggagccacccaggacccacgtctaagtcccagcaggttgacctggtgtctttatttcctaaacaccgggttgacctgttatccaaaaacgaccaggtagacctggtggctcaatttttaccatctaaatttccccccaatttggcagaaaatgatttggctttgctggtgaacttagagttctacagatcggatttgcatgtgtatgagtgtgttcattttgctgcacattgggagggattaagtggtttgcctgaggtgtatgaacaacttgcaccacaaccgtgtgtgggagaaactttacattctagcctcccacgagacagtgaactgtttgtgcctgaagaggggagcagcgagaaggagagcgaggacgcgccaaaaacatctcctccgacgcctgggaaacatggtttggaacagactggggaggaaaaagtgatggtgactgttcctgacaaaaatccaccttgtccttgctgtggtacccgggtaaactctgtgttgaatctgattgaacatctgaaagtgtcacacgggaaaaggggggtttgttttcggtgtgcaaaatgtggaaaggaaaatagtaactatcacagtgttgtttgtcattttaagaaatgcaggggtccagagacggagaaagccccagctggggagtggatttgtgaggtatgcaacagagattttacaaccaaaattggcctgggacaacacaagagattggcacacccagcagtgagaaatcaggaaaggatcgttgcttcccaaccgaaagaaacatcaaatagaggtgctcacaaaaggtgctggacaaaggaggaggaagaattactaataagactggaggctcagttcgagggaaacaaaaatattaataagcttattgcagaacacataaccaccaaaacagctaagcagatcagtgacaaaaggcgattgctgtccagaaagccagcagaggagccacgtgaggagcctggaacgtgtcatcacaccaggagagcagctgcgagcctgagaacggagcctgagatgagtcatcacgcccaggcagaggacagagataatggacctgggagacgccctctgccaggcagggcagctgccggagggagaacaatggacgagataagacgccaccctgataagggcaacggacagcagagacccaccaagcaaaaatcagaagaacagctgcaggcttactataaaaagacactagaggaacgactttcagctggggcacttaacaccttcccccgagcattcaagcaggtaatggaaggccgggatataaagctagtaatcaatcagacagcgcaggactgcttcggatgcctggaatccataagccaaataagaacggcaacccgagataaaaaggacacggtgacccgggagaaacacccaaagaaaccttttcagaagtggatgaagaagagagcaatcaaaaaaggtaattatcttcggttccagcgtttattttatcttgatagagggaaactggctaaaatcattttagatgatattgaatgcttgtcttgtgacataccactcagtgaaatttattcggtttttaaaacaagatgggaaacaactggtagctttaaaagccttggggactttaaaacttacgggaaggctgacaacactgccttcagagaattaattacggctaaagaaattgagaaaaatgtgcaggaaatgagcaaaggctcggctcccggtccagacgggattactcttggggacgtcgtaaagatggatcccgagttttcccggaccatggagattttcaatttatggttaacaactggtaaaatcccggacatggtgagggggtgcagaaccgttttgattccaaaatcatcaaagccggatcgtttgaaagacattaataactggagacctatcacgatcggttccatcttgctgagactgttctccaggattgtaacagctaggctgagcaaagcgtgccccctgaacccaaggcaaagaggctttatcagagcggcgggatgctctgaaaacttaaaactcctgcaaactataatttggtcggccaaaagagaacacagaccactgggtgttgtattcgtggacatcgccaaggcttttgacaccgtaagccaccagcacatcattcatgctttgcagcaaagagaggtggatccccacatcgtcggtctggtgagcaatatgtacgagaacatcagtacgtatatcaccacaaagaggaacacacacacagacaaaatccagatccgggttggagtaaagcagggtgacccgatgtcgccccttttatttaacctggcaatggaccctctattatgcaagctggaagagagtggcaaaggataccaccgaggacagagcagcatcacagcgatggcatttgcagacgatctggttttgctgagcgactcctgggaaaatatgaatacaaatattagcatactggagaccttctgcaatctgaccggactcaaaacacaggggcaaaagtgccacggcttttacatcaagccgacaaaggactcttacaccatcaatgactgcgctgcctggactatcaacggcacacccctgaacatgatcgaccccggcgaatctgagaaatacctcggcctgcagtttgacccgtggattggaatagcaaggtccggtctctccacaaaactagatttttggcttcagcggatcgatcaagcaccacttaaacctctgcagaaaactgatattctcaaaacatacaccatccctcggctgatctacatagctgaccactcagaagtgaaaagcgcactactcgaaacccttgaccagaagatccggacagcggtcaaggaatggcttcacctacctccgtgcacctgcgatgccatcctgtactcgagcacgagagacggcggtttgggcatcaccaaattggcaggactgatccccagcgtgcaggcccgtagactgcatcggatcgcacagtcatctgacgatacgatgaaatgcttcatggaaaaagagaaaatggaacagctgcataagaaattgtggattcaagctggaggggacagagagaacataccctcgatttgggaagcaccaccgtcgagtgaaccaccaaacaacgtgagcacaaattcggaatgggaagcaccgacccagaaagataaatttccaaagccttgcaattggaggaaaaacgaattcaaaaaatggaccaaattggcatcccaaggccgcggaattgtaaattttgaaagagacaaaattagtaaccattggatccaatactacagacgcatacctcacaggaaactcctcactgcactacaactcagggccaacgtttaccccacgagagaatttctagccaggggtagacaagaccaatacatcaaggcgtgtaggcactgcgatgcggacaacgaatcctgcgcccacatcatcggcaactgcccagtgacacaggacgcccgaatcaagaggcacaattacatctgcgaactgcttctcgaggaggcgaagaagaaggactgggtagtgttcaaggaaccgcacataagggattccaacaaggaactgtacaaacctgacctgatatttgtgaaggatgcccgtgcacttgtcgtggatgtgacagtacggtatgaagcagccaaatcatcgctggaggaagccgctgcagagaaagtgagaaagtacaaacacctggaaacggaagtaagacatctcacgaatgcaaaggacgttacttttgtgggctttcccctaggagcgcgggggaaatggcaccaagataactttaaacttttgactgagcttggcctctccaaatcgaggcaagtgaaaatggcagagactttttccacagtagcgctcttttcatctgtggacattgtacatatgtttgccagtagggccagaaaatctatggttatgtgataataggctgccttctgcggggcttgccttctggccatgcccttcttctctcccttgcacctgtacctcttggtctttgaataaagcctgagtaggaaggaccggtaaaaaaaaaaaaaaaaaaaaaaaaaaaaaaacgttgactaaaaaaaaaaaaaaaaaaaaaaaaaaaaaaaaaaaaaaaaaaaaaaaaaaaaaaaaaaaaaaaaaaaaaa

SEQ ID NO: 11473 - DNA, 5144 bp, synthetic construct
  source 1..5144: mol_type = other DNA
gaaataagagagaaaagaagagtaagaagaaatataagagaattcgccaccatggcccctaagaaaaagagaaaggtggtgaccgtgaagttcaagtacaagggcgaggaaaaggaagtggacatcagcaagatcaagaaggtctggcgggtgggcaagatgatcagctttacctacgacgataacggcaagacaggcagaggcgccgtgtccgagaaggacgcccctaaagagctgctgcagatgctggaaaaaagcggctctgagacacctggaacaagcgagagcgccaccccggaatccaatatcagcggctctagctgcggcagccccaacagcgccgacaccagcagcgacttcaaggacctgtggaccaagctgaaggaatgccacgaccgggaagtgcagggactccaggtgaaggtcaccaaactcaagcaagaaagaatcctggacgcccagagactggaagaattcttcaccaagaaccagcagctgagagagcagcagaaagtgctgcacgagacaatcaaggttctggaagatagactgcgggccggcctgtgcgacagatgcgccgtgaccgaggaacacatgcgcaaaaagcagcaggagttcgagaacattagacagcaaaatctgaaattgatcacagagctgatgaacgagagaaacacactgcaggaggagaacaagaagctgagcgagcagctgcaacagaagatcgagaatgatcagcaacaccaggccgctgagctggaatgtgaagaggacgtgatccccgacagcccaatcacagctttcagcttttctggcgtgaacagactgaggcggaaggaaaacccccacgtgcggtacatcgagcagacccataccaagctggaacacagcgtgtgtgccaacgagatgagaaaggtgtccaagtcctccacccatccccagcacaaccctaacgaaaatgagatcctggtggctgatacctacgaccagtctcagagccctatggccaaggcccacggcaccagctcttatacccctgataagagctccttcaacctggccaccgtggtggccgagacactgggcctgggcgtgcaggaggaaagcgagacacagggcccaatgagccctctgggagatgagctgtaccactgcctggaaggcaaccacaagaaacagccttttgagtccggctccgagactcctggaacaagcgagagcgctacacctgagggcagctatgaacaacttgcaccacaaccgtgtgtgggagaaactttacattctagcctcccacgagacagtgaactgtttgtgcctgaagaggggagcagcgagaaggagagcgaggacgcgccaaaaacatctcctccgacgcctgggaaacatggtttggaacagactggggaggaaaaagtgatggtgactgttcctgacaaaaatccaccttgtccttgctgtggtacccgggtaaactctgtgttgaatctgattgaacatctgaaagtgtcacacgggaaaaggggggtttgttttcggtgtgcaaaatgtggaaaggaaaatagtaactatcacagtgttgtttgtcattttaagaaatgcaggggtccagagacggagaaagccccagctggggagtggatttgtgaggtatgcaacagagattttacaaccaaaattggcctgggacaacacaagagattggcacacccagcagtgagaaatcaggaaaggatcgttgcttcccaaccgaaagaaacatcaaatagaggtgctcacaaaaggtgctggacaaaggaggaggaagaattactaataagactggaggctcagttcgagggaaacaaaaatattaataagcttattgcagaacacataaccaccaaaacagctaagcagatcagtgacaaaaggcgattgctgtccagaaagccagcagaggagccacgtgaggagcctggaacgtgtcatcacaccaggagagcagctgcgagcctgagaacggagcctgagatgagtcatcacgcccaggcagaggacagagataatggacctgggagacgccctctgccaggcagggcagctgccggagggagaacaatggacgagataagacgccaccctgataagggcaacggacagcagagacccaccaagcaaaaatcagaagaacagctgcaggcttactataaaaagacactagaggaacgactttcagctggggcacttaacaccttcccccgagcattcaagcaggtaatggaaggccgggatataaagctagtaatcaatcagacagcgcaggactgcttcggatgcctggaatccataagccaaataagaacggcaacccgagataaaaaggacacggtgacccgggagaaacacccaaagaaaccttttcagaagtggatgaagaagagagcaatcaaaaaaggtaattatcttcggttccagcgtttattttatcttgatagagggaaactggctaaaatcattttagatgatattgaatgcttgtcttgtgacataccactcagtgaaatttattcggtttttaaaacaagatgggaaacaactggtagctttaaaagccttggggactttaaaacttacgggaaggctgacaacactgccttcagagaattaattacggctaaagaaattgagaaaaatgtgcaggaaatgagcaaaggctcggctcccggtccagacgggattactcttggggacgtcgtaaagatggatcccgagttttcccggaccatggagattttcaatttatggttaacaactggtaaaatcccggacatggtgagggggtgcagaaccgttttgattccaaaatcatcagacccggatcgtttgaaagacattaataactggagacctatcacgatcggttccatcttgctgagactgttctccaggattgtaacagctaggctgagcaaagcgtgccccctgaacccaaggcaaagaggctttatcagagcggcgggatgctctgaaaacttaaaactcctgcaaactataatttggtcggccaaaagagaacacagaccactgggtgttgtattcgtggacatcgccaaggcttttgacaccgtaagccaccagcacatcattcatgctttgcagcaaagagaggtggatccccacatcgtcggtctggtgagcaatatgtacgagaacatcagtacgtatatcaccacaaagaggaacacacacacagacaaaatccagatccgggttggagtaaagcagggtgacccgatgtcgccccttttatttaacctggcaatggaccctctattatgcaagctggaagagagtggcaaaggataccaccgaggacagagcagcatcacagcgatggcatttgcagacgatctggttttgctgagcgactcctgggaaaatatgaatacaaatattagcatactggagaccttctgcaatctgaccggactcaaaacacaggggcaaaagtgccacggcttttacatcaagccgacaaaggactcttacaccatcaatgactgcgctgcctggactatcaacggcacacccctgaacatgatcgaccccggcgaatctgagaaatacctcggcctgcagtttgacccgtggattggaatagcaaggtccggtctctccacaaaactagatttttggcttcagcggatcgatcaagcaccacttaaacctctgcagaaaactgatattctcaaaacatacaccatccctcggctgatctacatagctgaccactcagaagtgaaaagcgcactactcgaaacccttgaccagaagatccggacagcggtcaaggaatggcttcacctacctccgtgcacctgcgatgccatcctgtactcgagcacgagagacggcggtttgggcatcaccaaattggcaggactgatccccagcgtgcaggcccgtagactgcatcggatcgcacagtcatctgacgatacgatgaaatgcttcatggaaaaagagaaaatggaacagctgcataagaaattgtggattcaagctggaggggacagagagaacataccctcgatttgggaagcaccaccgtcgagtgaaccaccaaacaacgtgagcacaaattcggaatgggaagcaccgacccagaaagataaatttccaaagccttgcaattggaggaaaaacgaattcaaaaaatggaccaaattggcatcccaaggccgcggaattgtaaattttgaaagagacaaaattagtaaccattggatccaatactacagacgcatacctcacaggaaactcctcactgcactacaactcagggccaacgtttaccccacgagagaatttctagccaggggtagacaagaccaatacatcaaggcgtgtaggcactgcgatgcggacaacgaatcctgcgcccacatcatcggcaactgcccagtgacacaggacgcccgaatcaagaggcacaattacatctgcgaactgcttctcgaggaggcgaagaagaaggactgggtagtgttcaaggaaccgcacataagggattccaacaaggaactgtacaaacctgacctgatatttgtgaaggatgggcgtgcacttgtcgtggatgtgacagtacggtatgaagcagccaaatcatcgctggaggaagccgctgcagagaaagtgagaaagtacaaacacctggaaacggaagtaagacatctcacgaatgcaaaggacgttacttttgtgggctttcccctaggagcgcgggggaaatggcaccaagataactttaaacttttgactgagcttggcctctccaaatcgaggcaagtgaaaatggcagagactttttccacagtagcgctcttttcatctgtggacattgtacatatgtttgccagtagggccagaaaatctatggttatgtgataataggctgccttctgcggggcttgccttctggccatgcccttcttctctcccttgcacctgtacctcttggtctttgaataaagcctgagtaggaaggaccggtaaaaaaaaaaaaaaaaaaaaaaaaaaaaaaacgttgactaaaaaaaaaaaaaaaaaaaaaaaaaaaaaaaaaaaaaaaaaaaaaaaaaaaaaaaaaaaaaaaaaaaaaa

SEQ ID NO: 11474 - DNA, 4439 bp, synthetic construct
  source 1..4439: mol_type = other DNA
gaaataagagagaaaagaagagtaagaagaaatataagagaattcgccaccatggcttcttgcccgaaacctggccccccggtttcagcaggggcaatgagtttggaaagtggactgaccacccactccgttctcgccatcgaacgtggtcccaattcgttggcaaattccggatcagactttgggggggggggtctggggctaccgttacgcctattgagggtatcggtcggcactcagacctcccgctccgactgggtagacctggtgtcctggagccacccaggacccacgtctaagtcccagcaggttgacctggtgtctttatttcctaaacaccgggttgacctgttatccaaaaacgaccaggtagacctggtggctcaatttttaccatctaaatttccccccaatttggcagaaaatgatttggctttgctggtgaacttagagttctacagatcggatttgcatgtgtatgagtgtgttcattttgctgcacattgggagggattaagtggtttgcctgaggtgtatgaacaacttgcaccacaaccgtgtgtgggagaaactttacattctagcctcccacgagacagtgaactgtttgtgcctgaagaggggagcagcgagaaggagagcgaggacgcgccaaaaacatctcctccgacgcctgggaaacatggtttggaacagactggggaggaaaaagtgatggtgactgttcctgacaaaaatccaccttgtccttgctgtggtacccgggtaaactctgtgttgaatctgattgaacatctgaaagtgtcacacgggaaaaggggggtttgttttcggtgtgcaaaatgtggaaaggaaaatagtaactatcacagtgttgtttgtcattttaagaaatgcaggggtccagagacggagaaagccccagctggggagtggatttgtgaggtatgcaacagagattttacaaccaaaattggcctgggacaacacaagagattggcacacccagcagtgagaaatcaggaaaggatcgttgcttcccaaccgaaagaaacatcaaatagaggtgctcacaaaaggtgctggacaaaggaggaggaagaattactaataagactggaggctcagttcgagggaaacaaaaatattaataagcttattgcagaacacataaccaccaaaacagctaagcagatcagtgacaaaaggcgattgctgtccagaaagccagcagaggagccacgtgaggagcctggaacgtgtcatcacaccaggagagcagctgcgagcctgagaacggagcctgagatgagtcatcacgcccaggcagaggacagagataatggacctgggagacgccctctgccaggcagggcagctgccggagggagaacaatggacgagataagacgccaccctgataagggcaacggacagcagagacccaccaagcaaaaatcagaagaacagctgcaggcttactataaaaagacactagaggaacgactttcagctggggcacttaacaccttcccccgagcattcaagcaggtaatggaaggccgggatataaagctagtaatcaatcagacagcgcaggactgcttcggatgcctggaatccataagccaaataagaacggcaacccgagataaaaaggacacggtgacccgggagaaacacccaaagaaaccttttcagaagtggatgaagaagagagcaatcaaaaaaggtaattatcttcggttccagcgtttattttatcttgatagagggaaactggctaaaatcattttagatgatattgaatgcttgtcttgtgacataccactcagtgaaatttattcggtttttaaaacaagatgggaaacaactggtagctttaaaagccttggggactttaaaacttacgggaaggctgacaacactgccttcagagaattaattacggctaaagaaattgagaaaaatgtgcaggaaatgagcaaaggctcggctcccggtccagacgggattactcttggggacatcaagaagatggatcccgagttttcccggaccatggagattttcaatttatggttaacaactggtaaaatcccggacatggtgagggggtgcagaaccgttttgattccaaaatcatcaaagccggatcgtttgaaagacattaataactggagacctatcacgatcggttccatcttgctgagactgttctccaggattgtaacagctaggctgagcaaagcgtgccccctgaacccaaggcaaagaggctttatcagagcggcgggatgctctgaaaacttaaaactcctgcaaactataatttggtcggccaaaagagaacacagaccactgggtgttgtattcgtggacatcgccaaggcttttgacaccgtaagccaccagcacatcattcatgctttgcagcaaagagaggtggatccccacatcgtcggtctggtgagcaatatgtacgagaacatcagtacgtatatcaccacaaagaggaacacacacacagacaaaatccagatccgggttggagtaaagcagggtgacccgatgtcgccccttttatttaacctggcaatggaccctctattatgcaagctggaagagagtggcaaaggataccaccgaggacagagcagcatcacagcgatggcatttgcagacgatctggttttgctgagcgactcctgggaaaatatgaatacaaatattagcatactggagaccttctgcaatctgaccggactcaaaacacaggggcaaaagtgccacggcttttacatcaagccgacaaaggactcttacaccatcaatgactgcgctgcctggactatcaacggcacacccctgaacatgatcgaccccggcgaatctgagaaatacctcggcctgcagtttgacccgtggattggaatagcaaggtccggtctctccacaaaactagatttttggcttcagcggatcgatcaagcaccacttaaacctctgcagaaaactgatattctcaaaacatacaccatccctcggctgatctacatagctgaccactcagaagtgaaaagcgcactactcgaaacccttgaccagaagatccggacagcggtcaaggaatggcttcacctacctccgtgcacctgcgatgccatcctgtactcgagcacgagagacggcggtttgggcatcaccaaattggcaggactgatccccagcgtgcaggcccgtagactgcatcggatcgcacagtcatctgacgatacgatgaaatgcttcatggaaaaagagaaaatggaacagctgcataagaaattgtggattcaagctggaggggacagagagaacataccctcgatttgggaagcaccaccgtcgagtgaaccaccaaacaacgtgagcacaaattcggaatgggaagcaccgacccagaaagataaatttccaaagccttgcaattggaggaaaaacgaattcaaaaaatggaccaaattggcatcccaaggccgcggaattgtaaattttgaaagagacaaaattagtaaccattggatccaatactacagacgcatacctcacaggaaactcctcactgcactacaactcagggccaacgtttaccccacgagagaatttctagccaggggtagacaagaccaatacatcaaggcgtgtaggcactgcgatgcggacaacgaatcctgcgcccacatcatcggcaactgcccagtgacacaggacgcccgaatcaagaggcacaattacatctgcgaactgcttctcgaggaggcgaagaagaaggactgggtagtgttcaaggaaccgcacataagggattccaacaaggaactgtacaaacctgacctgatatttgtgaaggatgcccgtgcacttgtcgtggatgtgacagtacggtatgaagcagccaaatcatcgctggaggaagccgctgcagagaaagtgagaaagtacaaacacctggaaacggaagtaagacatctcacgaatgcaaaggacgttacttttgtgggctttcccctaggagcgcgggggaaatggcaccaagataactttaaacttttgactgagcttggcctctccaaatcgaggcaagtgaaaatggcagagactttttccacagtagcgctcttttcatctgtggacattgtacatatgtttgccagtagggccagaaaatctatggttatgtgataataggctgccttctgcggggcttgccttctggccatgcccttcttctctcccttgcacctgtacctcttggtctttgaataaagcctgagtaggaaggaccggtaaaaaaaaaaaaaaaaaaaaaaaaaaaaaaacgttgactaaaaaaaaaaaaaaaaaaaaaaaaaaaaaaaaaaaaaaaaaaaaaaaaaaaaaaaaaaaaaaaaaaaaaa

SEQ ID NO: 11475 - DNA, 4439 bp, synthetic construct
  source 1..4439: mol_type = other DNA
gaaataagagagaaaagaagagtaagaagaaatataagagaattcgccaccatggcttcttgcccgaaacctggccccccggtttcagcaggggcaatgagtttggaaagtggactgaccacccactccgttctcgccatcgaacgtggtcccaattcgttggcaaattccggatcagactttgggggggggggtctggggctaccgttacgcctattgagggtatcggtcggcactcagacctcccgctccgactgggtagacctggtgtcctggagccacccaggacccacgtctaagtcccagcaggttgacctggtgtctttatttcctaaacaccgggttgacctgttatccaaaaacgaccaggtagacctggtggctcaatttttaccatctaaatttccccccaatttggcagaaaatgatttggctttgctggtgaacttagagttctacagatcggatttgcatgtgtatgagtgtgttcattttgctgcacattgggagggattaagtggtttgcctgaggtgtatgaacaacttgcaccacaaccgtgtgtgggagaaactttacattctagcctcccacgagacagtgaactgtttgtgcctgaagaggggagcagcgagaaggagagcgaggacgcgccaaaaacatctcctccgacgcctgggaaacatggtttggaacagactggggaggaaaaagtgatggtgactgttcctgacaaaaatccaccttgtccttgctgtggtacccgggtaaactctgtgttgaatctgattgaacatctgaaagtgtcacacgggaaaaggggggtttgttttcggtgtgcaaaatgtggaaaggaaaatagtaactatcacagtgttgtttgtcattttaagaaatgcaggggtccagagacggagaaagccccagctggggagtggatttgtgaggtatgcaacagagattttacaaccaaaattggcctgggacaacacaagagattggcacacccagcagtgagaaatcaggaaaggatcgttgcttcccaaccgaaagaaacatcaaatagaggtgctcacaaaaggtgctggacaaaggaggaggaagaattactaataagactggaggctcagttcgagggaaacaaaaatattaataagcttattgcagaacacataaccaccaaaacagctaagcagatcagtgacaaaaggcgattgctgtccagaaagccagcagaggagccacgtgaggagcctggaacgtgtcatcacaccaggagagcagctgcgagcctgagaacggagcctgagatgagtcatcacgcccaggcagaggacagagataatggacctgggagacgccctctgccaggcagggcagctgccggagggagaacaatggacgagataagacgccaccctgataagggcaacggacagcagagacccaccaagcaaaaatcagaagaacagctgcaggcttactataaaaagacactagaggaacgactttcagctggggcacttaacaccttcccccgagcattcaagcaggtaatggaaggccgggatataaagctagtaatcaatcagacagcgcaggactgcttcggatgcctggaatccataagccaaataagaacggcaacccgagataaaaaggacacggtgacccgggagaaacacccaaagaaaccttttcagaagtggatgaagaagagagcaatcaaaaaaggtaattatcttcggttccagcgtttattttatcttgatagagggaaactggctaaaatcattttagatgatattgaatgcttgtcttgtgacataccactcagtgaaatttattcggtttttaaaacaagatgggaaacaactggtagctttaaaagccttggggactttaaaacttacgggaaggctgacaacactgccttcagagaattaattacggctaaagaaattgagaaaaatgtgcaggaaatgagcaaaggctcggctcccggtccagacagaattactcttggggacgtcgtaaagatggatcccgagttttcccggaccatggagattttcaatttatggttaacaactggtaaaatcccggacatggtgagggggtgcagaaccgttttgattccaaaatcatcaaagccggatcgtttgaaagacattaataactggagacctatcacgatcggttccatcttgctgagactgttctccaggattgtaacagctaggctgagcaaagcgtgccccctgaacccaaggcaaagaggctttatcagagcggcgggatgctctgaaaacttaaaactcctgcaaactataatttggtcggccaaaagagaacacagaccactgggtgttgtattcgtggacatcgccaaggcttttgacaccgtaagccaccagcacatcattcatgctttgcagcaaagagaggtggatccccacatcgtcggtctggtgagcaatatgtacgagaacatcagtacgtatatcaccacaaagaggaacacacacacagacaaaatccagatccgggttggagtaaagcagggtgacccgatgtcgccccttttatttaacctggcaatggaccctctattatgcaagctggaagagagtggcaaaggataccaccgaggacagagcagcatcacagcgatggcatttgcagacgatctggttttgctgagcgactcctgggaaaatatgaatacaaatattagcatactggagaccttctgcaatctgaccggactcaaaacacaggggcaaaagtgccacggcttttacatcaagccgacaaaggactcttacaccatcaatgactgcgctgcctggactatcaacggcacacccctgaacatgatcgaccccggcgaatctgagaaatacctcggcctgcagtttgacccgtggattggaatagcaaggtccggtctctccacaaaactagatttttggcttcagcggatcgatcaagcaccacttaaacctctgcagaaaactgatattctcaaaacatacaccatccctcggctgatctacatagctgaccactcagaagtgaaaagcgcactactcgaaacccttgaccagaagatccggacagcggtcaaggaatggcttcacctacctccgtgcacctgcgatgccatcctgtactcgagcacgagagacggcggtttgggcatcaccaaattggcaggactgatccccagcgtgcaggcccgtagactgcatcggatcgcacagtcatctgacgatacgatgaaatgcttcatggaaaaagagaaaatggaacagctgcataagaaattgtggattcaagctggaggggacagagagaacataccctcgatttgggaagcaccaccgtcgagtgaaccaccaaacaacgtgagcacaaattcggaatgggaagcaccgacccagaaagataaatttccaaagccttgcaattggaggaaaaacgaattcaaaaaatggaccaaattggcatcccaaggccgcggaattgtaaattttgaaagagacaaaattagtaaccattggatccaatactacagacgcatacctcacaggaaactcctcactgcactacaactcagggccaacgtttaccccacgagagaatttctagccaggggtagacaagaccaatacatcaaggcgtgtaggcactgcgatgcggacaacgaatcctgcgcccacatcatcggcaactgcccagtgacacaggacgcccgaatcaagaggcacaattacatctgcgaactgcttctcgaggaggcgaagaagaaggactgggtagtgttcaaggaaccgcacataagggattccaacaaggaactgtacaaacctgacctgatatttgtgaaggatgcccgtgcacttgtcgtggatgtgacagtacggtatgaagcagccaaatcatcgctggaggaagccgctgcagagaaagtgagaaagtacaaacacctggaaacggaagtaagacatctcacgaatgcaaaggacgttacttttgtgggctttcccctaggagcgcgggggaaatggcaccaagataactttaaacttttgactgagcttggcctctccaaatcgaggcaagtgaaaatggcagagactttttccacagtagcgctcttttcatctgtggacattgtacatatgtttgccagtagggccagaaaatctatggttatgtgataataggctgccttctgcggggcttgccttctggccatgcccttcttctctcccttgcacctgtacctcttggtctttgaataaagcctgagtaggaaggaccggtaaaaaaaaaaaaaaaaaaaaaaaaaaaaaaacgttgactaaaaaaaaaaaaaaaaaaaaaaaaaaaaaaaaaaaaaaaaaaaaaaaaaaaaaaaaaaaaaaaaaaaaaa

SEQ ID NO: 11476 - DNA, 4439 bp, synthetic construct
  source 1..4439: mol_type = other DNA
gaaataagagagaaaagaagagtaagaagaaatataagagaattcgccaccatggcttcttgcccgaaacctggccccccggtttcagcaggggcaatgagtttggaaagtggactgaccacccactccgttctcgccatcgaacgtggtcccaattcgttggcaaattccggatcagactttgggggggggggtctggggctaccgttacgcctattgagggtatcggtcggcactcagacctcccgctccgactgggtagacctggtgtcctggagccacccaggacccacgtctaagtcccagcaggttgacctggtgtctttatttcctaaacaccgggttgacctgttatccaaaaacgaccaggtagacctggtggctcaatttttaccatctaaatttccccccaatttggcagaaaatgatttggctttgctggtgaacttagagttctacagatcggatttgcatgtgtatgagtgtgttcattttgctgcacattgggagggattaagtggtttgcctgaggtgtatgaacaacttgcaccacaaccgtgtgtgggagaaactttacattctagcctcccacgagacagtgaactgtttgtgcctgaagaggggagcagcgagaaggagagcgaggacgcgccaaaaacatctcctccgacgcctgggaaacatggtttggaacagactggggaggaaaaagtgatggtgactgttcctgacaaaaatccaccttgtccttgctgtggtacccgggtaaactctgtgttgaatctgattgaacatctgaaagtgtcacacgggaaaaggggggtttgttttcggtgtgcaaaatgtggaaaggaaaatagtaactatcacagtgttgtttgtcattttaagaaatgcaggggtccagagacggagaaagccccagctggggagtggatttgtgaggtatgcaacagagattttacaaccaaaattggcctgggacaacacaagagattggcacacccagcagtgagaaatcaggaaaggatcgttgcttcccaaccgaaagaaacatcaaatagaggtgctcacaaaaggtgctggacaaaggaggaggaagaattactaataagactggaggctcagttcgagggaaacaaaaatattaataagcttattgcagaacacataaccaccaaaacagctaagcagatcagtgacaaaaggcgattgctgtccagaaagccagcagaggagccacgtgaggagcctggaacgtgtcatcacaccaggagagcagctgcgagcctgagaacggagcctgagatgagtcatcacgcccaggcagaggacagagataatggacctgggagacgccctctgccaggcagggcagctgccggagggagaacaatggacgagataagacgccaccctgataagggcaacggacagcagagacccaccaagcaaaaatcagaagaacagctgcaggcttactataaaaagacactagaggaacgactttcagctggggcacttaacaccttcccccgagcattcaagcaggtaatggaaggccgggatataaagctagtaatcaatcagacagcgcaggactgcttcggatgcctggaatccataagccaaataagaacggcaacccgagataaaaaggacacggtgacccgggagaaacacccaaagaaaccttttcagaagtggatgaagaagagagcaatcaaaaaaggtaattatcttcggttccagcgtttattttatcttgatagagggaaactggctaaaatcattttagatgatattgaatgcttgtcttgtgacataccactcagtgaaatttattcggtttttaaaacaagatgggaaacaactggtagctttaaaagccttggggactttaaaacttacgggaaggctgacaacactgccttcagagaattaattacggctaaagaaattctgaaaaatgtgcaggaaatgagcaaaggctcggctcccggtccagacgggattactcttggggacgtcgtaaagatggatcccgagttttcccggaccatggagattttcaatttatggttaacaactggtaaaatcccggacatggtgagggggtgcagaaccgttttgattccaaaatcatcaaagccggatcgtttgaaagacattaataactggagacctatcacgatcggttccatcttgctgagactgttctccaggattgtaacagctaggctgagcaaagcgtgccccctgaacccaaggcaaagaggctttatcagagcggcgggatgctctgaaaacttaaaactcctgcaaactataatttggtcggccaaaagagaacacagaccactgggtgttgtattcgtggacatcgccaaggcttttgacaccgtaagccaccagcacatcattcatgctttgcagcaaagagaggtggatccccacatcgtcggtctggtgagcaatatgtacgagaacatcagtacgtatatcaccacaaagaggaacacacacacagacaaaatccagatccgggttggagtaaagcagggtgacccgatgtcgccccttttatttaacctggcaatggaccctctattatgcaagctggaagagagtggcaaaggataccaccgaggacagagcagcatcacagcgatggcatttgcagacgatctggttttgctgagcgactcctgggaaaatatgaatacaaatattagcatactggagaccttctgcaatctgaccggactcaaaacacaggggcaaaagtgccacggcttttacatcaagccgacaaaggactcttacaccatcaatgactgcgctgcctggactatcaacggcacacccctgaacatgatcgaccccggcgaatctgagaaatacctcggcctgcagtttgacccgtggattggaatagcaaggtccggtctctccacaaaactagatttttggcttcagcggatcgatcaagcaccacttaaacctctgcagaaaactgatattctcaaaacatacaccatccctcggctgatctacatagctgaccactcagaagtgaaaagcgcactactcgaaacccttgaccagaagatccggacagcggtcaaggaatggcttcacctacctccgtgcacctgcgatgccatcctgtactcgagcacgagagacggcggtttgggcatcaccaaattggcaggactgatccccagcgtgcaggcccgtagactgcatcggatcgcacagtcatctgacgatacgatgaaatgcttcatggaaaaagagaaaatggaacagctgcataagaaattgtggattcaagctggaggggacagagagaacataccctcgatttgggaagcaccaccgtcgagtgaaccaccaaacaacgtgagcacaaattcggaatgggaagcaccgacccagaaagataaatttccaaagccttgcaattggaggaaaaacgaattcaaaaaatggaccaaattggcatcccaaggccgcggaattgtaaattttgaaagagacaaaattagtaaccattggatccaatactacagacgcatacctcacaggaaactcctcactgcactacaactcagggccaacgtttaccccacgagagaatttctagccaggggtagacaagaccaatacatcaaggcgtgtaggcactgcgatgcggacaacgaatcctgcgcccacatcatcggcaactgcccagtgacacaggacgcccgaatcaagaggcacaattacatctgcgaactgcttctcgaggaggcgaagaagaaggactgggtagtgttcaaggaaccgcacataagggattccaacaaggaactgtacaaacctgacctgatatttgtgaaggatgcccgtgcacttgtcgtggatgtgacagtacggtatgaagcagccaaatcatcgctggaggaagccgctgcagagaaagtgagaaagtacaaacacctggaaacggaagtaagacatctcacgaatgcaaaggacgttacttttgtgggctttcccctaggagcgcgggggaaatggcaccaagataactttaaacttttgactgagcttggcctctccaaatcgaggcaagtgaaaatggcagagactttttccacagtagcgctcttttcatctgtggacattgtacatatgtttgccagtagggccagaaaatctatggttatgtgataataggctgccttctgcggggcttgccttctggccatgcccttcttctctcccttgcacctgtacctcttggtctttgaataaagcctgagtaggaaggaccggtaaaaaaaaaaaaaaaaaaaaaaaaaaaaaaacgttgactaaaaaaaaaaaaaaaaaaaaaaaaaaaaaaaaaaaaaaaaaaaaaaaaaaaaaaaaaaaaaaaaaaaaaa

SEQ ID NO: 11477 - DNA, 5144 bp, synthetic construct
  source 1..5144: mol_type = other DNA
gaaataagagagaaaagaagagtaagaagaaatataagagaattcgccaccatggcccctaagaaaaagagaaaggtggtgaccgtgaagttcaagtacaagggcgaggaaaaggaagtggacatcagcaagatcaagaaggtctggcgggtgggcaagatgatcagctttacctacgacgataacggcaagacaggcagaggcgccgtgtccgagaaggacgcccctaaagagctgctgcagatgctggaaaaaagcggctctgagacacctggaacaagcgagagcgccaccccggaatccaatatcagcggctctagctgcggcagccccaacagcgccgacaccagcagcgacttcaaggacctgtggaccaagctgaaggaatgccacgaccgggaagtgcagggactccaggtgaaggtcaccaaactcaagcaagaaagaatcctggacgcccagagactggaagaattcttcaccaagaaccagcagctgagagagcagcagaaagtgctgcacgagacaatcaaggttctggaagatagactgcgggccggcctgtgcgacagatgcgccgtgaccgaggaacacatgcgcaaaaagcagcaggagttcgagaacattagacagcaaaatctgaaattgatcacagagctgatgaacgagagaaacacactgcaggaggagaacaagaagctgagcgagcagctgcaacagaagatcgagaatgatcagcaacaccaggccgctgagctggaatgtgaagaggacgtgatccccgacagcccaatcacagctttcagcttttctggcgtgaacagactgaggcggaaggaaaacccccacgtgcggtacatcgagcagacccataccaagctggaacacagcgtgtgtgccaacgagatgagaaaggtgtccaagtcctccacccatccccagcacaaccctaacgaaaatgagatcctggtggctgatacctacgaccagtctcagagccctatggccaaggcccacggcaccagctcttatacccctgataagagctccttcaacctggccaccgtggtggccgagacactgggcctgggcgtgcaggaggaaagcgagacacagggcccaatgagccctctgggagatgagctgtaccactgcctggaaggcaaccacaagaaacagccttttgagtccggctccgagactcctggaacaagcgagagcgctacacctgagggcagctatgaacaacttgcaccacaaccgtgtgtgggagaaactttacattctagcctcccacgagacagtgaactgtttgtgcctgaagaggggagcagcgagaaggagagcgaggacgcgccaaaaacatctcctccgacgcctgggaaacatggtttggaacagactggggaggaaaaagtgatggtgactgttcctgacaaaaatccaccttgtccttgctgtggtacccgggtaaactctgtgttgaatctgattgaacatctgaaagtgtcacacgggaaaaggggggtttgttttcggtgtgcaaaatgtggaaaggaaaatagtaactatcacagtgttgtttgtcattttaagaaatgcaggggtccagagacggagaaagccccagctggggagtggatttgtgaggtatgcaacagagattttacaaccaaaattggcctgggacaacacaagagattggcacacccagcagtgagaaatcaggaaaggatcgttgcttcccaaccgaaagaaacatcaaatagaggtgctcacaaaaggtgctggacaaaggaggaggaagaattactaataagactggaggctcagttcgagggaaacaaaaatattaataagcttattgcagaacacataaccaccaaaacagctaagcagatcagtgacaaaaggcgattgctgtccagaaagccagcagaggagccacgtgaggagcctggaacgtgtcatcacaccaggagagcagctgcgagcctgagaacggagcctgagatgagtcatcacgcccaggcagaggacagagataatggacctgggagacgccctctgccaggcagggcagctgccggagggagaacaatggacgagataagacgccaccctgataagggcaacggacagcagagacccaccaagcaaaaatcagaagaacagctgcaggcttactataaaaagacactagaggaacgactttcagctggggcacttaacaccttcccccgagcattcaagcaggtaatggaaggccgggatataaagctagtaatcaatcagacagcgcaggactgcttcggatgcctggaatccataagccaaataagaacggcaacccgagataaaaaggacacggtgacccgggagaaacacccaaagaaaccttttcagaagtggatgaagaagagagcaatcaaaaaaggtaattatcttcggttccagcgtttattttatcttgatagagggaaactggctaaaatcattttagatgatattgaatgcttgtcttgtgacataccactcagtgaaatttattcggtttttaaaacaagatgggaaacaactggtagctttaaaagccttggggactttaaaacttacgggaaggctgacaacactgccttcagagaattaattacggctaaagaaattgagaaaaatgtgcaggaaatgagcaaaggctcggctcccggtccagacgggattactcttggggacgtcgtaaagatggatcccgagttttcccggaccatggagattttcaatttatggttaacaactggtaaaatcccggacatggtgagggggtgcagaaccgttttgattccaaaatcatcaaagccggatcgtttgaaagacattaataactggagacctatcacgatcggttccatcttgctgagactgttctccaggattgtaacagctaggctgagcaaagcgtgccccctgaacccaaggcaaagaggctttatcagagcggcgggatgctctgaaaacttaaaactcctgcaaactataatttggtcggccaaaagagaacacagaccactgggtgttgtattcgtggacatcgccaaggcttttgacaccgtaagccaccagcacatcattcatgctttgcagcaaagagaggtggatccccacatcgtcggtctggtgagcaatatgtacgagaacatcagtacgtatatcaccacaaagaggaacacacacacagacaaaatccagatccgggttggagtaaagcagggtgacccgatgtcgccccttttatttaacctggcaatggaccctctattatgcaagctggaagagagtggcaaaggataccaccgaggacagagcagcatcacagcgatggcatttgcagacgatctggttttgctgagcgactcctgggaaaatatgaatacaaatattagcatactggagaccttctgcaatctgaccggactcaaaacacaggggcaaaagtgccacggcttttacatcaagccgacaaaggactcttacaccatcaatgactgcgctgcctggactatcaacggcacacccctgaacatgatcgaccccggcgaatctgagaaatacctcggcctgcagtttgacccgtggattggaatagcaaggtccggtctctccacaaaactagatttttggcttcagcggatcgatcaagcaccacttaaacctctgcagaaactggatattctcaaaacatacaccatccctcggctgatctacatagctgaccactcagaagtgaaaagcgcactactcgaaacccttgaccagaagatccggacagcggtcaaggaatggcttcacctacctccgtgcacctgcgatgccatcctgtactcgagcacgagagacggcggtttgggcatcaccaaattggcaggactgatccccagcgtgcaggcccgtagactgcatcggatcgcacagtcatctgacgatacgatgaaatgcttcatggaaaaagagaaaatggaacagctgcataagaaattgtggattcaagctggaggggacagagagaacataccctcgatttgggaagcaccaccgtcgagtgaaccaccaaacaacgtgagcacaaattcggaatgggaagcaccgacccagaaagataaatttccaaagccttgcaattggaggaaaaacgaattcaaaaaatggaccaaattggcatcccaaggccgcggaattgtaaattttgaaagagacaaaattagtaaccattggatccaatactacagacgcatacctcacaggaaactcctcactgcactacaactcagggccaacgtttaccccacgagagaatttctagccaggggtagacaagaccaatacatcaaggcgtgtaggcactgcgatgcggacaacgaatcctgcgcccacatcatcggcaactgcccagtgacacaggacgcccgaatcaagaggcacaattacatctgcgaactgcttctcgaggaggcgaagaagaaggactgggtagtgttcaaggaaccgcacataagggattccaacaaggaactgtacaaacctgacctgatatttgtgaaggatgggcgtgcacttgtcgtggatgtgacagtacggtatgaagcagccaaatcatcgctggaggaagccgctgcagagaaagtgagaaagtacaaacacctggaaacggaagtaagacatctcacgaatgcaaaggacgttacttttgtgggctttcccctaggagcgcgggggaaatggcaccaagataactttaaacttttgactgagcttggcctctccaaatcgaggcaagtgaaaatggcagagactttttccacagtagcgctcttttcatctgtggacattgtacatatgtttgccagtagggccagaaaatctatggttatgtgataataggctgccttctgcggggcttgccttctggccatgcccttcttctctcccttgcacctgtacctcttggtctttgaataaagcctgagtaggaaggaccggtaaaaaaaaaaaaaaaaaaaaaaaaaaaaaaacgttgactaaaaaaaaaaaaaaaaaaaaaaaaaaaaaaaaaaaaaaaaaaaaaaaaaaaaaaaaaaaaaaaaaaaaaa

SEQ ID NO: 11478 - DNA, 5195 bp, synthetic construct; identical to SEQ ID NO: 10278
  source 1..5195: mol_type = other DNA

SEQ ID NO: 11479 - DNA, 4766 bp, synthetic construct; identical to SEQ ID NO: 10274
  source 1..4766: mol_type = other DNA

SEQ ID NO: 11480 - DNA, 4703 bp, synthetic construct
  source 1..4703: mol_type = other DNA
ggtctagttacaactgggcatcgctgcagagatcgcacctcctcgtggtcccgctggtagcccttcgaagggtgactaagtcgatctctgccccaggtacggagccgttgggactcaccagtccaacgtaactcctgcctaaattcggtgaaacaaattcctcggtaaaaagccccatggcttcttgcccgaaacctggccccccggtttcagcaggggcaatgagtttggaaagtggactgaccacccactccgttctcgccatcgaacgtggtcccaattcgttggcaaattccggatcagactttgggggggggggtctggggctaccgttacgcctattgagggtatcggtcggcactcagacctcccgctccgactgggtagacctggtgtcctggagccacccaggacccacgtctaagtcccagcaggttgacctggtgtctttatttcctaaacaccgggttgacctgttatccaaaaacgaccaggtagacctggtggctcaatttttaccatctaaatttccccccaatttggcagaaaatgatttggctttgctggtgaacttagagttctacagatcggatttgcatgtgtatgagtgtgttcattttgctgcacattgggagggattaagtggtttgcctgaggtgtatgaacaacttgcaccacaaccgtgtgtgggagaaactttacattctagcctcccacgagacagtgaactgtttgtgcctgaagaggggagcagcgagaaggagagcgaggacgcgccaaaaacatctcctccgacgcctgggaaacatggtttggaacagactggggaggaaaaagtgatggtgactgttcctgacaaaaatccaccttgtccttgctgtggtacccgggtaaactctgtgttgaatctgattgaacatctgaaagtgtcacacgggaaaaggggggtttgttttcggtgtgcaaaatgtggaaaggaaaatagtaactatcacagtgttgtttgtcattttccaaaatgcaggggtccagagacggagaaagccccagctggggagtggatttgtgaggtatgcaacagagattttacaaccaaaattggcctgggacaacacaagagattggcacacccagcagtgagaaatcaggaaaggatcgttgcttcccaaccgaaagaaacatcaaatagaggtgctcacaaaaggtgctggacaaaggaggaggaagaattactaataagactggaggctcagttcgagggaaacaaaaatattaataagcttattgcagaacacataaccaccaaaacagctaagcagatcagtgacaaaaggcgattgctgtccagaaagccagcagaggagccacgtgaggagcctggaacgtgtcatcacaccaggagagcagctgcgagcctgagaacggagcctgagatgagtcatcacgcccaggcagaggacagagataatggacctgggagacgccctctgccaggcagggcagctgccggagggagaacaatggacgagataagacgccaccctgataagggcaacggacagcagagacccaccaagcaaaaatcagaagaacagctgcaggcttactataaaaagacactagaggaacgactttcagctggggcacttaacaccttcccccgagcattcaagcaggtaatggaaggccgggatataaagctagtaatcaatcagacagcgcaggactacttcggatgcctggaatccataagccaaataagaacggcaacccgagataaaaaggacacggtgacccgggagaaacacccaaagaaaccttttcagaagtggatgaagaagagagcaatcaaaaaaggtaattatcttcggttccagcgtttattttatcttgatagagggaaactggctaaaatcattttagatgatattgaatgcttgtcttgtgacataccactcagtgaaatttattcggtttttaaaacaagatgggaaacaactggtagctttaaaagccttggggactttaaaacttacgggaaggctgacaacactgccttcagagaattaattacggctaaagaaattgagaaaaatgtgcaggaaatgagcaaaggctcggctcccggtccagacgggattactcttggggacgtcgtaaagatggatcccgagttttcccggaccatggagattttcaatttatggttaacaactggtaaaatcccggacatggtgagggggtgcagaaccgttttgattccaaaatcatcaaagccggatcgtttgaaagacattaataactggagacctatcacgatcggttccatcttgctgagactgttctccaggattgtaacagctaggctgagcaaagcgtgccccctgaacccaaggcaaagaggctttatcagagcggcgggatgctctgaaaacttaaaactcctgcaaactataatttggtcggccaaaagagaacacagaccactgggtgttgtattcgtggacatcgccaaggcttttgacaccgtaagccaccagcacatcattcatgctttgcagcaaagagaggtggatccccacatcgtcggtctggtgagcaatatgtacgagaacatcagtacgtatatcaccacaaagaggaacacacacacagacaaaatccagatccgggttggagtaaagcagggtgacccgatgtcgccccttttatttaacctggcaatggaccctctattatgcaagctggaagagagtggcaaaggataccaccgaggacagagcagcatcacagcgatggcatttgcagacgatctggttttgctgagcgactcctgggaaaatatgaatacaaatattagcatactggagaccttctgcaatctgaccggactcaaaacacaggggcaaaagtgccacggcttttacatcaagccgacaaaggactcttacaccatcaatgactgcgctgcctggactatcaacggcacacccctgaacatgatcgaccccggcgaatctgagaaatacctcggcctgcagtttgacccgtggattggaatagcaaggtccggtctctccacaaaactagatttttggcttcagcggatcgatcaagcaccacttaaacctctgcagaaaactgatattctcaaaacatacaccatccctcggctgatctacatagctgaccactcagaagtgaaaactgcactactcgaaacccttgaccagaagatccggacagcggtcaaggaatggcttcacctacctccgtgcacctgcgatgccatcctgtactcgagcacgagagacggcggtttgggcatcaccaaattggcaggactgatccccagcgtgcaggcccgtagactgcatcggatcgcacagtcatctgacgatacgatgaaatgcttcatggaaaaagagaaaatggaacagctgcataagaaattgtggattcaagctggaggggacagagagaacataccctcgatttgggaagcaccaccgtcgagtgaaccaccaaacaacgtgagcacaaattcggaatgggaagcaccgacccagaaagataaatttccaaagccttgcaattggaggaaaaacgaattcaaaaaatggaccaaattggcatcccaaggccgcggaattgtaaattttgaaagagacaaaattagtaaccattggatccaatactacagacgcatacctcacaggaaactcctcactgcactacaactcagggccaacgtttaccccacgagagaatttctagccaggggtagacaagaccaatacatcaaggcgtgtaggcactgcgatgcggacattgaatcctgcgcccacatcatcggcaactgcccagtgacacaggacgcccgaatcaagaggcacaattacatctgcgaactgcttctcgaggaggcgaagaagaaggactgggtagtgttcaaggaaccgcacataagggattccaacaaggaactgtacaaacctgacctgatatttgtgaaggatgcccgtgcacttgtcgtggatgtgacagtacggtatgaagcagccaaatcatcgctggaggaagccgctgcagagaaagtgagaaagtacaaacacctggaaacggaagtaagacatctcacgaatgcaaaggacgttacttttgtgggctttcccctaggagcgcgggggaaatggcaccaagataactttaaacttttgactgagcttggcctctccaaatcgaggcaagtgaaaatggcagagactttttccacagtagcgctcttttcatctgtggacattgtacatatgtttgccagtagggccagaaaatctatggttatgtgataataggctgccttctgcggggcttgccttctggccatgcccttcttctctcccttgcacctgtacctcttggtctttgaataaagcctgagtaggaaggaccggtagacatgataagatacattgatgagtttggacaaaccacaactagaatgcagtgaaaaaaatgctttatttgtgaaatttgtgatgctattgctttatttgtaaccattataagctgcaataaacaagttaacaacaacaaaaaaaaaaaaaaaaaaaaaaaaaaaaaaacgttgactaaaaaaaaaaaaaaaaaaaaaaaaaaaaaaaaaaaaaaaaaaaaaaaaaaaaaaaaaaaaaaaaaaaaaa

SEQ ID NO: 11481 - DNA, 4703 bp, synthetic construct
  source 1..4703: mol_type = other DNA
ggtctagttacaactgggcatcgctgcagagatcgcacctcctcgtggtcccgctggtagcccttcgaagggtgactaagtcgatctctgccccaggtacggagccgttgggactcaccagtccaacgtaactcctgcctaaattcggtgaaacaaattcctcggtaaaaagccccatggcttcttgcccgaaacctggccccccggtttcagcaggggcaatgagtttggaaagtggactgaccacccactccgttctcgccatcgaacgtggtcccaattcgttggcaaattccggatcagactttgggggggggggtctggggctaccgttacgcctattgagggtatcggtcggcactcagacctcccgctccgactgggtagacctggtgtcctggagccacccaggacccacgtctaagtcccagcaggttgacctggtgtctttatttcctaaacaccgggttgacctgttatccaaaaacgaccaggtagacctggtggctcaatttttaccatctaaatttccccccaatttggcagaaaatgatttggctttgctggtgaacttagagttctacagatcggatttgcatgtgtatgagtgtgttcattttgctgcacattgggagggattaagtggtttgcctgaggtgtatgaacaacttgcaccacaaccgtgtgtgggagaaactttacattctagcctcccacgagacagtgaactgtttgtgcctgaagaggggagcagcgagaaggagagcgaggacgcgccaaaaacatctcctccgacgcctgggaaacatggtttggaacagactggggaggaaaaagtgatggtgactgttcctgacaaaaatccaccttgtccttgctgtggtacccgggtaaactctgtgttgaatctgattgaacatctgaaagtgtcacacgggaaaaggggggtttgttttcggtgtgcaaaatgtggaaaggaaaatagtaactatcacagtgttgtttgtcattttccaaaatgcaggggtccagagacggagaaagccccagctggggagtggatttgtgaggtatgcaacagagattttacaaccaaaattggcctgggacaacacaagagattggcacacccagcagtgagaaatcaggaaaggatcgttgcttcccaaccgaaagaaacatcaaatagaggtgctcacaaaaggtgctggacaaaggaggaggaagaattactaataagactggaggctcagttcgagggaaacaaaaatattaataagcttattgcagaacacataaccaccaaaacagctaagcagatcagtgacaaaaggcgattgctgtccagaaagccagcagaggagccacgtgaggagcctggaacgtgtcatcacaccaggagagcagctgcgagcctgagaacggagcctgagatgagtcatcacgcccaggcagaggacagagataatggacctgggagacgccctctgccaggcagggcagctgccggagggagaacaatggacgagataagacgccaccctgataagggcaacggacagcagagacccaccaagcaaaaatcagaagaacagctgcaggcttactataaaaagacactagaggaacgactttcagctggggcacttaacaccttcccccgagcattcaagcaggtaatggaaggccgggatataaagctagtaatcaatcagacagcgcaggactgcttcggatgcctggaatccataagccaaataagaacggcaacccgagataaaaaggacacggtgacccggaagaaacacccaaagaaaccttttcagaagtggatgaaggacagagcaatcaaaaaaggtaattatcttcggttccagcgtttattttatcttgatagagggaaactggctaaaatcattttagatgatattgaatgcttgtcttgtgacataccactcagtgaaatttattcggtttttaaaacaagatgggaaacaactggtagctttaaaagccttggggactttaaaacttacgggaaggctgacaacactgccttcagagaattaattacggctaaagaaattgagaaaaatgtgcaggaaatgagcaaaggctcggctcccggtccagacgggattactcttggggacgtcgtaaagatggatcccgagttttcccggaccatggagattttcaatttatggttaacaactggtaaaatcccggacatggtgagggggtgcagaaccgttttgattccaaaatcatcagacccggatcgtttgaaagacattaataactggagacctatcacgatcggttccatcttgctgagactgttctccaggattgtaacagctaggctgagcaaagcgtgccccctgaacccaaggcaaagaggctttatcagagcggcgggatgctctgaaaacttaaaactcctgcaaactataatttggtcggccaaaagagaacacagaccactgggtgttgtattcgtggacatcgccaaggcttttgacaccgtaagccaccagcacatcattcatgctttgcagcaaagagaggtggatccccacatcgtcggtctggtgagcaatatgtacgagaacatcagtacgtatatcaccacaaagaggaacacacacacagacaaaatccagatccgggttggagtaaagcagggtgacccgatgtcgccccttttatttaacctggcaatggaccctctattatgcaagctggaagagagtggcaaaggataccaccgaggacagagcagcatcacagcgatggcatttgcagacgatctggttttgctgagcgactcctgggaaaatatgaatacaaatattagcatactggagaccttctgcaatctgaccggactcaaaacacaggggcaaaagtgccacggcttttacatcaagccgacaaaggactcttacaccatcaatgactgcgctgcctggactatcaacggcacacccctgaacatgatcgaccccggcgaatctgagaaatacctcggcctgcagtttgacccgtggattggaatagcaaggtccggtctctccacaaaactagatttttggcttcagcggatcgatcaagcaccacttaaacctctgcagaaaactgatattctcaaaacatacaccatccctcggctgatctacatagctgaccactcagaagtgaaaactgcactactcgaaacccttgaccagaagatccggacagcggtcaaggaatggcttcacctacctccgtgcacctgcgatgccatcctgtactcgagcacgagagacggcggtttgggcatcaccaaattggcaggactgatccccagcgtgcaggcccgtagactgcatcggatcgcacagtcatctgacgatacgatgaaatgcttcatggaaaaagagaaaatggaacagctgcataagaaattgtggattcaagctggaggggacagagagaacataccctcgatttgggaagcaccaccgtcgagtgaaccaccaaacaacgtgagcacaaattcggaatgggaagcaccgacccagaaagataaatttccaaagccttgcaattggaggaaaaacgaattcaaaaaatggaccaaattggcatcccaaggccgcggaattgtaaattttgaaagagacaaaattagtaaccattggatccaatactacagacgcatacctcacaggaaactcctcactgcactacaactcagggccaacgtttaccccacgagagaatttctagccaggggtagacaagaccaatacatcaaggcgtgtaggcactgcgatgcggacattgaatcctgcgcccacatcatcggcaactgcccagtgacacaggacgcccgaatcaagaggcacaattacatctgcgaactgcttctcgaggaggcgaagaagaaggactgggtagtgttcaaggaaccgcacataagggattccaacaaggaactgtacaaacctgacctgatatttgtgaaggatgcccgtgcacttgtcgtggatgtgacagtacggtatgaagcagccaaatcatcgctggaggaagccgctgcagagaaagtgagaaagtacaaacacctggaaacggaagtaagacatctcacgaatgcaaaggacgttacttttgtgggctttcccctaggagcgcgggggaaatggcaccaagataactttaaacttttgactgagcttggcctctccaaatcgaggcaagtgaaaatggcagagactttttccacagtagcgctcttttcatctgtggacattgtacatatgtttgccagtagggccagaaaatctatggttatgtgataataggctgccttctgcggggcttgccttctggccatgcccttcttctctcccttgcacctgtacctcttggtctttgaataaagcctgagtaggaaggaccggtagacatgataagatacattgatgagtttggacaaaccacaactagaatgcagtgaaaaaaatgctttatttgtgaaatttgtgatgctattgctttatttgtaaccattataagctgcaataaacaagttaacaacaacaaaaaaaaaaaaaaaaaaaaaaaaaaaaaaacgttgactaaaaaaaaaaaaaaaaaaaaaaaaaaaaaaaaaaaaaaaaaaaaaaaaaaaaaaaaaaaaaaaaaaaaaa

SEQ ID NO: 11482 - DNA, 4703 bp, synthetic construct
  source 1..4703: mol_type = other DNA
ggtctagttacaactgggcatcgctgcagagatcgcacctcctcgtggtcccgctggtagcccttcgaagggtgactaagtcgatctctgccccaggtacggagccgttgggactcaccagtccaacgtaactcctgcctaaattcggtgaaacaaattcctcggtaaaaagccccatggcttcttgcccgaaacctggccccccggtttcagcaggggcaatgagtttggaaagtggactgaccacccactccgttctcgccatcgaacgtggtcccaattcgttggcaaattccggatcagactttgggggggggggtctggggctaccgttacgcctattgagggtatcggtcggcactcagacctcccgctccgactgggtagacctggtgtcctggagccacccaggacccacgtctaagtcccagcaggttgacctggtgtctttatttcctaaacaccgggttgacctgttatccaaaaacgaccaggtagacctggtggctcaatttttaccatctaaatttccccccaatttggcagaaaatgatttggctttgctggtgaacttagagttctacagatcggatttgcatgtgtatgagtgtgttcattttgctgcacattgggagggattaagtggtttgcctgaggtgtatgaacaacttgcaccacaaccgtgtgtgggagaaactttacattctagcctcccacgagacagtgaactgtttgtgcctgaagaggggagcagcgagaaggagagcgaggacgcgccaaaaacatctcctccgacgcctgggaaacatggtttggaacagactggggaggaaaaagtgatggtgactgttcctgacaaaaatccaccttgtccttgctgtggtacccgggtaaactctgtgttgaatctgattgaacatctgaaagtgtcacacgggaaaaggggggtttgttttcggtgtgcaaaatgtggaaaggaaaatagtaactatcacagtgttgtttgtcattttccaaaatgcaggggtccagagacggagaaagccccagctggggagtggatttgtgaggtatgcaacagagattttacaaccaaaattggcctgggacaacacaagagattggcacacccagcagtgagaaatcaggaaaggatcgttgcttcccaaccgaaagaaacatcaaatagaggtgctcacaaaaggtgctggacaaaggaggaggaagaattactaataagactggaggctcagttcgagggaaacaaaaatattaataagcttattgcagaacacataaccaccaaaacagctaagcagatcagtgacaaaaggcgattgctgtccagaaagccagcagaggagccacgtgaggagcctggaacgtgtcatcacaccaggagagcagctgcgagcctgagaacggagcctgagatgagtcatcacgcccaggcagaggacagagataatggacctgggagacgccctctgccaggcagggcagctgccggagggagaacaatggacgagataagacgccaccctgataagggcaacggacagcagagacccaccaagcaaaaatcagaagaacagctgcaggcttactataaaaagacactagaggaacgactttcagctggggcacttaacaccttcccccgagcattcaagcaggtaatggaaggccgggatataaagctagtaatcaatcagacagcgcaggactacttcggatgcctggaatccataagccaaataagaacggcaacccgagataaaaaggacacggtgacccgggagaaacacccaaagaaaccttttcagaagtggatgaaggacagagcaatcaaaaaaggtaattatcttcggttccagcgtttattttatcttgatagagggaaactggctaaaatcattttagatgatattgaatgcttgtcttgtgacataccactcagtgaaatttattcggtttttaaaacaagatgggaaacaactggtagctttaaaagccttggggactttaaaacttacgggaaggctgacaacactgccttcagagaattaattacggctaaagaaattgagaaaaatgtgcaggaaatgagcaaaggctcggctcccggtccagacgggattactcttggggacgtcgtaaagatggatcccgagttttcccggaccatggagattttcaatttatggttaacaactggtaaaatcccggacatggtgagggggtgcagaaccgttttgattccaaaatcatcaaagccggatcgtttgaaagacattaataactggagacctatcacgatcggttccatcttgctgagactgttctccaggattgtaacagctaggctgagcaaagcgtgccccctgaacccaaggcaaagaggctttatcagagcggcgggatgctctgaaaacttaaaactcctgcaaactataatttggtcggccaaaagagaacacagaccactgggtgttgtattcgtggacatcgccaaggcttttgacaccgtaagccaccagcacatcattcatgctttgcagcaaagagaggtggatccccacatcgtcggtctggtgagcaatatgtacgagaacatcagtacgtatatcaccacaaagaggaacacacacacagacaaaatccagatccgggttggagtaaagcagggtgacccgatgtcgccccttttatttaacctggcaatggaccctctattatgcaagctggaagagagtggcaaaggataccaccgaggacagagcagcatcacagcgatggcatttgcagacgatctggttttgctgagcgactcctgggaaggcatgaatacaaatattagcatactggagaccttctgcaatctgaccggactcaaaacacaggggcaaaagtgccacggcttttacatcaagccgacaaaggactcttacaccatcaatgactgcgctgcctggactatcaacggcacacccctgaacatgatcgaccccggcgaatctgagaaatacctcggcctgcagtttgacccgtggattggaatagcaaggtccggtctctccacaaaactagatttttggcttcagcggatcgatcaagcaccacttaaacctctgcagaaaactgatattctcaaaacatacaccatccctcggctgatctacatagctgaccactcagaagtgaaaactgcactactcgaaacccttgaccagaagatccggacagcggtcaaggaatggcttcacctacctccgtgcacctgcgatgccatcctgtactcgagcacgagagacggcggtttgggcatcaccaaattggcaggactgatccccagcgtgcaggcccgtagactgcatcggatcgcacagtcatctgacgatacgatgaaatgcttcatggaaaaagagaaaatggaacagctgcataagaaattgtggattcaagctggaggggacagagagaacataccctcgatttgggaagcaccaccgtcgagtgaaccaccaaacaacgtgagcacaaattcggaatgggaagcaccgacccagaaagataaatttccaaagccttgcaattggaggaaaaacgaattcaaaaaatggaccaaattggcatcccaaggccgcggaattgtaaattttgaaagagacaaaattagtaaccattggatccaatactacagacgcatacctcacaggaaactcctcactgcactacaactcagggccaacgtttaccccacgagagaatttctagccaggggtagacaagaccaatacatcaaggcgtgtaggcactgcgatgcggacattgaatcctgcgcccacatcatcggcaactgcccagtgacacaggacgcccgaatcaagaggcacaattacatctgcgaactgcttctcgaggaggcgaagaagaaggactgggtagtgttcaaggaaccgcacataagggattccaacaaggaactgtacaaacctgacctgatatttgtgaaggatgcccgtgcacttgtcgtggatgtgacagtacggtatgaagcagccaaatcatcgctggaggaagccgctgcagagaaagtgagaaagtacaaacacctggaaacggaagtaagacatctcacgaatgcaaaggacgttacttttgtgggctttcccctaggagcgcgggggaaatggcaccaagataactttaaacttttgactgagcttggcctctccaaatcgaggcaagtgaaaatggcagagactttttccacagtagcgctcttttcatctgtggacattgtacatatgtttgccagtagggccagaaaatctatggttatgtgataataggctgccttctgcggggcttgccttctggccatgcccttcttctctcccttgcacctgtacctcttggtctttgaataaagcctgagtaggaaggaccggtagacatgataagatacattgatgagtttggacaaaccacaactagaatgcagtgaaaaaaatgctttatttgtgaaatttgtgatgctattgctttatttgtaaccattataagctgcaataaacaagttaacaacaacaaaaaaaaaaaaaaaaaaaaaaaaaaaaaaacgttgactaaaaaaaaaaaaaaaaaaaaaaaaaaaaaaaaaaaaaaaaaaaaaaaaaaaaaaaaaaaaaaaaaaaaaa

SEQ ID NO: 11483 - DNA, 4703 bp, synthetic construct
  source 1..4703: mol_type = other DNA
ggtctagttacaactgggcatcgctgcagagatcgcacctcctcgtggtcccgctggtagcccttcgaagggtgactaagtcgatctctgccccaggtacggagccgttgggactcaccagtccaacgtaactcctgcctaaattcggtgaaacaaattcctcggtaaaaagccccatggcttcttgcccgaaacctggccccccggtttcagcaggggcaatgagtttggaaagtggactgaccacccactccgttctcgccatcgaacgtggtcccaattcgttggcaaattccggatcagactttgggggggggggtctggggctaccgttacgcctattgagggtatcggtcggcactcagacctcccgctccgactgggtagacctggtgtcctggagccacccaggacccacgtctaagtcccagcaggttgacctggtgtctttatttcctaaacaccgggttgacctgttatccaaaaacgaccaggtagacctggtggctcaatttttaccatctaaatttccccccaatttggcagaaaatgatttggctttgctggtgaacttagagttctacagatcggatttgcatgtgtatgagtgtgttcattttgctgcacattgggagggattaagtggtttgcctgaggtgtatgaacaacttgcaccacaaccgtgtgtgggagaaactttacattctagcctcccacgagacagtgaactgtttgtgcctgaagaggggagcagcgagaaggagagcgaggacgcgccaaaaacatctcctccgacgcctgggaaacatggtttggaacagactggggaggaaaaagtgatggtgactgttcctgacaaaaatccaccttgtccttgctgtggtacccgggtaaactctgtgttgaatctgattgaacatctgaaagtgtcacacgggaaaaggggggtttgttttcggtgtgcaaaatgtggaaaggaaaatagtaactatcacagtgttgtttgtcattttccaaaatgcaggggtccagagacggagaaagccccagctggggagtggatttgtgaggtatgcaacagagattttacaaccaaaattggcctgggacaacacaagagattggcacacccagcagtgagaaatcaggaaaggatcgttgcttcccaaccgaaagaaacatcaaatagaggtgctcacaaaaggtgctggacaaaggaggaggaagaattactaataagactggaggctcagttcgagggaaacaaaaatattaataagcttattgcagaacacataaccaccaaaacagctaagcagatcagtgacaaaaggcgattgctgtccagaaagccagcagaggagccacgtgaggagcctggaacgtgtcatcacaccaggagagcagctgcgagcctgagaacggagcctgagatgagtcatcacgcccaggcagaggacagagataatggacctgggagacgccctctgccaggcagggcagctgccggagggagaacaatggacgagataagacgccaccctgataagggcaacggacagcagagacccaccaagcaaaaatcagaagaacagctgcaggcttactataaaaagacactagaggaacgactttcagctggggcacttaacaccttcccccgagcattcaagcaggtaatggaaggccgggatataaagctagtaatcaatcagacagcgcaggactacttcggatgcctggaatccataagccaaataagaacggcaacccgagataaaaaggacacggtgacccgggagaaacacccaaagaaaccttttcagaagtggatgaaggacagagcaatcaaaaaaggtaattatcttcggttccagcgtttattttatcttgatagagggaaactggctaaaatcattttagatgatattgaatgcttgtcttgtgacataccactcagtgaaatttattcggtttttaaaacaagatgggaaacaactggtagctttaaaagccttggggactttaaaacttacgggaaggctgacaacactgccttcagagaattaattacggctaaagaaattgagaaaaatgtgcaggaaatgagcaaaggctcggctcccggtccagacgggattactcttggggacgtcgtaaagatggatcccgagttttcccggaccatggagattttcaatttatggttaacaactggtaaaatcccggacatggtgagggggtgcagaaccgttttgattccaaaatcatcaaagccggatcgtttgaaagacattaataactggagacctatcacgatcggttccatcttgctgagactgttctccaggattgtaacagctaggctgagcaaagcgtgccccctgaacccaaggcaaagaggctttatcagagcggcgggatgctctgaaaacttaaaactcctgcaaactataatttggtcggccaaaagagaacacagaccactgggtgttgtattcgtggacatcgccaaggcttttgacaccgtaagccaccagcacatcattcatgctttgcagcaaagagaggtggatccccacatcgtcggtctggtgagcaatatgtacgagaacatcagtacgtatatcaccacaaagaggaacacacacacagacaaaatccagatccgggttggagtaaagcagggtgacccgatgtcgccccttttatttaacctggcaatggaccctctattatgcaagctggaagagagtggcaaaggataccaccgaggacagagcagcatcacagcgatggcatttgcagacgatctggttttgctgagcgactcctgggaaaatatgaatacaaatattagcatactggagaccttctgcaatctgaccggactcaaaacacaggggcaaaagtgccacggcttttacatcaagccgacaaaggactcttacaccatcaatgactgcgctgcctggactatcaacggcacacccctgaacatgatcgaccccggcgaatctgagaaatacctcggcctgcagtttgacccgtggattggaatagcaaggtccggtctctccacaaaactagatttttggcttcagcggatcgatcaagcaccacttaaacctctgcagaaactggatattctcaaaacatacaccatccctcggctgatctacatagctgaccactcagaagtgaaaactgcactactcgaaacccttgaccagaagatccggacagcggtcaaggaatggcttcacctacctccgtgcacctgcgatgccatcctgtactcgagcacgagagacggcggtttgggcatcaccaaattggcaggactgatccccagcgtgcaggcccgtagactgcatcggatcgcacagtcatctgacgatacgatgaaatgcttcatggaaaaagagaaaatggaacagctgcataagaaattgtggattcaagctggaggggacagagagaacataccctcgatttgggaagcaccaccgtcgagtgaaccaccaaacaacgtgagcacaaattcggaatgggaagcaccgacccagaaagataaatttccaaagccttgcaattggaggaaaaacgaattcaaaaaatggaccaaattggcatcccaaggccgcggaattgtaaattttgaaagagacaaaattagtaaccattggatccaatactacagacgcatacctcacaggaaactcctcactgcactacaactcagggccaacgtttaccccacgagagaatttctagccaggggtagacaagaccaatacatcaaggcgtgtaggcactgcgatgcggacattgaatcctgcgcccacatcatcggcaactgcccagtgacacaggacgcccgaatcaagaggcacaattacatctgcgaactgcttctcgaggaggcgaagaagaaggactgggtagtgttcaaggaaccgcacataagggattccaacaaggaactgtacaaacctgacctgatatttgtgaaggatgcccgtgcacttgtcgtggatgtgacagtacggtatgaagcagccaaatcatcgctggaggaagccgctgcagagaaagtgagaaagtacaaacacctggaaacggaagtaagacatctcacgaatgcaaaggacgttacttttgtgggctttcccctaggagcgcgggggaaatggcaccaagataactttaaacttttgactgagcttggcctctccaaatcgaggcaagtgaaaatggcagagactttttccacagtagcgctcttttcatctgtggacattgtacatatgtttgccagtagggccagaaaatctatggttatgtgataataggctgccttctgcggggcttgccttctggccatgcccttcttctctcccttgcacctgtacctcttggtctttgaataaagcctgagtaggaaggaccggtagacatgataagatacattgatgagtttggacaaaccacaactagaatgcagtgaaaaaaatgctttatttgtgaaatttgtgatgctattgctttatttgtaaccattataagctgcaataaacaagttaacaacaacaaaaaaaaaaaaaaaaaaaaaaaaaaaaaaacgttgactaaaaaaaaaaaaaaaaaaaaaaaaaaaaaaaaaaaaaaaaaaaaaaaaaaaaaaaaaaaaaaaaaaaaaa

SEQ ID NO: 11484 - DNA, 4703 bp, synthetic construct
  source 1..4703: mol_type = other DNA
ggtctagttacaactgggcatcgctgcagagatcgcacctcctcgtggtcccgctggtagcccttcgaagggtgactaagtcgatctctgccccaggtacggagccgttgggactcaccagtccaacgtaactcctgcctaaattcggtgaaacaaattcctcggtaaaaagccccatggcttcttgcccgaaacctggccccccggtttcagcaggggcaatgagtttggaaagtggactgaccacccactccgttctcgccatcgaacgtggtcccaattcgttggcaaattccggatcagactttgggggggggggtctggggctaccgttacgcctattgagggtatcggtcggcactcagacctcccgctccgactgggtagacctggtgtcctggagccacccaggacccacgtctaagtcccagcaggttgacctggtgtctttatttcctaaacaccgggttgacctgttatccaaaaacgaccaggtagacctggtggctcaatttttaccatctaaatttccccccaatttggcagaaaatgatttggctttgctggtgaacttagagttctacagatcggatttgcatgtgtatgagtgtgttcattttgctgcacattgggagggattaagtggtttgcctgaggtgtatgaacaacttgcaccacaaccgtgtgtgggagaaactttacattctagcctcccacgagacagtgaactgtttgtgcctgaagaggggagcagcgagaaggagagcgaggacgcgccaaaaacatctcctccgacgcctgggaaacatggtttggaacagactggggaggaaaaagtgatggtgactgttcctgacaaaaatccaccttgtccttgctgtggtacccgggtaaactctgtgttgaatctgattgaacatctgaaagtgtcacacgggaaaaggggggtttgttttcggtgtgcaaaatgtggaaaggaaaatagtaactatcacagtgttgtttgtcattttccaaaatgcaggggtccagagacggagaaagccccagctggggagtggatttgtgaggtatgcaacagagattttacaaccaaaattggcctgggacaacacaagagattggcacacccagcagtgagaaatcaggaaaggatcgttgcttcccaaccgaaagaaacatcaaatagaggtgctcacaaaaggtgctggacaaaggaggaggaagaattactaataagactggaggctcagttcgagggaaacaaaaatattaataagcttattgcagaacacataaccaccaaaacagctaagcagatcagtgacaaaaggcgattgctgtccagaaagccagcagaggagccacgtgaggagcctggaacgtgtcatcacaccaggagagcagctgcgagcctgagaacggagcctgagatgagtcatcacgcccaggcagaggacagagataatggacctgggagacgccctctgccaggcagggcagctgccggagggagaacaatggacgagataagacgccaccctgataagggcaacggacagcagagacccaccaagcaaaaatcagaagaacagctgcaggcttactataaaaagacactagaggaacgactttcagctggggcacttaacaccttcccccgagcattcaagcaggtaatggaaggccgggatataaagctagtaatcaatcagacagcgcaggactacttcggatgcctggaatccataagccaaataagaacggcaacccgagataaaaaggacacggtgacccgggagaaacacccaaagaaaccttttcagaagtggatgaagaagagagcaatcaaaaaaggtaattatcttcggttccagcgtttattttatcttgatagagggaaactggctaaaatcattttagatgatattgaatgcttgtcttgtgacataccactcagtgaaatttattcggtttttaaaacaagatgggaaacaactggtagctttaaaagccttggggactttaaaacttacgggaaggctgacaacactgccttcagagaattaattacggctaaagaaattgagaaaaatgtgcaggaaatgagcaaaggctcggctcccggtccagacgggattactcttggggacgtcgtaaagatggatcccgagttttcccggaccatggagattttcaatttatggttaacaactggtaaaatcccggacatggtgagggggtgcagaaccgttttgattccaaaatcatcagacccggatcgtttgaaagacattaataactggagacctatcacgatcggttccatcttgctgagactgttctccaggattgtaacagctaggctgagcaaagcgtgccccctgaacccaaggcaaagaggctttatcagagcggcgggatgctctgaaaacttaaaactcctgcaaactataatttggtcggccaaaagagaacacagaccactgggtgttgtattcgtggacatcgccaaggcttttgacaccgtaagccaccagcacatcattcatgctttgcagcaaagagaggtggatccccacatcgtcggtctggtgagcaatatgtacgagaacatcagtacgtatatcaccacaaagaggaacacacacacagacaaaatccagatccgggttggagtaaagcagggtgacccgatgtcgccccttttatttaacctggcaatggaccctctattatgcaagctggaagagagtggcaaaggataccaccgaggacagagcagcatcacagcgatggcatttgcagacgatctggttttgctgagcgactcctgggaaaatatgaatacaaatattagcatactggagaccttctgcaatctgaccggactcaaaacacaggggcaaaagtgccacggcttttacatcaagccgacaaaggactcttacaccatcaatgactgcgctgcctggactatcaacggcacacccctgaacatgatcgaccccggcgaatctgagaaatacctcggcctgcagtttgacccgtggattggaatagcaaggtccggtctctccacaaaactagatttttggcttcagcggatcgatcaagcaccacttaaacctctgcagaaaactgatattctcaaaacatacaccatccctcggctgatctacatagctgaccactcagaagtgaaaactgcactactcgaaacccttgaccagaagatccggacagcggtcaaggaatggcttcacctacctccgtgcacctgcgatgccatcctgtactcgagcacgagagacggcggtttgggcatcaccaaattggcaggactgatccccagcgtgcaggcccgtagactgcatcggatcgcacagtcatctgacgatacgatgaaatgcttcatggaaaaagagaaaatggaacagctgcataagaaattgtggattcaagctggaggggacagagagaacataccctcgatttgggaagcaccaccgtcgagtgaaccaccaaacaacgtgagcacaaattcggaatgggaagcaccgacccagaaagataaatttccaaagccttgcaattggaggaaaaacgaattcaaaaaatggaccaaattggcatcccaaggccgcggaattgtaaattttgaaagagacaaaattagtaaccattggatccaatactacagacgcatacctcacaggaaactcctcactgcactacaactcagggccaacgtttaccccacgagagaatttctagccaggggtagacaagaccaatacatcaaggcgtgtaggcactgcgatgcggacattgaatcctgcgcccacatcatcggcaactgcccagtgacacaggacgcccgaatcaagaggcacaattacatctgcgaactgcttctcgaggaggcgaagaagaaggactgggtagtgttcaaggaaccgcacataagggattccaacaaggaactgtacaaacctgacctgatatttgtgaaggatgcccgtgcacttgtcgtggatgtgacagtacggtatgaagcagccaaatcatcgctggaggaagccgctgcagagaaagtgagaaagtacaaacacctggaaacggaagtaagacatctcacgaatgcaaaggacgttacttttgtgggctttcccctaggagcgcgggggaaatggcaccaagataactttaaacttttgactgagcttggcctctccaaatcgaggcaagtgaaaatggcagagactttttccacagtagcgctcttttcatctgtggacattgtacatatgtttgccagtagggccagaaaatctatggttatgtgataataggctgccttctgcggggcttgccttctggccatgcccttcttctctcccttgcacctgtacctcttggtctttgaataaagcctgagtaggaaggaccggtagacatgataagatacattgatgagtttggacaaaccacaactagaatgcagtgaaaaaaatgctttatttgtgaaatttgtgatgctattgctttatttgtaaccattataagctgcaataaacaagttaacaacaacaaaaaaaaaaaaaaaaaaaaaaaaaaaaaaacgttgactaaaaaaaaaaaaaaaaaaaaaaaaaaaaaaaaaaaaaaaaaaaaaaaaaaaaaaaaaaaaaaaaaaaaaa

SEQ ID NO: 11485 - DNA, 4703 bp, synthetic construct
  source 1..4703: mol_type = other DNA
ggtctagttacaactgggcatcgctgcagagatcgcacctcctcgtggtcccgctggtagcccttcgaagggtgactaagtcgatctctgccccaggtacggagccgttgggactcaccagtccaacgtaactcctgcctaaattcggtgaaacaaattcctcggtaaaaagccccatggcttcttgcccgaaacctggccccccggtttcagcaggggcaatgagtttggaaagtggactgaccacccactccgttctcgccatcgaacgtggtcccaattcgttggcaaattccggatcagactttgggggggggggtctggggctaccgttacgcctattgagggtatcggtcggcactcagacctcccgctccgactgggtagacctggtgtcctggagccacccaggacccacgtctaagtcccagcaggttgacctggtgtctttatttcctaaacaccgggttgacctgttatccaaaaacgaccaggtagacctggtggctcaatttttaccatctaaatttccccccaatttggcagaaaatgatttggctttgctggtgaacttagagttctacagatcggatttgcatgtgtatgagtgtgttcattttgctgcacattgggagggattaagtggtttgcctgaggtgtatgaacaacttgcaccacaaccgtgtgtgggagaaactttacattctagcctcccacgagacagtgaactgtttgtgcctgaagaggggagcagcgagaaggagagcgaggacgcgccaaaaacatctcctccgacgcctgggaaacatggtttggaacagactggggaggaaaaagtgatggtgactgttcctgacaaaaatccaccttgtccttgctgtggtacccgggtaaactctgtgttgaatctgattgaacatctgaaagtgtcacacgggaaaaggggggtttgttttcggtgtgcaaaatgtggaaaggaaaatagtaactatcacagtgttgtttgtcattttaagaaatgcaggggtccagagacggagaaagccccagctggggagtggatttgtgaggtatgcaacagagattttacaaccaaaattggcctgggacaacacaagagattggcacacccagcagtgagaaatcaggaaaggatcgttgcttcccaaccgaaagaaacatcaaatagaggtgctcacaaaaggtgctggacaaaggaggaggaagaattactaataagactggaggctcagttcgagggaaacaaaaatattaataagcttattgcagaacacataaccaccaaaacagctaagcagatcagtgacaaaaggcgattgctgtccagaaagccagcagaggagccacgtgaggagcctggaacgtgtcatcacaccaggagagcagctgcgagcctgagaacggagcctgagatgagtcatcacgcccaggcagaggacagagataatggacctgggagacgccctctgccaggcagggcagctgccggagggagaacaatggacgagataagacgccaccctgataagggcaacggacagcagagacccaccaagcaaaaatcagaagaacagctgcaggcttactataaaaagacactagaggaacgactttcagctggggcacttaacaccttcccccgagcattcaagcaggtaatggaaggccgggatataaagctagtaatcaatcagacagcgcaggactacttcggatgcctggaatccataagccaaataagaacggcaacccgagataaaaaggacacggtgacccgggagaaacacccaaagaaaccttttcagaagtggatgaagaagagagcaatcaaaaaaggtaattatcttcggttccagcgtttattttatcttgatagagggaaactggctaaaatcattttagatgatattgaatgcttgtcttgtgacataccactcagtgaaatttattcggtttttaaaacaagatgggaaacaactggtagctttaaaagccttggggactttaaaacttacgggaaggctgacaacactgccttcagagaattaattacggctaaagaaattgagaaaaatgtgcaggaaatgagcaaaggctcggctcccggtccagacgggattactcttggggacgtcgtaaagatggatcccgagttttcccggaccatggagattttcaatttatggttaacaactggtaaaatcccggacatggtgagggggtgcagaaccgttttgattccaaaatcatcagacccggatcgtttgaaagacattaataactggagacctatcacgatcggttccatcttgctgagactgttctccaggattgtaacagctaggctgagcaaagcgtgccccctgaacccaaggcaaagaggctttatcagagcggcgggatgctctgaaaacttaaaactcctgcaaactataatttggtcggccaaaagagaacacagaccactgggtgttgtattcgtggacatcgccaaggcttttgacaccgtaagccaccagcacatcattcatgctttgcagcaaagagaggtggatccccacatcgtcggtctggtgagcaatatgtacgagaacatcagtacgtatatcaccacaaagaggaacacacacacagacaaaatccagatccgggttggagtaaagcagggtgacccgatgtcgccccttttatttaacctggcaatggaccctctattatgcaagctggaagagagtggcaaaggataccaccgaggacagagcagcatcacagcgatggcatttgcagacgatctggttttgctgagcgactcctgggaaaatatgaatacaaatattagcatactggagaccttctgcaatctgaccggactcaaaacacaggggcaaaagtgccacggcttttacatcaagccgacaaaggactcttacaccatcaatgactgcgctgcctggactatcaacggcacacccctgaacatgatcgaccccggcgaatctgagaaatacctcggcctgcagtttgacccgtggattggaatagcaaggtccggtctctccacaaaactagatttttggcttcagcggatcgatcaagcaccacttaaacctctgcagaaaactgatattctcaaaacatacaccatccctcggctgatctacatagctgaccactcagaagtgaaaactgcactactcgaaacccttgaccagaagatccggacagcggtcaaggaatggcttcacctacctccgtgcacctgcgatgccatcctgtactcgagcacgagagacggcggtttgggcatcaccaaattggcaggactgatccccagcgtgcaggcccgtagactgcatcggatcgcacagtcatctgacgatacgatgaaatgcttcatggaaaaagagaaaatggaacagctgcataagaaattgtggattcaagctggaggggacagagagaacataccctcgatttgggaagcaccaccgtcgagtgaaccaccaaacaacgtgagcacaaattcggaatgggaagcaccgacccagaaagataaatttccaaagccttgcaattggaggaaaaacgaattcaaaaaatggaccaaattggcatcccaaggccgcggaattgtaaattttgaaagagacaaaattagtaaccattggatccaatactacagacgcatacctcacaggaaactcctcactgcactacaactcagggccaacgtttaccccacgagagaatttctagccaggggtagacaagaccaatacatcaaggcgtgtaggcactgcgatgcggacattgaatcctgcgcccacatcatcggcaactgcccagtgacacaggacgcccgaatcaagaggcacaataagatctgcgaactgcttctcgaggaggcgaagaagaaggactgggtagtgttcaaggaaccgcacataagggattccaacaaggaactgtacaaacctgacctgatatttgtgaaggatgcccgtgcacttgtcgtggatgtgacagtacggtatgaagcagccaaatcatcgctggaggaagccgctgcagagaaagtgagaaagtacaaacacctggaaacggaagtaagacatctcacgaatgcaaaggacgttacttttgtgggctttcccctaggagcgcgggggaaatggcaccaagataactttaaacttttgactgagcttggcctctccaaatcgaggcaagtgaaaatggcagagactttttccacagtagcgctcttttcatctgtggacattgtacatatgtttgccagtagggccagaaaatctatggttatgtgataataggctgccttctgcggggcttgccttctggccatgcccttcttctctcccttgcacctgtacctcttggtctttgaataaagcctgagtaggaaggaccggtagacatgataagatacattgatgagtttggacaaaccacaactagaatgcagtgaaaaaaatgctttatttgtgaaatttgtgatgctattgctttatttgtaaccattataagctgcaataaacaagttaacaacaacaaaaaaaaaaaaaaaaaaaaaaaaaaaaaaacgttgactaaaaaaaaaaaaaaaaaaaaaaaaaaaaaaaaaaaaaaaaaaaaaaaaaaaaaaaaaaaaaaaaaaaaaa

SEQ ID NO: 11486 - DNA, 4703 bp, synthetic construct
  source 1..4703: mol_type = other DNA
ggtctagttacaactgggcatcgctgcagagatcgcacctcctcgtggtcccgctggtagcccttcgaagggtgactaagtcgatctctgccccaggtacggagccgttgggactcaccagtccaacgtaactcctgcctaaattcggtgaaacaaattcctcggtaaaaagccccatggcttcttgcccgaaacctggccccccggtttcagcaggggcaatgagtttggaaagtggactgaccacccactccgttctcgccatcgaacgtggtcccaattcgttggcaaattccggatcagactttgggggggggggtctggggctaccgttacgcctattgagggtatcggtcggcactcagacctcccgctccgactgggtagacctggtgtcctggagccacccaggacccacgtctaagtcccagcaggttgacctggtgtctttatttcctaaacaccgggttgacctgttatccaaaaacgaccaggtagacctggtggctcaatttttaccatctaaatttccccccaatttggcagaaaatgatttggctttgctggtgaacttagagttctacagatcggatttgcatgtgtatgagtgtgttcattttgctgcacattgggagggattaagtggtttgcctgaggtgtatgaacaacttgcaccacaaccgtgtgtgggagaaactttacattctagcctcccacgagacagtgaactgtttgtgcctgaagaggggagcagcgagaaggagagcgaggacgcgccaaaaacatctcctccgacgcctgggaaacatggtttggaacagactggggaggaaaaagtgatggtgactgttcctgacaaaaatccaccttgtccttgctgtggtacccgggtaaactctgtgttgaatctgattgaacatctgaaagtgtcacacgggaaaaggggggtttgttttcggtgtgcaaaatgtggaaaggaaaatagtaactatcacagtgttgtttgtcattttaagaaatgcaggggtccagagacggagaaagccccagctggggagtggatttgtgaggtatgcaacagagattttacaaccaaaattggcctgggacaacacaagagattggcacacccagcagtgagaaatcaggaaaggatcgttgcttcccaaccgaaagaaacatcaaatagaggtgctcacaaaaggtgctggacaaaggaggaggaagaattactaataagactggaggctcagttcgagggaaacaaaaatattaataagcttattgcagaacacataaccaccaaaacagctaagcagatcagtgacaaaaggcgattgctgtccagaaagccagcagaggagccacgtgaggagcctggaacgtgtcatcacaccaggagagcagctgcgagcctgagaacggagcctgagatgagtcatcacgcccaggcagaggacagagataatggacctgggagacgccctctgccaggcagggcagctgccggagggagaacaatggacgagataagacgccaccctgataagggcaacggacagcagagacccaccaagcaaaaatcagaagaacagctgcaggcttactataaaaagacactagaggaacgactttcagctggggcacttaacaccttcccccgagcattcaagcaggtaatggaaggccgggatataaagctagtaatcaatcagacagcgcaggactacttcggatgcctggaatccataagccaaataagaacggcaacccgagataaaaaggacacggtgacccgggagaaacacccaaagaaaccttttcagaagtggatgaagaagagagcaatcaaaaaaggtaattatcttcggttccagcgtttattttatcttgatagagggaaactggctaaaatcattttagatgatattgaatgcttgtcttgtgacataccactcagtgaaatttattcggtttttaaaacaagatgggaaacaactggtagctttaaaagccttggggactttaaaacttacgggaaggctgacaacactgccttcagagaattaattacggctaaagaaattgagaaaaatgtgcaggaaatgagcaaaggctcggctcccggtccagacgggattactcttggggacgtcgtaaagatggatcccgagttttcccggaccatggagattttcaatttatggttaacaactggtaaaatcccggacatggtgagggggtgcagaaccgttttgattccaaaatcatcagacccggatcgtttgaaagacattaataactggagacctatcacgatcggttccatcttgctgagactgttctccaggattgtaacagctaggctgagcaaagcgtgccccctgaacccaaggcaaagaggctttatcagagcggcgggatgctctgaaaacttaaaactcctgcaaactataatttggtcggccaaaagagaacacagaccactgggtgttgtattcgtggacatcgccaaggcttttgacaccgtaagccaccagcacatcattcatgctttgcagcaaagagaggtggatccccacatcgtcggtctggtgagcaatatgtacgagaacatcagtacgtatatcaccacaaagaggaacacacacacagacaaaatccagatccgggttggagtaaagcagggtgacccgatgtcgccccttttatttaacctggcaatggaccctctattatgcaagctggaagagagtggcaaaggataccaccgaggacagagcagcatcacagcgatggcatttgcagacgatctggttttgctgagcgactcctgggaaggcatgaatacaaatattagcatactggagaccttctgcaatctgaccggactcaaaacacaggggcaaaagtgccacggcttttacatcaagccgacaaaggactcttacaccatcaatgactgcgctgcctggactatcaacggcacacccctgaacatgatcgaccccggcgaatctgagaaatacctcggcctgcagtttgacccgtggattggaatagcaaggtccggtctctccacaaaactagatttttggcttcagcggatcgatcaagcaccacttaaacctctgcagaaaactgatattctcaaaacatacaccatccctcggctgatctacatagctgaccactcagaagtgaaaactgcactactcgaaacccttgaccagaagatccggacagcggtcaaggaatggcttcacctacctccgtgcacctgcgatgccatcctgtactcgagcacgagagacggcggtttgggcatcaccaaattggcaggactgatccccagcgtgcaggcccgtagactgcatcggatcgcacagtcatctgacgatacgatgaaatgcttcatggaaaaagagaaaatggaacagctgcataagaaattgtggattcaagctggaggggacagagagaacataccctcgatttgggaagcaccaccgtcgagtgaaccaccaaacaacgtgagcacaaattcggaatgggaagcaccgacccagaaagataaatttccaaagccttgcaattggaggaaaaacgaattcaaaaaatggaccaaattggcatcccaaggccgcggaattgtaaattttgaaagagacaaaattagtaaccattggatccaatactacagacgcatacctcacaggaaactcctcactgcactacaactcagggccaacgtttaccccacgagagaatttctagccaggggtagacaagaccaatacatcaaggcgtgtaggcactgcgatgcggacattgaatcctgcgcccacatcatcggcaactgcccagtgacacaggacgcccgaatcaagaggcacaattacatctgcgaactgcttctcgaggaggcgaagaagaaggactgggtagtgttcaaggaaccgcacataagggattccaacaaggaactgtacaaacctgacctgatatttgtgaaggatgcccgtgcacttgtcgtggatgtgacagtacggtatgaagcagccaaatcatcgctggaggaagccgctgcagagaaagtgagaaagtacaaacacctggaaacggaagtaagacatctcacgaatgcaaaggacgttacttttgtgggctttcccctaggagcgcgggggaaatggcaccaagataactttaaacttttgactgagcttggcctctccaaatcgaggcaagtgaaaatggcagagactttttccacagtagcgctcttttcatctgtggacattgtacatatgtttgccagtagggccagaaaatctatggttatgtgataataggctgccttctgcggggcttgccttctggccatgcccttcttctctcccttgcacctgtacctcttggtctttgaataaagcctgagtaggaaggaccggtagacatgataagatacattgatgagtttggacaaaccacaactagaatgcagtgaaaaaaatgctttatttgtgaaatttgtgatgctattgctttatttgtaaccattataagctgcaataaacaagttaacaacaacaaaaaaaaaaaaaaaaaaaaaaaaaaaaaaacgttgactaaaaaaaaaaaaaaaaaaaaaaaaaaaaaaaaaaaaaaaaaaaaaaaaaaaaaaaaaaaaaaaaaaaaaa

SEQ ID NO: 11487 - DNA, 4703 bp, synthetic construct
  source 1..4703: mol_type = other DNA
ggtctagttacaactgggcatcgctgcagagatcgcacctcctcgtggtcccgctggtagcccttcgaagggtgactaagtcgatctctgccccaggtacggagccgttgggactcaccagtccaacgtaactcctgcctaaattcggtgaaacaaattcctcggtaaaaagccccatggcttcttgcccgaaacctggccccccggtttcagcaggggcaatgagtttggaaagtggactgaccacccactccgttctcgccatcgaacgtggtcccaattcgttggcaaattccggatcagactttgggggggggggtctggggctaccgttacgcctattgagggtatcggtcggcactcagacctcccgctccgactgggtagacctggtgtcctggagccacccaggacccacgtctaagtcccagcaggttgacctggtgtctttatttcctaaacaccgggttgacctgttatccaaaaacgaccaggtagacctggtggctcaatttttaccatctaaatttccccccaatttggcagaaaatgatttggctttgctggtgaacttagagttctacagatcggatttgcatgtgtatgagtgtgttcattttgctgcacattgggagggattaagtggtttgcctgaggtgtatgaacaacttgcaccacaaccgtgtgtgggagaaactttacattctagcctcccacgagacagtgaactgtttgtgcctgaagaggggagcagcgagaaggagagcgaggacgcgccaaaaacatctcctccgacgcctgggaaacatggtttggaacagactggggaggaaaaagtgatggtgactgttcctgacaaaaatccaccttgtccttgctgtggtacccgggtaaactctgtgttgaatctgattgaacatctgaaagtgtcacacgggaaaaggggggtttgttttcggtgtgcaaaatgtggaaaggaaaatagtaactatcacagtgttgtttgtcattttaagaaatgcaggggtccagagacggagaaagccccagctggggagtggatttgtgaggtatgcaacagagattttacaaccaaaattggcctgggacaacacaagagattggcacacccagcagtgagaaatcaggaaaggatcgttgcttcccaaccgaaagaaacatcaaatagaggtgctcacaaaaggtgctggacaaaggaggaggaagaattactaataagactggaggctcagttcgagggaaacaaaaatattaataagcttattgcagaacacataaccaccaaaacagctaagcagatcagtgacaaaaggcgattgctgtccagaaagccagcagaggagccacgtgaggagcctggaacgtgtcatcacaccaggagagcagctgcgagcctgagaacggagcctgagatgagtcatcacgcccaggcagaggacagagataatggacctgggagacgccctctgccaggcagggcagctgccggagggagaacaatggacgagataagacgccaccctgataagggcaacggacagcagagacccaccaagcaaaaatcagaagaacagctgcaggcttactataaaaagacactagaggaacgactttcagctggggcacttaacaccttcccccgagcattcaagcaggtaatggaaggccgggatataaagctagtaatcaatcagacagcgcaggactacttcggatgcctggaatccataagccaaataagaacggcaacccgagataaaaaggacacggtgacccgggagaaacacccaaagaaaccttttcagaagtggatgaagaagagagcaatcaaaaaaggtaattatcttcggttccagcgtttattttatcttgatagagggaaactggctaaaatcattttagatgatattgaatgcttgtcttgtgacataccactcagtgaaatttattcggtttttaaaacaagatgggaaacaactggtagctttaaaagccttggggactttaaaacttacgggaaggctgacaacactgccttcagagaattaattacggctaaagaaattgagaaaaatgtgcaggaaatgagcaaaggctcggctcccggtccagacgggattactcttggggacgtcgtaaagatggatcccgagttttcccggaccatggagattttcaatttatggttaacaactggtaaaatcccggacatggtgagggggtgcagaaccgttttgattccaaaatcatcagacccggatcgtttgaaagacattaataactggagacctatcacgatcggttccatcttgctgagactgttctccaggattgtaacagctaggctgagcaaagcgtgccccctgaacccaaggcaaagaggctttatcagagcggcgggatgctctgaaaacttaaaactcctgcaaactataatttggtcggccaaaagagaacacagaccactgggtgttgtattcgtggacatcgccaaggcttttgacaccgtaagccaccagcacatcattcatgctttgcagcaaagagaggtggatccccacatcgtcggtctggtgagcaatatgtacgagaacatcagtacgtatatcaccacaaagaggaacacacacacagacaaaatccagatccgggttggagtaaagcagggtgacccgatgtcgccccttttatttaacctggcaatggaccctctattatgcaagctggaagagagtggcaaaggataccaccgaggacagagcagcatcacagcgatggcatttgcagacgatctggttttgctgagcgactcctgggaaaatatgaatacaaatattagcatactggagaccttctgcaatctgaccggactcaaaacacaggggcaaaagtgccacggcttttacatcaagccgacaaaggactcttacaccatcaatgactgcgctgcctggactatcaacggcacacccctgaacatgatcgaccccggcgaatctgagaaatacctcggcctgcagtttgacccgtggattggaatagcaaggtccggtctctccacaaaactagatttttggcttcagcggatcgatcaagcaccacttaaacctctgcagaaactggatattctcaaaacatacaccatccctcggctgatctacatagctgaccactcagaagtgaaaactgcactactcgaaacccttgaccagaagatccggacagcggtcaaggaatggcttcacctacctccgtgcacctgcgatgccatcctgtactcgagcacgagagacggcggtttgggcatcaccaaattggcaggactgatccccagcgtgcaggcccgtagactgcatcggatcgcacagtcatctgacgatacgatgaaatgcttcatggaaaaagagaaaatggaacagctgcataagaaattgtggattcaagctggaggggacagagagaacataccctcgatttgggaagcaccaccgtcgagtgaaccaccaaacaacgtgagcacaaattcggaatgggaagcaccgacccagaaagataaatttccaaagccttgcaattggaggaaaaacgaattcaaaaaatggaccaaattggcatcccaaggccgcggaattgtaaattttgaaagagacaaaattagtaaccattggatccaatactacagacgcatacctcacaggaaactcctcactgcactacaactcagggccaacgtttaccccacgagagaatttctagccaggggtagacaagaccaatacatcaaggcgtgtaggcactgcgatgcggacattgaatcctgcgcccacatcatcggcaactgcccagtgacacaggacgcccgaatcaagaggcacaattacatctgcgaactgcttctcgaggaggcgaagaagaaggactgggtagtgttcaaggaaccgcacataagggattccaacaaggaactgtacaaacctgacctgatatttgtgaaggatgcccgtgcacttgtcgtggatgtgacagtacggtatgaagcagccaaatcatcgctggaggaagccgctgcagagaaagtgagaaagtacaaacacctggaaacggaagtaagacatctcacgaatgcaaaggacgttacttttgtgggctttcccctaggagcgcgggggaaatggcaccaagataactttaaacttttgactgagcttggcctctccaaatcgaggcaagtgaaaatggcagagactttttccacagtagcgctcttttcatctgtggacattgtacatatgtttgccagtagggccagaaaatctatggttatgtgataataggctgccttctgcggggcttgccttctggccatgcccttcttctctcccttgcacctgtacctcttggtctttgaataaagcctgagtaggaaggaccggtagacatgataagatacattgatgagtttggacaaaccacaactagaatgcagtgaaaaaaatgctttatttgtgaaatttgtgatgctattgctttatttgtaaccattataagctgcaataaacaagttaacaacaacaaaaaaaaaaaaaaaaaaaaaaaaaaaaaaacgttgactaaaaaaaaaaaaaaaaaaaaaaaaaaaaaaaaaaaaaaaaaaaaaaaaaaaaaaaaaaaaaaaaaaaaaa

SEQ ID NO: 11488 - DNA, 4703 bp, synthetic construct
  source 1..4703: mol_type = other DNA
ggtctagttacaactgggcatcgctgcagagatcgcacctcctcgtggtcccgctggtagcccttcgaagggtgactaagtcgatctctgccccaggtacggagccgttgggactcaccagtccaacgtaactcctgcctaaattcggtgaaacaaattcctcggtaaaaagccccatggcttcttgcccgaaacctggccccccggtttcagcaggggcaatgagtttggaaagtggactgaccacccactccgttctcgccatcgaacgtggtcccaattcgttggcaaattccggatcagactttgggggggggggtctggggctaccgttacgcctattgagggtatcggtcggcactcagacctcccgctccgactgggtagacctggtgtcctggagccacccaggacccacgtctaagtcccagcaggttgacctggtgtctttatttcctaaacaccgggttgacctgttatccaaaaacgaccaggtagacctggtggctcaatttttaccatctaaatttccccccaatttggcagaaaatgatttggctttgctggtgaacttagagttctacagatcggatttgcatgtgtatgagtgtgttcattttgctgcacattgggagggattaagtggtttgcctgaggtgtatgaacaacttgcaccacaaccgtgtgtgggagaaactttacattctagcctcccacgagacagtgaactgtttgtgcctgaagaggggagcagcgagaaggagagcgaggacgcgccaaaaacatctcctccgacgcctgggaaacatggtttggaacagactggggaggaaaaagtgatggtgactgttcctgacaaaaatccaccttgtccttgctgtggtacccgggtaaactctgtgttgaatctgattgaacatctgaaagtgtcacacgggaaaaggggggtttgttttcggtgtgcaaaatgtggaaaggaaaatagtaactatcacagtgttgtttgtcattttaagaaatgcaggggtccagagacggagaaagccccagctggggagtggatttgtgaggtatgcaacagagattttacaaccaaaattggcctgggacaacacaagagattggcacacccagcagtgagaaatcaggaaaggatcgttgcttcccaaccgaaagaaacatcaaatagaggtgctcacaaaaggtgctggacaaaggaggaggaagaattactaataagactggaggctcagttcgagggaaacaaaaatattaataagcttattgcagaacacataaccaccaaaacagctaagcagatcagtgacaaaaggcgattgctgtccagaaagccagcagaggagccacgtgaggagcctggaacgtgtcatcacaccaggagagcagctgcgagcctgagaacggagcctgagatgagtcatcacgcccaggcagaggacagagataatggacctgggagacgccctctgccaggcagggcagctgccggagggagaacaatggacgagataagacgccaccctgataagggcaacggacagcagagacccaccaagcaaaaatcagaagaacagctgcaggcttactataaaaagacactagaggaacgactttcagctggggcacttaacaccttcccccgagcattcaagcaggtaatggaaggccgggatataaagctagtaatcaatcagacagcgcaggactacttcggatgcctggaatccataagccaaataagaacggcaacccgagataaaaaggacacggtgacccggaagaaacacccaaagaaaccttttcagaagtggatgaagaagagagcaatcaaaaaaggtaattatcttcggttccagcgtttattttatcttgatagagggaaactggctaaaatcattttagatgatattgaatgcttgtcttgtgacataccactcagtgaaatttattcggtttttaaaacaagatgggaaacaactggtagctttaaaagccttggggactttaaaacttacgggaaggctgacaacactgccttcagagaattaattacggctaaagaaattgagaaaaatgtgcaggaaatgagcaaaggctcggctcccggtccagacgggattactcttggggacgtcgtaaagatggatcccgagttttcccggaccatggagattttcaatttatggttaacaactggtaaaatcccggacatggtgagggggtgcagaaccgttttgattccaaaatcatcagacccggatcgtttgaaagacattaataactggagacctatcacgatcggttccatcttgctgagactgttctccaggattgtaacagctaggctgagcaaagcgtgccccctgaacccaaggcaaagaggctttatcagagcggcgggatgctctgaaaacttaaaactcctgcaaactataatttggtcggccaaaagagaacacagaccactgggtgttgtattcgtggacatcgccaaggcttttgacaccgtaagccaccagcacatcattcatgctttgcagcaaagagaggtggatccccacatcgtcggtctggtgagcaatatgtacgagaacatcagtacgtatatcaccacaaagaggaacacacacacagacaaaatccagatccgggttggagtaaagcagggtgacccgatgtcgccccttttatttaacctggcaatggaccctctattatgcaagctggaagagagtggcaaaggataccaccgaggacagagcagcatcacagcgatggcatttgcagacgatctggttttgctgagcgactcctgggaaaatatgaatacaaatattagcatactggagaccttctgcaatctgaccggactcaaaacacaggggcaaaagtgccacggcttttacatcaagccgacaaaggactcttacaccatcaatgactgcgctgcctggactatcaacggcacacccctgaacatgatcgaccccggcgaatctgagaaatacctcggcctgcagtttgacccgtggattggaatagcaaggtccggtctctccacaaaactagatttttggcttcagcggatcgatcaagcaccacttaaacctctgcagaaaactgatattctcaaaacatacaccatccctcggctgatctacatagctgaccactcagaagtgaaaactgcactactcgaaacccttgaccagaagatccggacagcggtcaaggaatggcttcacctacctccgtgcacctgcgatgccatcctgtactcgagcacgagagacggcggtttgggcatcaccaaattggcaggactgatccccagcgtgcaggcccgtagactgcatcggatcgcacagtcatctgacgatacgatgaaatgcttcatggaaaaagagaaaatggaacagctgcataagaaattgtggattcaagctggaggggacagagagaacataccctcgatttgggaagcaccaccgtcgagtgaaccaccaaacaacgtgagcacaaattcggaatgggaagcaccgacccagaaagataaatttccaaagccttgcaattggaggaaaaacgaattcaaaaaatggaccaaattggcatcccaaggccgcggaattgtaaattttgaaagagacaaaattagtaaccattggatccaatactacagacgcatacctcacaggaaactcctcactgcactacaactcagggccaacgtttaccccacgagagaatttctagccaggggtagacaagaccaatacatcaaggcgtgtaggcactgcgatgcggacattgaatcctgcgcccacatcatcggcaactgcccagtgacacaggacgcccgaatcaagaggcacaattacatctgcgaactgcttctcgaggaggcgaagaagaaggactgggtagtgttcaaggaaccgcacataagggattccaacaaggaactgtacaaacctgacctgatatttgtgaaggatgcccgtgcacttgtcgtggatgtgacagtacggtatgaagcagccaaatcatcgctggaggaagccgctgcagagaaagtgagaaagtacaaacacctggaaacggaagtaagacatctcacgaatgcaaaggacgttacttttgtgggctttcccctaggagcgcgggggaaatggcaccaagataactttaaacttttgactgagcttggcctctccaaatcgaggcaagtgaaaatggcagagactttttccacagtagcgctcttttcatctgtggacattgtacatatgtttgccagtagggccagaaaatctatggttatgtgataataggctgccttctgcggggcttgccttctggccatgcccttcttctctcccttgcacctgtacctcttggtctttgaataaagcctgagtaggaaggaccggtagacatgataagatacattgatgagtttggacaaaccacaactagaatgcagtgaaaaaaatgctttatttgtgaaatttgtgatgctattgctttatttgtaaccattataagctgcaataaacaagttaacaacaacaaaaaaaaaaaaaaaaaaaaaaaaaaaaaaacgttgactaaaaaaaaaaaaaaaaaaaaaaaaaaaaaaaaaaaaaaaaaaaaaaaaaaaaaaaaaaaaaaaaaaaaaa

SEQ ID NO: 11489 - skipped

SEQ ID NO: 11490 - DNA, 4703 bp, synthetic construct
  source 1..4703: mol_type = other DNA
ggtctagttacaactgggcatcgctgcagagatcgcacctcctcgtggtcccgctggtagcccttcgaagggtgactaagtcgatctctgccccaggtacggagccgttgggactcaccagtccaacgtaactcctgcctaaattcggtgaaacaaattcctcggtaaaaagccccatggcttcttgcccgaaacctggccccccggtttcagcaggggcaatgagtttggaaagtggactgaccacccactccgttctcgccatcgaacgtggtcccaattcgttggcaaattccggatcagactttgggggggggggtctggggctaccgttacgcctattgagggtatcggtcggcactcagacctcccgctccgactgggtagacctggtgtcctggagccacccaggacccacgtctaagtcccagcaggttgacctggtgtctttatttcctaaacaccgggttgacctgttatccaaaaacgaccaggtagacctggtggctcaatttttaccatctaaatttccccccaatttggcagaaaatgatttggctttgctggtgaacttagagttctacagatcggatttgcatgtgtatgagtgtgttcattttgctgcacattgggagggattaagtggtttgcctgaggtgtatgaacaacttgcaccacaaccgtgtgtgggagaaactttacattctagcctcccacgagacagtgaactgtttgtgcctgaagaggggagcagcgagaaggagagcgaggacgcgccaaaaacatctcctccgacgcctgggaaacatggtttggaacagactggggaggaaaaagtgatggtgactgttcctgacaaaaatccaccttgtccttgctgtggtacccgggtaaactctgtgttgaatctgattgaacatctgaaagtgtcacacgggaaaaggggggtttgttttcggtgtgcaaaatgtggaaaggaaaatagtaactatcacagtgttgtttgtcattttaagaaatgcaggggtccagagacggagaaagccccagctggggagtggatttgtgaggtatgcaacagagattttacaaccaaaattggcctgggacaacacaagagattggcacacccagcagtgagaaatcaggaaaggatcgttgcttcccaaccgaaagaaacatcaaatagaggtgctcacaaaaggtgctggacaaaggaggaggaagaattactaataagactggaggctcagttcgagggaaacaaaaatattaataagcttattgcagaacacataaccaccaaaacagctaagcagatcagtgacatgaggcgattgctgtccagaaagccagcagaggagccacgtgaggagcctggaacgtgtcatcacaccaggagagcagctgcgagcctgagaacggagcctgagatgagtcatcacgcccaggcagaggacagagataatggacctgggagacgccctctgccaggcagggcagctgccggagggagaacaatggacgagataagacgccaccctgataagggcaacggacagcagagacccaccaagcaaaaatcagaagaacagctgcaggcttactataaaaagacactagaggaacgactttcagctggggcacttaacaccttcccccgagcattcaagcaggtaatggaaggccgggatataaagctagtaatcaatcagacagcgcaggactacttcggatgcctggaatccataagccaaataagaacggcaacccgagataaaaaggacacggtgacccgggagaaacacccaaagaaaccttttcagaagtggatgaagaagagagcaatcaaaaaaggtaattatcttcggttccagcgtttattttatcttgatagagggaaactggctaaaatcattttagatgatattgaatgcttgtcttgtgacataccactcagtgaaatttattcggtttttaaaacaagatgggaaacaactggtagctttaaaagccttggggactttaaaacttacgggaaggctgacaacactgccttcagagaattaattacggctaaagaaattgagaaaaatgtgcaggaaatgagcaaaggctcggctcccggtccagacgggattactcttggggacgtcgtaaagatggatcccgagttttcccggaccatggagattttcaatttatggttaacaactggtaaaatcccggacatggtgagggggtgcagaaccgttttgattccaaaatcatcagacccggatcgtttgaaagacattaataactggagacctatcacgatcggttccatcttgctgagactgttctccaggattgtaacagctaggctgagcaaagcgtgccccctgaacccaaggcaaagaggctttatcagagcggcgggatgctctgaaaacttaaaactcctgcaaactataatttggtcggccaaaagagaacacagaccactgggtgttgtattcgtggacatcgccaaggcttttgacaccgtaagccaccagcacatcattcatgctttgcagcaaagagaggtggatccccacatcgtcggtctggtgagcaatatgtacgagaacatcagtacgtatatcaccacaaagaggaacacacacacagacaaaatccagatccgggttggagtaaagcagggtgacccgatgtcgccccttttatttaacctggcaatggaccctctattatgcaagctggaagagagtggcaaaggataccaccgaggacagagcagcatcacagcgatggcatttgcagacgatctggttttgctgagcgactcctgggaaaatatgaatacaaatattagcatactggagaccttctgcaatctgaccggactcaaaacacaggggcaaaagtgccacggcttttacatcaagccgacaaaggactcttacaccatcaatgactgcgctgcctggactatcaacggcacacccctgaacatgatcgaccccggcgaatctgagaaatacctcggcctgcagtttgacccgtggattggaatagcaaggtccggtctctccacaaaactagatttttggcttcagcggatcgatcaagcaccacttaaacctctgcagaaaactgatattctcaaaacatacaccatccctcggctgatctacatagctgaccactcagaagtgaaaactgcactactcgaaacccttgaccagaagatccggacagcggtcaaggaatggcttcacctacctccgtgcacctgcgatgccatcctgtactcgagcacgagagacggcggtttgggcatcaccaaattggcaggactgatccccagcgtgcaggcccgtagactgcatcggatcgcacagtcatctgacgatacgatgaaatgcttcatggaaaaagagaaaatggaacagctgcataagaaattgtggattcaagctggaggggacagagagaacataccctcgatttgggaagcaccaccgtcgagtgaaccaccaaacaacgtgagcacaaattcggaatgggaagcaccgacccagaaagataaatttccaaagccttgcaattggaggaaaaacgaattcaaaaaatggaccaaattggcatcccaaggccgcggaattgtaaattttgaaagagacaaaattagtaaccattggatccaatactacagacgcatacctcacaggaaactcctcactgcactacaactcagggccaacgtttaccccacgagagaatttctagccaggggtagacaagaccaatacatcaaggcgtgtaggcactgcgatgcggacattgaatcctgcgcccacatcatcggcaactgcccagtgacacaggacgcccgaatcaagaggcacaattacatctgcgaactgcttctcgaggaggcgaagaagaaggactgggtagtgttcaaggaaccgcacataagggattccaacaaggaactgtacaaacctgacctgatatttgtgaaggatgcccgtgcacttgtcgtggatgtgacagtacggtatgaagcagccaaatcatcgctggaggaagccgctgcagagaaagtgagaaagtacaaacacctggaaacggaagtaagacatctcacgaatgcaaaggacgttacttttgtgggctttcccctaggagcgcgggggaaatggcaccaagataactttaaacttttgactgagcttggcctctccaaatcgaggcaagtgaaaatggcagagactttttccacagtagcgctcttttcatctgtggacattgtacatatgtttgccagtagggccagaaaatctatggttatgtgataataggctgccttctgcggggcttgccttctggccatgcccttcttctctcccttgcacctgtacctcttggtctttgaataaagcctgagtaggaaggaccggtagacatgataagatacattgatgagtttggacaaaccacaactagaatgcagtgaaaaaaatgctttatttgtgaaatttgtgatgctattgctttatttgtaaccattataagctgcaataaacaagttaacaacaacaaaaaaaaaaaaaaaaaaaaaaaaaaaaaaacgttgactaaaaaaaaaaaaaaaaaaaaaaaaaaaaaaaaaaaaaaaaaaaaaaaaaaaaaaaaaaaaaaaaaaaaaa

SEQ ID NO: 11491-11492 - skipped (2 entries)

SEQ ID NO: 11493 - DNA, 4703 bp, synthetic construct
  source 1..4703: mol_type = other DNA
ggtctagttacaactgggcatcgctgcagagatcgcacctcctcgtggtcccgctggtagcccttcgaagggtgactaagtcgatctctgccccaggtacggagccgttgggactcaccagtccaacgtaactcctgcctaaattcggtgaaacaaattcctcggtaaaaagccccatggcttcttgcccgaaacctggccccccggtttcagcaggggcaatgagtttggaaagtggactgaccacccactccgttctcgccatcgaacgtggtcccaattcgttggcaaattccggatcagactttgggggggggggtctggggctaccgttacgcctattgagggtatcggtcggcactcagacctcccgctccgactgggtagacctggtgtcctggagccacccaggacccacgtctaagtcccagcaggttgacctggtgtctttatttcctaaacaccgggttgacctgttatccaaaaacgaccaggtagacctggtggctcaatttttaccatctaaatttccccccaatttggcagaaaatgatttggctttgctggtgaacttagagttctacagatcggatttgcatgtgtatgagtgtgttcattttgctgcacattgggagggattaagtggtttgcctgaggtgtatgaacaacttgcaccacaaccgtgtgtgggagaaactttacattctagcctcccacgagacagtgaactgtttgtgcctgaagaggggagcagcgagaaggagagcgaggacgcgccaaaaacatctcctccgacgcctgggaaacatggtttggaacagactggggaggaaaaagtgatggtgactgttcctgacaaaaatccaccttgtccttgctgtggtacccgggtaaactctgtgttgaatctgattgaacatctgaaagtgtcacacgggaaaaggggggtttgttttcggtgtgcaaaatgtggaaaggaaaatagtaactatcacagtgttgtttgtcattttaagaaatgcaggggtccagagacggagaaagccccagctggggagtggatttgtgaggtatgcaacagagattttacaaccaaaattggcctgggacaacacaagagattggcacacccagcagtgagaaatcaggaaaggatcgttgcttcccaaccgaaagaaacatcaaatagaggtgctcacaaaaggtgctggacaaaggaggaggaagaattactaataagactggaggctcagttcgagggaaacaaaaatattaataagcttattgcagaacacataaccaccaaaacagctaagcagatcagtgacaaaaggcgattgctgtccagaaagccagcagaggagccacgtatggagcctggaacgtgtcatcacaccaggagagcagctgcgagcctgagaacggagcctgagatgagtcatcacgcccaggcagaggacagagataatggacctgggagacgccctctgccaggcagggcagctgccggagggagaacaatggacgagataagacgccaccctgataagggcaacggacagcagagacccaccaagcaaaaatcagaagaacagctgcaggcttactataaaaagacactagaggaacgactttcagctggggcacttaacaccttcccccgagcattcaagcaggtaatggaaggccgggatataaagctagtaatcaatcagacagcgcaggactacttcggatgcctggaatccataagccaaataagaacggcaacccgagataaaaaggacacggtgacccgggagaaacacccaaagaaaccttttcagaagtggatgaagaagagagcaatcaaaaaaggtaattatcttcggttccagcgtttattttatcttgatagagggaaactggctaaaatcattttagatgatattgaatgcttgtcttgtgacataccactcagtgaaatttattcggtttttaaaacaagatgggaaacaactggtagctttaaaagccttggggactttaaaacttacgggaaggctgacaacactgccttcagagaattaattacggctaaagaaattgagaaaaatgtgcaggaaatgagcaaaggctcggctcccggtccagacgggattactcttggggacgtcgtaaagatggatcccgagttttcccggaccatggagattttcaatttatggttaacaactggtaaaatcccggacatggtgagggggtgcagaaccgttttgattccaaaatcatcagacccggatcgtttgaaagacattaataactggagacctatcacgatcggttccatcttgctgagactgttctccaggattgtaacagctaggctgagcaaagcgtgccccctgaacccaaggcaaagaggctttatcagagcggcgggatgctctgaaaacttaaaactcctgcaaactataatttggtcggccaaaagagaacacagaccactgggtgttgtattcgtggacatcgccaaggcttttgacaccgtaagccaccagcacatcattcatgctttgcagcaaagagaggtggatccccacatcgtcggtctggtgagcaatatgtacgagaacatcagtacgtatatcaccacaaagaggaacacacacacagacaaaatccagatccgggttggagtaaagcagggtgacccgatgtcgccccttttatttaacctggcaatggaccctctattatgcaagctggaagagagtggcaaaggataccaccgaggacagagcagcatcacagcgatggcatttgcagacgatctggttttgctgagcgactcctgggaaaatatgaatacaaatattagcatactggagaccttctgcaatctgaccggactcaaaacacaggggcaaaagtgccacggcttttacatcaagccgacaaaggactcttacaccatcaatgactgcgctgcctggactatcaacggcacacccctgaacatgatcgaccccggcgaatctgagaaatacctcggcctgcagtttgacccgtggattggaatagcaaggtccggtctctccacaaaactagatttttggcttcagcggatcgatcaagcaccacttaaacctctgcagaaaactgatattctcaaaacatacaccatccctcggctgatctacatagctgaccactcagaagtgaaaactgcactactcgaaacccttgaccagaagatccggacagcggtcaaggaatggcttcacctacctccgtgcacctgcgatgccatcctgtactcgagcacgagagacggcggtttgggcatcaccaaattggcaggactgatccccagcgtgcaggcccgtagactgcatcggatcgcacagtcatctgacgatacgatgaaatgcttcatggaaaaagagaaaatggaacagctgcataagaaattgtggattcaagctggaggggacagagagaacataccctcgatttgggaagcaccaccgtcgagtgaaccaccaaacaacgtgagcacaaattcggaatgggaagcaccgacccagaaagataaatttccaaagccttgcaattggaggaaaaacgaattcaaaaaatggaccaaattggcatcccaaggccgcggaattgtaaattttgaaagagacaaaattagtaaccattggatccaatactacagacgcatacctcacaggaaactcctcactgcactacaactcagggccaacgtttaccccacgagagaatttctagccaggggtagacaagaccaatacatcaaggcgtgtaggcactgcgatgcggacattgaatcctgcgcccacatcatcggcaactgcccagtgacacaggacgcccgaatcaagaggcacaattacatctgcgaactgcttctcgaggaggcgaagaagaaggactgggtagtgttcaaggaaccgcacataagggattccaacaaggaactgtacaaacctgacctgatatttgtgaaggatgcccgtgcacttgtcgtggatgtgacagtacggtatgaagcagccaaatcatcgctggaggaagccgctgcagagaaagtgagaaagtacaaacacctggaaacggaagtaagacatctcacgaatgcaaaggacgttacttttgtgggctttcccctaggagcgcgggggaaatggcaccaagataactttaaacttttgactgagcttggcctctccaaatcgaggcaagtgaaaatggcagagactttttccacagtagcgctcttttcatctgtggacattgtacatatgtttgccagtagggccagaaaatctatggttatgtgataataggctgccttctgcggggcttgccttctggccatgcccttcttctctcccttgcacctgtacctcttggtctttgaataaagcctgagtaggaaggaccggtagacatgataagatacattgatgagtttggacaaaccacaactagaatgcagtgaaaaaaatgctttatttgtgaaatttgtgatgctattgctttatttgtaaccattataagctgcaataaacaagttaacaacaacaaaaaaaaaaaaaaaaaaaaaaaaaaaaaaacgttgactaaaaaaaaaaaaaaaaaaaaaaaaaaaaaaaaaaaaaaaaaaaaaaaaaaaaaaaaaaaaaaaaaaaaaa

SEQ ID NO: 11494 - DNA, 5156 bp, synthetic construct; identical to SEQ ID NO: 10277
  source 1..5156: mol_type = other DNA

SEQ ID NO: 11495 - DNA, 4703 bp, synthetic construct; identical to SEQ ID NO: 10279
  source 1..4703: mol_type = other DNA

SEQ ID NO: 11496 - DNA, 4727 bp, synthetic construct; identical to SEQ ID NO: 10281
  source 1..4727: mol_type = other DNA

SEQ ID NO: 11497 - DNA, 4399 bp, synthetic construct; identical to SEQ ID NO: 10259
  source 1..4399: mol_type = other DNA

SEQ ID NO: 11498 - DNA, 4195 bp, synthetic construct; identical to SEQ ID NO: 10265
  source 1..4195: mol_type = other DNA

SEQ ID NO: 11499 - DNA, 4703 bp, synthetic construct
  source 1..4703: mol_type = other DNA
ggtctagttacaactgggcatcgctgcagagatcgcacctcctcgtggtcccgctggtagcccttcgaagggtgactaagtcgatctctgccccaggtacggagccgttgggactcaccagtccaacgtaactcctgcctaaattcggtgaaacaaattcctcggtaaaaagccccatggcttcttgcccgaaacctggccccccggtttcagcaggggcaatgagtttggaaagtggactgaccacccactccgttctcgccatcgaacgtggtcccaattcgttggcaaattccggatcagactttgggggggggggtctggggggcccgttacgcctattgagggtatcggtcggcactcagacctcccgctccgactgggtagacctggtgtcctggagccacccaggacccacgtctaagtcccagcaggttgacctggtgtctttatttcctaaacaccgggttgacctgttatccaaaaacgaccaggtagacctggtggctcaatttttaccatctaaatttccccccaatttggcagaaaatgatttggctttgctggtgaacttagagttctacagatcggatttgcatgtgtatgagtgtgttcattttgctgcacattgggagggattaagtggtttgcctgaggtgtatgaacaacttgcaccacaaccgtgtgtgggagaaactttacattctagcctcccacgagacagtgaactgtttgtgcctgaagaggggagcagcgagaaggagagcgaggacgcgccaaaaacatctcctccgacgcctgggaaacatggtttggaacagactggggaggaaaaagtgatggtgactgttcctgacaaaaatccaccttgtccttgctgtggtacccgggtaaactctgtgttgaatctgattgaacatctgaaagtgtcacacgggaaaaggggggtttgttttcggtgtgcaaaatgtggaaaggaaaatagtaactatcacagtgttgtttgtcattttaagaaatgcaggggtccagagacggagaaagccccagctggggagtggatttgtgaggtatgcaacagagattttacaaccaaaattggcctgggacaacacaagagattggcacacccagcagtgagaaatcaggaaaggatcgttgcttcccaaccgaaagaaacatcaaatagaggtgctcacaaaaggtgctggacaaaggaggaggaagaattactaataagactggaggctcagttcgagggaaacaaaaatattaataagcttattgcagaacacataaccaccaaaacagctaagcagatcagtgacatgaggcgattgctgtccagaaagccagcagaggagccacgtgaggagcctggaacgtgtcatcacaccaggagagcagctgcgagcctgagaacggagcctgagatgagtcatcacgcccaggcagaggacagagataatggacctgggagacgccctctgccaggcagggcagctgccggagggagaacaatggacgagataagacgccaccctgataagggcaacggacagcagagacccaccaagcaaaaatcagaagaacagctgcaggcttactataaaaagacactagaggaacgactttcagctggggcacttaacaccttcccccgagcattcaagcaggtaatggaaggccgggatataaagctagtaatcaatcagacagcgcaggactacttcggatgcctggaatccataagccaaataagaacggcaacccgagataaaaaggacacgggcacccgggagaaacacccaaagaaaccttttcagaagtggatgaaggacagagcaatcaaaaaaggtaattatcttcggttccagcgtttattttatcttgatagagggaaactggctaaaatcattttagatgatattgaatgcttgtcttgtgacataccactcagtgaaatttattcggtttttaaaacaagatgggaaacaactggtagctttaaaagccttggggactttaaaacttacgggaaggctgacaacactgccttcagagaattaattacggctaaagaaattgagaaaaatgtgcaggaaatgagcaaaggctcggctcccggtccagacgggattactcttggggacgtcgtaaagatggatcccgagttttcccggaccatggagattttcaatttatggttaacaactggtaaaatcccggacatggtgagggggtgcagaaccgttttgattccaaaatcatcaaagccggatcgtttgaaagacattaataactggagacctatcacgatcggttccatcttgctgagactgttctccaggattgtaacagctaggctgagcaaagcgtgccccctgaacccaaggcaaagaggctttatcagagcggcgggatgctctgaaaacttaaaactcctgcaaactataatttggtcggccaaaagagaacacagaccactgggtgttgtattcgtggacatcgccaaggcttttgacaccgtaagccaccagcacatcattcatgctttgcagcaaagagaggtggatccccacatcgtcggtctggtgagcaatatgtacgagaacatcagtacgtatatcaccacaaagaggaacacacacacagacaaaatccagatccgggttggagtaaagcagggtgacccgatgtcgccccttttatttaacctggcaatggaccctctattatgcaagctggaagagagtggcaaaggataccaccgaggacagagcagcatcacagcgatggcatttgcagacgatctggttttgctgagcgactcctgggaaaatatgaatacaaatattagcatactggagaccttctgcaatctgaccggactcaaaacacaggggcaaaagtgccacggcttttacatcaagccgacaaaggactcttacaccatcaatgactgcgctgcctggactatcaacggcacacccctgaacatgatcgaccccggcgaatctgagaaatacctcggcctgcagtttgacccgtggattggaatagcaaggtccggtctctccacaaaactagatttttggcttcagcggatcgatcaagcaccacttaaacctctgcagaaaactgatattctcaaaacatacaccatccctcggctgatctacatagctgaccactcagaagtgaaaactgcactactcgaaacccttgaccagaagatccggacagcggtcaaggaatggcttcacctacctccgtgcacctgcgatgccatcctgtactcgagcacgagagacggcggtttgggcatcaccaaattggcaggactgatccccagcgtgcaggcccgtagactgcatcggatcgcacagtcatctgacgatacgatgaaatgcttcatggaaaaagagaaaatggaacagctgcataagaaattgtggattcaagctggaggggacagagagaacataccctcgatttgggaagcaccaccgtcgagtgaaccaccaaacaacgtgagcacaaattcggaatgggaagcaccgacccagaaagataaatttccaaagccttgcaattggaggaaaaacgaattcaaaaaatggaccaaattggcatcccaaggccgcggaattgtaaattttgaaagagacaaaattagtaaccattggatccaatactacagacgcatacctcacaggaaactcctcactgcactacaactcagggccaacgtttaccccacgagagaatttctagccaggggtagacaagaccaatacatcaaggcgtgtaggcactgcgatgcggacattgaatcctgcgcccacatcatcggcaactgcccagtgacacaggacgcccgaatcaagaggcacaattacatctgcgaactgcttctcgaggaggcgaagaagaaggactgggtagtgttcaaggaaccgcacataagggattccaacaaggaactgtacaaacctgacctgatatttgtgaaggatgcccgtgcacttgtcgtggatgtgacagtacggtatgaagcagccaaatcatcgctggaggaagccgctgcagagaaagtgagaaagtacaaacacctggaaacggaagtaagacatctcacgaatgcaaaggacgttacttttgtgggctttcccctaggagcgcgggggaaatggcaccaagataactttaaacttttgactgagcttggcctctccaaatcgaggcaagtgaaaatggcagagactttttccacagtagcgctcttttcatctgtggacattgtacatatgtttgccagtagggccagaaaatctatggttatgtgataataggctgccttctgcggggcttgccttctggccatgcccttcttctctcccttgcacctgtacctcttggtctttgaataaagcctgagtaggaaggaccggtagacatgataagatacattgatgagtttggacaaaccacaactagaatgcagtgaaaaaaatgctttatttgtgaaatttgtgatgctattgctttatttgtaaccattataagctgcaataaacaagttaacaacaacaaaaaaaaaaaaaaaaaaaaaaaaaaaaaaacgttgactaaaaaaaaaaaaaaaaaaaaaaaaaaaaaaaaaaaaaaaaaaaaaaaaaaaaaaaaaaaaaaaaaaaaaa

SEQ ID NO: 11500 - DNA, 4564 bp, synthetic construct
  source 1..4564: mol_type = other DNA
ggtctagttacaactgggcatcgctgcagagatcgcacctcctcgtggtcccgctggtagcccttcgaagggtgactaagtcgatctctgccccaggtacggagccgttgggactcaccagtccaacgtaactcctgcctaaattcggtgaaacaaattcctcggtaaaaagccccatggcttcttgcccgaaacctggccccccggtttcagcaggggcaatgagtttggaaagtggactgaccacccactccgttctcgccatcgaacgtggtcccaattcgttggcaaattccggatcagactttgggggggggggtctggggctaccgttacgcctattgagggtatcggtcggcactcagacctcccgctccgactgggtagacctggtgtcctggagccacccaggacccacgtctaagtcccagcaggttgacctggtgtctttatttcctaaacaccgggttgacctgttatccaaaaacgaccaggtagacctggtggctcaatttttaccatctaaatttccccccaatttggcagaaaatgatttggctttgctggtgaacttagagttctacagatcggatttgcatgtgtatgagtgtgttcattttgctgcacattgggagggattaagtggtttgcctgaggtgtatgaacaacttgcaccacaaccgtgtgtgggagaaactttacattctagcctcccacgagacagtgaactgtttgtgcctgaagaggggagcagcgagaaggagagcgaggacgcgccaaaaacatctcctccgacgcctgggaaacatggtttggaacagactggggaggaaaaagtgatggtgactgttcctgacaaaaatccaccttgtccttgctgtggtacccgggtaaactctgtgttgaatctgattgaacatctgaaagtgtcacacgggaaaaggggggtttgttttcggtgtgcaaaatgtggaaaggaaaatagtaactatcacagtgttgtttgtcattttccaaaatgcaggggtccagagacggagaaagccccagctggggagtggatttgtgaggtatgcaacagagattttacaaccaaaattggcctgggacaacacaagagattggcacacccagcagtgagaaatcaggaaaggatcgttgcttcccaaccgaaagaaacatcaaatagaggtgctcacaaaaggtgctggacaaaggaggaggaagaattactaataagactggaggctcagttcgagggaaacaaaaatattaataagcttattgcagaacacataaccaccaaaacagctaagcagatcagtgacaaaaggcgattgctgtccagaaagccagcagaggagccacgtgaggagcctggaacgtgtcatcacaccaggagagcagctgcgagcctgagaacggagcctgagatgagtcatcacgcccaggcagaggacagagataatggacctgggagacgccctctgccaggcagggcagctgccggagggagaacaatggacgagataagacgccaccctgataagggcaacggacagcagagacccaccaagcaaaaatcagaagaacagctgcaggcttactataaaaagacactagaggaacgactttcagctggggcacttaacaccttcccccgagcattcaagcaggtaatggaaggccgggatataaagctagtaatcaatcagacagcgcaggactgcttcggatgcctggaatccataagccaaataagaacggcaacccgagataaaaaggacacggtgacccgggagaaacacccaaagaaaccttttcagaagtggatgaagaagagagcaatcaaaaaaggtaattatcttcggttccagcgtttattttatcttgatagagggaaactggctaaaatcattttagatgatattgaatgcttgtcttgtgacataccactcagtgaaatttattcggtttttaaaacaagatgggaaacaactggtagctttaaaagccttggggactttaaaacttacgggaaggctgacaacactgccttcagagaattaattacggctaaagaaattgagaaaaatgtgcaggaaatgagcaaaggctcggctcccggtccagacgggattactcttggggacgtcgtaaagatggatcccgagttttcccggaccatggagattttcaatttatggttaacaactggtaaaatcccggacatggtgagggggtgcagaaccgttttgattccaaaatcatcaaagccggatcgtttgaaagacattaataactggagacctatcacgatcggttccatcttgctgagactgttctccaggattgtaacagctaggctgagcaaagcgtgccccctgaacccaaggcaaagaggctttatcagagcggcgggatgctctgaaaacttaaaactcctgcaaactataatttggtcggccaaaagagaacacagaccactgggtgttgtattcgtggacatcgccaaggcttttgacaccgtaagccaccagcacatcattcatgctttgcagcaaagagaggtggatccccacatcgtcggtctggtgagcaatatgtacgagaacatcagtacgtatatcaccacaaagaggaacacacacacagacaaaatccagatccgggttggagtaaagcagggtgacccgatgtcgccccttttatttaacctggcaatggaccctctattatgcaagctggaagagagtggcaaaggataccaccgaggacagagcagcatcacagcgatggcatttgcagacgatctggttttgctgagcgactcctgggaaaatatgaatacaaatattagcatactggagaccttctgcaatctgaccggactcaaaacacaggggcaaaagtgccacggcttttacatcaagccgacaaagaagtcttacaccatcaatgactgcgctgcctggactatcaacggcacacccctgaacatgatcgaccccggcgaatctgagaaatacctcggcctgcagtttgacccgtggattggaatagcaaggtccggtctctccacaaaactagatttttggcttcagcggatcgatcaagcaccacttaaacctctgcagaaaactgatattctcaaaacatacaccatccctcggctgatctacatagctgaccactcagaagtgaaaactgcactactcgaaacccttgaccagaagatccggacagcggtcaaggaatggcttcacctacctccgtgcacctgcgatgccatcctgtactcgagcacgagagacggcggtttgggcatcaccaaattggcaggactgatccccagcgtgcaggcccgtagactgcatcggatcgcacagtcatctgacgatacgatgaaatgcttcatggaaaaagagaaaatggaacagctgcataagaaattgtggattcaagctggaggggacagagagaacataccctcgatttgggaagcaccaccgtcgagtgaaccaccaaacaacgtgagcacaaattcggaatgggaagcaccgacccagaaagataaatttccaaagccttgcaattggaggaaaaacgaattcaaaaaatggaccaaattggcatcccaaggccgcggaattgtaaattttgaaagagacaaaattagtaaccattggatccaatactacagacgcatacctcacaggaaactcctcactgcactacaactcagggccaacgtttaccccacgagagaatttctagccaggggtagacaagaccaatacatcaaggcgtgtaggcactgcgatgcggacattgaatcctgcgcccacatcatcggcaactgcccagtgacacaggacgcccgaatcaagaggcacaattacatctgcgaactgcttctcgaggaggcgaagaagaaggactgggtagtgttcaaggaaccgcacataagggattccaacaaggaactgtacaaacctgacctgatatttgtgaaggatgcccgtgcacttgtcgtggatgtgacagtacggtatgaagcagccaaatcatcgctggaggaagccgctgcagagaaagtgagaaagtacaaacacctggaaacggaagtaagacatctcacgaatgcaaaggacgttacttttgtgggctttcccctaggagcgcgggggaaatggcaccaagataactttaaacttttgactgagcttggcctctccaaatcgaggcaagtgaaaatggcagagactttttccacagtagcgctcttttcatctgtggacattgtacatatgtttgccagtagggccagaaaatctatggttatgtgataataggctgccttctgcggggcttgccttctggccatgcccttcttctctcccttgcacctgtacctcttggtctttgaataaagcctgagtaggaaggaccggtaaaaaaaaaaaaaaaaaaaaaaaaaaaaaaacgttgactaaaaaaaaaaaaaaaaaaaaaaaaaaaaaaaaaaaaaaaaaaaaaaaaaaaaaaaaaaaaaaaaaaaaaa

SEQ ID NO: 11501 - DNA, 4564 bp, synthetic construct
  source 1..4564: mol_type = other DNA
ggtctagttacaactgggcatcgctgcagagatcgcacctcctcgtggtcccgctggtagcccttcgaagggtgactaagtcgatctctgccccaggtacggagccgttgggactcaccagtccaacgtaactcctgcctaaattcggtgaaacaaattcctcggtaaaaagccccatggcttcttgcccgaaacctggccccccggtttcagcaggggcaatgagtttggaaagtggactgaccacccactccgttctcgccatcgaacgtggtcccaattcgttggcaaattccggatcagactttgggggggggggtctggggctaccgttacgcctattgagggtatcggtcggcactcagacctcccgctccgactgggtagacctggtgtcctggagccacccaggacccacgtctaagtcccagcaggttgacctggtgtctttatttcctaaacaccgggttgacctgttatccaaaaacgaccaggtagacctggtggctcaatttttaccatctaaatttccccccaatttggcagaaaatgatttggctttgctggtgaacttagagttctacagatcggatttgcatgtgtatgagtgtgttcattttgctgcacattgggagggattaagtggtttgcctgaggtgtatgaacaacttgcaccacaaccgtgtgtgggagaaactttacattctagcctcccacgagacagtgaactgtttgtgcctgaagaggggagcagcgagaaggagagcgaggacgcgccaaaaacatctcctccgacgcctgggaaacatggtttggaacagactggggaggaaaaagtgatggtgactgttcctgacaaaaatccaccttgtccttgctgtggtacccgggtaaactctgtgttgaatctgattgaacatctgaaagtgtcacacgggaaaaggagggtttgttttcggtgtgcaaaatgtggaaaggaaaatagtaactatcacagtgttgtttgtcattttccaaaatgcaggggtccagagacggagaaagccccagctggggagtggatttgtgaggtatgcaacagagattttacaaccaaaattggcctgggacaacacaagagattggcacacccagcagtgagaaatcaggaaaggatcgttgcttcccaaccgaaagaaacatcaaatagaggtgctcacaaaaggtgctggacaaaggaggaggaagaattactaataagactggaggctcagttcgagggaaacaaaaatattaataagcttattgcagaacacataaccaccaaaacagctaagcagatcagtgacaaaaggcgattgctgtccagaaagccagcagaggagccacgtgaggagcctggaacgtgtcatcacaccaggagagcagctgcgagcctgagaacggagcctgagatgagtcatcacgcccaggcagaggacagagataatggacctgggagacgccctctgccaggcagggcagctgccggagggagaacaatggacgagataagacgccaccctgataagggcaacggacagcagagacccaccaagcaaaaatcagaagaacagctgcaggcttactataaaaagacactagaggaacgactttcagctggggcacttaacaccttcccccgagcattcaagcaggtaatggaaggccgggatataaagctagtaatcaatcagacagcgcaggactgcttcggatgcctggaatccataagccaaataagaacggcaacccgagataaaaaggacacggtgacccgggagaaacacccaaagaaaccttttcagaagtggatgaaggacagagcaatcaaaaaaggtaattatcttcggttccagcgtttattttatcttgatagagggaaactggctaaaatcattttagatgatattgaatgcttgtcttgtgacataccactcagtgaaatttattcggtttttaaaacaagatgggaaacaactggtagctttaaaagccttggggactttaaaacttacgggaaggctgacaacactgccttcagagaattaattacggctaaagaaattgagaaaaatgtgcaggaaatgagcaaaggctcggctcccggtccagacgggattactcttggggacgtcgtaaagatggatcccgagttttcccggaccatggagattttcaatttatggttaacaactggtaaaatcccggacatggtgagggggtgcagaaccgttttgattccaaaatcatcaaagccggatcgtttgaaagacattaataactggagacctatcacgatcggttccatcttgctgagactgttctccaggattgtaacagctaggctgagcaaagcgtgccccctgaacccaaggcaaagaggctttatcagagcggcgggatgctctgaaaacttaaaactcctgcaaactataatttggtcggccaaaagagaacacagaccactgggtgttgtattcgtggacatcgccaaggcttttgacaccgtaagccaccagcacatcattcatgctttgcagcaaagagaggtggatccccacatcgtcggtctggtgagcaatatgtacgagaacatcagtacgtatatcaccacaaagaggaacacacacacagacaaaatccagatccgggttggagtaaagcagggtgacccgatgtcgccccttttatttaacctggcaatggaccctctattatgcaagctggaagagagtggcaaaggataccaccgaggacagagcagcatcacagcgatggcatttgcagacgatctggttttgctgagcgactcctgggaaaatatgaatacaaatattagcatactggagaccttctgcaatctgaccggactcaaaacacaggggcaaaagtgccacggcttttacatcaagccgacaaaggactcttacaccatcaatgactgcgctgcctggactatcaacggcacacccctgaacatgatcgaccccggcgaatctgagaaatacctcggcctgcagtttgacccgtggattggaatagcaaggtccggtctctccacaaaactagatttttggcttcagcggatcgatcaagcaccacttaaacctctgcagaaaactgatattctcaaaacatacaccatccctcggctgatctacatagctgaccactcagaagtgaaaactgcactactcgaaacccttgaccagaagatccggacagcggtcaaggaatggcttcacctacctccgtgcacctgcgatgccatcctgtactcgagcacgagagacggcggtttgggcatcaccaaattggcaggactgatccccagcgtgcaggcccgtagactgcatcggatcgcacagtcatctgacgatacgatgaaatgcttcatggaaaaagagaaaatggaacagctgcataagaaattgtggattcaagctggaggggacagagagaacataccctcgatttgggaagcaccaccgtcgagtgaaccaccaaacaacgtgagcacaaattcggaatgggaagcaccgacccagaaagataaatttccaaagccttgcaattggaggaaaaacgaattcaaaaaatggaccaaattggcatcccaaggccgcggaattgtaaattttgaaagagacaaaattagtaaccattggatccaatactacagacgcatacctcacaggaaactcctcactgcactacaactcagggccaacgtttaccccacgagagaatttctagccaggggtagacaagaccaatacatcaaggcgtgtaggcactgcgatgcggacattgaatcctgcgcccacatcatcggcaactgcccagtgacacaggacgcccgaatcaagaggcacaattacatctgcgaactgcttctcgaggaggcgaagaagaaggactgggtagtgttcaaggaaccgcacataagggattccaacaaggaactgtacaaacctgacctgatatttgtgaaggatgcccgtgcacttgtcgtggatgtgacagtacggtatgaagcagccaaatcatcgctggaggaagccgctgcagagaaagtgagaaagtacaaacacctggaaacggaagtaagacatctcacgaatgcaaaggacgttacttttgtgggctttcccctaggagcgcgggggaaatggcaccaagataactttaaacttttgactgagcttggcctctccaaatcgaggcaagtgaaaatggcagagactttttccacagtagcgctcttttcatctgtggacattgtacatatgtttgccagtagggccagaaaatctatggttatgtgataataggctgccttctgcggggcttgccttctggccatgcccttcttctctcccttgcacctgtacctcttggtctttgaataaagcctgagtaggaaggaccggtaaaaaaaaaaaaaaaaaaaaaaaaaaaaaaacgttgactaaaaaaaaaaaaaaaaaaaaaaaaaaaaaaaaaaaaaaaaaaaaaaaaaaaaaaaaaaaaaaaaaaaaaa

SEQ ID NO: 11502 - DNA, 4730 bp, synthetic construct; identical to SEQ ID NO: 10286
  source 1..4730: mol_type = other DNA

SEQ ID NO: 11503 - DNA, 4730 bp, synthetic construct; identical to SEQ ID NO: 10270
  source 1..4730: mol_type = other DNA

SEQ ID NO: 11504 - DNA, 4730 bp, synthetic construct; identical to SEQ ID NO: 10285
  source 1..4730: mol_type = other DNA

SEQ ID NO: 11505 - DNA, 4564 bp, synthetic construct
  source 1..4564: mol_type = other DNA
ggtctagttacaactgggcatcgctgcagagatcgcacctcctcgtggtcccgctggtagcccttcgaagggtgactaagtcgatctctgccccaggtacggagccgttgggactcaccagtccaacgtaactcctgcctaaattcggtgaaacaaattcctcggtaaaaagccccatggcttcttgcccgaaacctggccccccggtttcagcaggggcaatgagtttggaaagtggactgaccacccactccgttctcgccatcgaacgtggtcccaattcgttggcaaattccggatcagactttgggggggggggtctggggctaccgttacgcctattgagggtatcggtcggcactcagacctcccgctccgactgggtagacctggtgtcctggagccacccaggacccacgtctaagtcccagcaggttgacctggtgtctttatttcctaaacaccgggttgacctgttatccaaaaacgaccaggtagacctggtggctcaatttttaccatctaaatttccccccaatttggcagaaaatgatttggctttgctggtgaacttagagttctacagatcggatttgcatgtgtatgagtgtgttcattttgctgcacattgggagggattaagtggtttgcctgaggtgtatgaacaacttgcaccacaaccgtgtgtgggagaaactttacattctagcctcccacgagacagtgaactgtttgtgcctgaagaggggagcagcgagaaggagagcgaggacgcgccaaaaacatctcctccgacgcctgggaaacatggtttggaacagactggggaggaaaaagtgatggtgactgttcctgacaaaaatccaccttgtccttgctgtggtacccgggtaaactctgtgttgaatctgattgaacatctgaaagtgtcacacgggaaaaggggggtttgttttcggtgtgcaaaatgtggaaaggaaaatagtaactatcacagtgttgtttgtcattttccaaaatgcaggggtccagagacggagaaagccccagctggggagtggatttgtgaggtatgcaacagagattttacaaccaaaattggcctgggacaacacaagagattggcacacccagcagtgagaaatcaggaaaggatcgttgcttcccaaccgaaagaaacatcaaatagaggtgctcacaaaaggtgctggacaaaggaggaggaagaattactaataagactggaggctcagttcgagggaaacaaaaatattaataagcttattgcagaacacataaccaccaaaacagctaagcagatcagtgacaaaaggcgattgctgtccagaaagccagcagaggagccacgtgaggagcctggaacgtgtcatcacaccaggagagcagctgcgagcctgagaacggagcctgagatgagtcatcacgcccaggcagaggacagagataatggacctgggagacgccctctgccaggcagggcagctgccggagggagaacaatggacgagataagacgccaccctgataagggcaacggacagcagagacccaccaagcaaaaatcagaagaacagctgcaggcttactataaaaagacactagaggaacgactttcagctggggcacttaacaccttcccccgagcattcaagcaggtaatggaaggccgggatataaagctagtaatcaatcagacagcgcaggactgcttcggatgcctggaatccataagccaaataagaacggcaacccgagataaaaaggacacggtgacccgggagaaacacccaaagaaaccttttcagaagtggatgaagaagagagcaatcaaaaaaggtaattatcttcggttccagcgtttattttatcttgatagagggaaactggctaaaatcattttagatgatattgaatgcttgtcttgtgacataccactcagtgaaatttattcggtttttaaaacaagatgggaaacaactggtagctttaaaagccttggggactttaaaacttacgggaaggctgacaacactgccttcagagaattaattacggctaaagaaattgagaaaaatgtgcaggaaatgagcaaaggctcggctcccggtccagacgggattactcttggggacgtcgtaaagatggatcccgagttttcccggaccatggagattttcaatttatggttaacaactggtaaaatcccggacatggtgagggggtgcagaaccgttttgattccaaaatcatcaaagccggatcgtttgaaagacattaataactggagacctatcacgatcggttccatcttgctgagactgttctccaggattgtaacagctaggctgagcaaagcgtgccccctgaacccaaggcaaagaggctttatcagagcggcgggatgctctgaaaacttaaaactcctgcaaactataatttggtcggccaaaagagaacacagaccactgggtgttgtattcgtggacatcgccaaggcttttgacaccgtaagccaccagcacatcattcatgctttgcagcaaagagaggtggatccccacatcgtcggtctggtgagcaatatgtacgagaacatcagtacgtatatcaccacaaagaggaacacacacacagacaaaatccagatccgggttggagtaaagcagggtgacccgatgtcgccccttttatttaacctggcaatggaccctctattatgcaagctggaagagagtggcaaaggataccaccgaggacagagcagcatcacagcgatggcatttgcagacgatctggttttgctgagcgactcctgggaaggcatgaatacaaatattagcatactggagaccttctgcaatctgaccggactcaaaacacaggggcaaaagtgccacggcttttacatcaagccgacaaagaagtcttacaccatcaatgactgcgctgcctggactatcaacggcacacccctgaacatgatcgaccccggcgaatctgagaaatacctcggcctgcagtttgacccgtggattggaatagcaaggtccggtctctccacaaaactagatttttggcttcagcggatcgatcaagcaccacttaaacctctgcagaaaactgatattctcaaaacatacaccatccctcggctgatctacatagctgaccactcagaagtgaaaactgcactactcgaaacccttgaccagaagatccggacagcggtcaaggaatggcttcacctacctccgtgcacctgcgatgccatcctgtactcgagcacgagagacggcggtttgggcatcaccaaattggcaggactgatccccagcgtgcaggcccgtagactgcatcggatcgcacagtcatctgacgatacgatgaaatgcttcatggaaaaagagaaaatggaacagctgcataagaaattgtggattcaagctggaggggacagagagaacataccctcgatttgggaagcaccaccgtcgagtgaaccaccaaacaacgtgagcacaaattcggaatgggaagcaccgacccagaaagataaatttccaaagccttgcaattggaggaaaaacgaattcaaaaaatggaccaaattggcatcccaaggccgcggaattgtaaattttgaaagagacaaaattagtaaccattggatccaatactacagacgcatacctcacaggaaactcctcactgcactacaactcagggccaacgtttaccccacgagagaatttctagccaggggtagacaagaccaatacatcaaggcgtgtaggcactgcgatgcggacattgaatcctgcgcccacatcatcggcaactgcccagtgacacaggacgcccgaatcaagaggcacaattacatctgcgaactgcttctcgaggaggcgaagaagaaggactgggtagtgttcaaggaaccgcacataagggattccaacaaggaactgtacaaacctgacctgatatttgtgaaggatgcccgtgcacttgtcgtggatgtgacagtacggtatgaagcagccaaatcatcgctggaggaagccgctgcagagaaagtgagaaagtacaaacacctggaaacggaagtaagacatctcacgaatgcaaaggacgttacttttgtgggctttcccctaggagcgcgggggaaatggcaccaagataactttaaacttttgactgagcttggcctctccaaatcgaggcaagtgaaaatggcagagactttttccacagtagcgctcttttcatctgtggacattgtacatatgtttgccagtagggccagaaaatctatggttatgtgataataggctgccttctgcggggcttgccttctggccatgcccttcttctctcccttgcacctgtacctcttggtctttgaataaagcctgagtaggaaggaccggtaaaaaaaaaaaaaaaaaaaaaaaaaaaaaaacgttgactaaaaaaaaaaaaaaaaaaaaaaaaaaaaaaaaaaaaaaaaaaaaaaaaaaaaaaaaaaaaaaaaaaaaaa

SEQ ID NO: 11506 - DNA, 4564 bp, synthetic construct
  source 1..4564: mol_type = other DNA
ggtctagttacaactgggcatcgctgcagagatcgcacctcctcgtggtcccgctggtagcccttcgaagggtgactaagtcgatctctgccccaggtacggagccgttgggactcaccagtccaacgtaactcctgcctaaattcggtgaaacaaattcctcggtaaaaagccccatggcttcttgcccgaaacctggccccccggtttcagcaggggcaatgagtttggaaagtggactgaccacccactccgttctcgccatcgaacgtggtcccaattcgttggcaaattccggatcagactttgggggggggggtctggggctaccgttacgcctattgagggtatcggtcggcactcagacctcccgctccgactgggtagacctggtgtcctggagccacccaggacccacgtctaagtcccagcaggttgacctggtgtctttatttcctaaacaccgggttgacctgttatccaaaaacgaccaggtagacctggtggctcaatttttaccatctaaatttccccccaatttggcagaaaatgatttggctttgctggtgaacttagagttctacagatcggatttgcatgtgtatgagtgtgttcattttgctgcacattgggagggattaagtggtttgcctgaggtgtatgaacaacttgcaccacaaccgtgtgtgggagaaactttacattctagcctcccacgagacagtgaactgtttgtgcctgaagaggggagcagcgagaaggagagcgaggacgcgccaaaaacatctcctccgacgcctgggaaacatggtttggaacagactggggaggaaaaagtgatggtgactgttcctgacaaaaatccaccttgtccttgctgtggtacccgggtaaactctgtgttgaatctgattgaacatctgaaagtgtcacacgggaaaaggggggtttgttttcggtgtgcaaaatgtggaaaggaaaatagtaactatcacagtgttgtttgtcattttccaaaatgcaggggtccagagacggagaaagccccagctggggagtggatttgtgaggtatgcaacagagattttacaaccaaaattggcctgggacaacacaagagattggcacacccagcagtgagaaatcaggaaaggatcgttgcttcccaaccgaaagaaacatcaaatagaggtgctcacaaaaggtgctggacaaaggaggaggaagaattactaataagactggaggctcagttcgagggaaacaaaaatattaataagcttattgcagaacacataaccaccaaaacagctaagcagatcagtgacaaaaggcgattgctgtccagaaagccagcagaggagccacgtgaggagcctggaacgtgtcatcacaccaggagagcagctgcgagcctgagaacggagcctgagatgagtcatcacgcccaggcagaggacagagataatggacctgggagacgccctctgccaggcagggcagctgccggagggagaacaatggacgagataagacgccaccctgataagggcaacggacagcagagacccaccaagcaaaaatcagaagaacagctgcaggcttactataaaaagacactagaggaacgactttcagctggggcacttaacaccttcccccgagcattcaagcaggtaatggaaggccgggatataaagctagtaatcaatcagacagcgcaggactgcttcggatgcctggaatccataagccaaataagaacggcaacccgagataaaaaggacacggtgacccggaagaaacacccaaagaaaccttttcagaagtggatgaagaagagagcaatcaaaaaaggtaattatcttcggttccagcgtttattttatcttgatagagggaaactggctaaaatcattttagatgatattgaatgcttgtcttgtgacataccactcagtgaaatttattcggtttttaaaacaagatgggaaacaactggtagctttaaaagccttggggactttaaaacttacgggaaggctgacaacactgccttcagagaattaattacggctaaagaaattgagaaaaatgtgcaggaaatgagcaaaggctcggctcccggtccagacgggattactcttggggacgtcgtaaagatggatcccgagttttcccggaccatggagattttcaatttatggttaacaactggtaaaatcccggacatggtgagggggtgcagaaccgttttgattccaaaatcatcaaagccggatcgtttgaaagacattaataactggagacctatcacgatcggttccatcttgctgagactgttctccaggattgtaacagctaggctgagcaaagcgtgccccctgaacccaaggcaaagaggctttatcagagcggcgggatgctctgaaaacttaaaactcctgcaaactataatttggtcggccaaaagagaacacagaccactgggtgttgtattcgtggacatcgccaaggcttttgacaccgtaagccaccagcacatcattcatgctttgcagcaaagagaggtggatccccacatcgtcggtctggtgagcaatatgtacgagaacatcagtacgtatatcaccacaaagaggaacacacacacagacaaaatccagatccgggttggagtaaagcagggtgacccgatgtcgccccttttatttaacctggcaatggaccctctattatgcaagctggaagagagtggcaaaggataccaccgaggacagagcagcatcacagcgatggcatttgcagacgatctggttttgctgagcgactcctgggaaaatatgaatacaaatattagcatactggagaccttctgcaatctgaccggactcaaaacacaggggcaaaagtgccacggcttttacatcaagccgacaaagaagtcttacaccatcaatgactgcgctgcctggactatcaacggcacacccctgaacatgatcgaccccggcgaatctgagaaatacctcggcctgcagtttgacccgtggattggaatagcaaggtccggtctctccacaaaactagatttttggcttcagcggatcgatcaagcaccacttaaacctctgcagaaaactgatattctcaaaacatacaccatccctcggctgatctacatagctgaccactcagaagtgaaaactgcactactcgaaacccttgaccagaagatccggacagcggtcaaggaatggcttcacctacctccgtgcacctgcgatgccatcctgtactcgagcacgagagacggcggtttgggcatcaccaaattggcaggactgatccccagcgtgcaggcccgtagactgcatcggatcgcacagtcatctgacgatacgatgaaatgcttcatggaaaaagagaaaatggaacagctgcataagaaattgtggattcaagctggaggggacagagagaacataccctcgatttgggaagcaccaccgtcgagtgaaccaccaaacaacgtgagcacaaattcggaatgggaagcaccgacccagaaagataaatttccaaagccttgcaattggaggaaaaacgaattcaaaaaatggaccaaattggcatcccaaggccgcggaattgtaaattttgaaagagacaaaattagtaaccattggatccaatactacagacgcatacctcacaggaaactcctcactgcactacaactcagggccaacgtttaccccacgagagaatttctagccaggggtagacaagaccaatacatcaaggcgtgtaggcactgcgatgcggacattgaatcctgcgcccacatcatcggcaactgcccagtgacacaggacgcccgaatcaagaggcacaattacatctgcgaactgcttctcgaggaggcgaagaagaaggactgggtagtgttcaaggaaccgcacataagggattccaacaaggaactgtacaaacctgacctgatatttgtgaaggatgcccgtgcacttgtcgtggatgtgacagtacggtatgaagcagccaaatcatcgctggaggaagccgctgcagagaaagtgagaaagtacaaacacctggaaacggaagtaagacatctcacgaatgcaaaggacgttacttttgtgggctttcccctaggagcgcgggggaaatggcaccaagataactttaaacttttgactgagcttggcctctccaaatcgaggcaagtgaaaatggcagagactttttccacagtagcgctcttttcatctgtggacattgtacatatgtttgccagtagggccagaaaatctatggttatgtgataataggctgccttctgcggggcttgccttctggccatgcccttcttctctcccttgcacctgtacctcttggtctttgaataaagcctgagtaggaaggaccggtaaaaaaaaaaaaaaaaaaaaaaaaaaaaaaacgttgactaaaaaaaaaaaaaaaaaaaaaaaaaaaaaaaaaaaaaaaaaaaaaaaaaaaaaaaaaaaaaaaaaaaaaa

SEQ ID NO: 11507 - DNA, 4703 bp, synthetic construct
  source 1..4703: mol_type = other DNA
ggtctagttacaactgggcatcgctgcagagatcgcacctcctcgtggtcccgctggtagcccttcgaagggtgactaagtcgatctctgccccaggtacggagccgttgggactcaccagtccaacgtaactcctgcctaaattcggtgaaacaaattcctcggtaaaaagccccatggcttcttgcccgaaacctggccccccggtttcagcaggggcaatgagtttggaaagtggactgaccacccactccgttctcgccatcgaacgtggtcccaattcgttggcaaattccggatcagactttgggggggggggtctggggctaccgttacgcctattgagggtatcggtcggcactcagacctcccgctccgactgggtagacctggtgtcctggagccacccaggacccacgtctaagtcccagcaggttgacctggtgtctttatttcctaaacaccgggttgacctgttatccaaaaacgaccaggtagacctggtggctcaatttttaccatctaaatttccccccaatttggcagaaaatgatttggctttgctggtgaacttagagttctacagatcggatttgcatgtgtatgagtgtgttcattttgctgcacattgggagggattaagtggtttgcctgaggtgtatgaacaacttgcaccacaaccgtgtgtgggagaaactttacattctagcctcccacgagacagtgaactgtttgtgcctgaagaggggagcagcgagaaggagagcgaggacgcgccaaaaacatctcctccgacgcctgggaaacatggtttggaacagactggggaggaaaaagtgatggtgactgttcctgacaaaaatccaccttgtccttgctgtggtacccgggtaaactctgtgttgaatctgattgaacatctgaaagtgtcacacgggaaaaggggggtttgttttcggtgtgcaaaatgtggaaaggaaaatagtaactatcacagtgttgtttgtcattttaagaaatgcaggggtccagagacggagaaagccccagctggggagtggatttgtgaggtatgcaacagagattttacaaccaaaattggcctgggacaacacaagagattggcacacccagcagtgagaaatcaggaaaggatcgttgcttcccaaccgaaagaaacatcaaatagaggtgctcacaaaaggtgctggacaaaggaggaggaagaattactaataagactggaggctcagttcgagggaaacaaaaatattaataagcttattgcagaacacataaccaccaaaacagctaagcagatcagtgacaaaaggcgattgctgtccagaaagccagcagaggagccacgtgaggagcctggaacgtgtcatcacaccaggagagcagctgcgagcctgagaacggagcctgagatgagtcatcacgcccaggcagaggacagagataatggacctgggagacgccctctgccaggcagggcagctgccggagggagaacaatggacgagataagacgccaccctgataagggcaacggacagcagagacccaccaagcaaaaatcagaagaacagctgcaggcttactataaaaagacactagaggaacgactttcagctggggcacttaacaccttcccccgagcattcaagcaggtaatggaaggccgggatataaagctagtaatcaatcagacagcgcaggactgcttcggatgcctggaatccataagccaaataagaacggcaacccgagataaaaaggacacggtgacccgggagaaacacccaaagaaaccttttcagaagtggatgaaggacagagcaatcaaaaaaggtaattatcttcggttccagcgtttattttatcttgatagagggaaactggctaaaatcattttagatgatattgaatgcttgtcttgtgacataccactcagtgaaatttattcggtttttaaaacaagatgggaaacaactggtagctttaaaagccttggggactttaaaacttacgggaaggctgacaacactgccttcagagaattaattacggctaaagaaattgagaaaaatgtgcaggaaatgagcaaaggctcggctcccggtccagacgggattactcttggggacgtcgtaaagatggatcccgagttttcccggaccatggagattttcaatttatggttaacaactggtaaaatcccggacatggtgagggggtgcagaaccgttttgattccaaaatcatcaaagccggatcgtttgaaagacattaataactggagacctatcacgatcggttccatcttgctgagactgttctccaggattgtaacagctaggctgagcaaagcgtgccccctgaacccaaggcaaagaggctttatcagagcggcgggatgctctgaaaacttaaaactcctgcaaactataatttggtcggccaaaagagaacacagaccactgggtgttgtattcgtggacatcgccaaggcttttgacaccgtaagccaccagcacatcattcatgctttgcagcaaagagaggtggatccccacatcgtcggtctggtgagcaatatgtacgagaacatcagtacgtatatcaccacaaagaggaacacacacacagacaaaatccagatccgggttggagtaaagcagggtgacccgatgtcgccccttttatttaacctggcaatggaccctctattatgcaagctggaagagagtggcaaaggataccaccgaggacagagcagcatcacagcgatggcatttgcagacgatctggttttgctgagcgactcctgggaaaatatgaatacaaatattagcatactggagaccttctgcaatctgaccggactcaaaacacaggggcaaaagtgccacggcttttacatcaagccgacaaagaagtcttacaccatcaatgactgcgctgcctggactatcaacggcacacccctgaacatgatcgaccccggcgaatctgagaaatacctcggcctgcagtttgacccgtggattggaatagcaaggtccggtctctccacaaaactagatttttggcttcagcggatcgatcaagcaccacttaaacctctgcagaaaactgatattctcaaaacatacaccatccctcggctgatctacatagctgaccactcagaagtgaaaactgcactactcgaaacccttgaccagaagatccggacagcggtcaaggaatggcttcacctacctccgtgcacctgcgatgccatcctgtactcgagcacgagagacggcggtttgggcatcaccaaattggcaggactgatccccagcgtgcaggcccgtagactgcatcggatcgcacagtcatctgacgatacgatgaaatgcttcatggaaaaagagaaaatggaacagctgcataagaaattgtggattcaagctggaggggacagagagaacataccctcgatttgggaagcaccaccgtcgagtgaaccaccaaacaacgtgagcacaaattcggaatgggaagcaccgacccagaaagataaatttccaaagccttgcaattggaggaaaaacgaattcaaaaaatggaccaaattggcatcccaaggccgcggaattgtaaattttgaaagagacaaaattagtaaccattggatccaatactacagacgcatacctcacaggaaactcctcactgcactacaactcagggccaacgtttaccccacgagagaatttctagccaggggtagacaagaccaatacatcaaggcgtgtaggcactgcgatgcggacattgaatcctgcgcccacatcatcggcaactgcccagtgacacaggacgcccgaatcaagaggcacaattacatctgcgaactgcttctcgaggaggcgaagaagaaggactgggtagtgttcaaggaaccgcacataagggattccaacaaggaactgtacaaacctgacctgatatttgtgaaggatgcccgtgcacttgtcgtggatgtgacagtacggtatgaagcagccaaatcatcgctggaggaagccgctgcagagaaagtgagaaagtacaaacacctggaaacggaagtaagacatctcacgaatgcaaaggacgttacttttgtgggctttcccctaggagcgcgggggaaatggcaccaagataactttaaacttttgactgagcttggcctctccaaatcgaggcaagtgaaaatggcagagactttttccacagtagcgctcttttcatctgtggacattgtacatatgtttgccagtagggccagaaaatctatggttatgtgataataggctgccttctgcggggcttgccttctggccatgcccttcttctctcccttgcacctgtacctcttggtctttgaataaagcctgagtaggaaggaccggtagacatgataagatacattgatgagtttggacaaaccacaactagaatgcagtgaaaaaaatgctttatttgtgaaatttgtgatgctattgctttatttgtaaccattataagctgcaataaacaagttaacaacaacaaaaaaaaaaaaaaaaaaaaaaaaaaaaaaacgttgactaaaaaaaaaaaaaaaaaaaaaaaaaaaaaaaaaaaaaaaaaaaaaaaaaaaaaaaaaaaaaaaaaaaaaa

SEQ ID NO: 11508 - DNA, 4703 bp, synthetic construct
  source 1..4703: mol_type = other DNA
ggtctagttacaactgggcatcgctgcagagatcgcacctcctcgtggtcccgctggtagcccttcgaagggtgactaagtcgatctctgccccaggtacggagccgttgggactcaccagtccaacgtaactcctgcctaaattcggtgaaacaaattcctcggtaaaaagccccatggcttcttgcccgaaacctggccccccggtttcagcaggggcaatgagtttggaaagtggactgaccacccactccgttctcgccatcgaacgtggtcccaattcgttggcaaattccggatcagactttgggggggggggtctggggctaccgttacgcctattgagggtatcggtcggcactcagacctcccgctccgactgggtagacctggtgtcctggagccacccaggacccacgtctaagtcccagcaggttgacctggtgtctttatttcctaaacaccgggttgacctgttatccaaaaacgaccaggtagacctggtggctcaatttttaccatctaaatttccccccaatttggcagaaaatgatttggctttgctggtgaacttagagttctacagatcggatttgcatgtgtatgagtgtgttcattttgctgcacattgggagggattaagtggtttgcctgaggtgtatgaacaacttgcaccacaaccgtgtgtgggagaaactttacattctagcctcccacgagacagtgaactgtttgtgcctgaagaggggagcagcgagaaggagagcgaggacgcgccaaaaacatctcctccgacgcctgggaaacatggtttggaacagactggggaggaaaaagtgatggtgactgttcctgacaaaaatccaccttgtccttgctgtggtacccgggtaaactctgtgttgaatctgattgaacatctgaaagtgtcacacgggaaaaggggggtttgttttcggtgtgcaaaatgtggaaaggaaaatagtaactatcacagtgttgtttgtcattttaagaaatgcaggggtccagagacggagaaagccccagctggggagtggatttgtgaggtatgcaacagagattttacaaccaaaattggcctgggacaacacaagagattggcacacccagcagtgagaaatcaggaaaggatcgttgcttcccaaccgaaagaaacatcaaatagaggtgctcacaaaaggtgctggacaaaggaggaggaagaattactaataagactggaggctcagttcgagggaaacaaaaatattaataagcttattgcagaacacataaccaccaaaacagctaagcagatcagtgacaaaaggcgattgctgtccagaaagccagcagaggagccacgtgaggagcctggaacgtgtcatcacaccaggagagcagctgcgagcctgagaacggagcctgagatgagtcatcacgcccaggcagaggacagagataatggacctgggagacgccctctgccaggcagggcagctgccggagggagaacaatggacgagataagacgccaccctgataagggcaacggacagcagagacccaccaagcaaaaatcagaagaacagctgcaggcttactataaaaagacactagaggaacgactttcagctggggcacttaacaccttcccccgagcattcaagcaggtaatggaaggccgggatataaagctagtaatcaatcagacagcgcaggactgcttcggatgcctggaatccataagccaaataagaacggcaacccgagataaaaaggacacggtgacccgggagaaacacccaaagaaaccttttcagaagtggatgaagaagagagcaatcaaaaaaggtaattatcttcggttccagcgtttattttatcttgatagagggaaactggctaaaatcattttagatgatattgaatgcttgtcttgtgacataccactcagtgaaatttattcggtttttaaaacaagatgggaaacaactggtagctttaaaagccttggggactttaaaacttacgggaaggctgacaacactgccttcagagaattaattacggctaaagaaattgagaaaaatgtgcaggaaatgagcaaaggctcggctcccggtccagacgggattactcttggggacgtcgtaaagatggatcccgagttttcccggaccatggagattttcaatttatggttaacaactggtaaaatcccggacatggtgagggggtgcagaaccgttttgattccaaaatcatcaaagccggatcgtttgaaagacattaataactggagacctatcacgatcggttccatcttgctgagactgttctccaggattgtaacagctaggctgagcaaagcgtgccccctgaacccaaggcaaagaggctttatcagagcggcgggatgctctgaaaacttaaaactcctgcaaactataatttggtcggccaaaagagaacacagaccactgggtgttgtattcgtggacatcgccaaggcttttgacaccgtaagccaccagcacatcattcatgctttgcagcaaagagaggtggatccccacatcgtcggtctggtgagcaatatgtacgagaacatcagtacgtatatcaccacaaagaggaacacacacacagacaaaatccagatccgggttggagtaaagcagggtgacccgatgtcgccccttttatttaacctggcaatggaccctctattatgcaagctggaagagagtggcaaaggataccaccgaggacagagcagcatcacagcgatggcatttgcagacgatctggttttgctgagcgactcctgggaaaatatgaatacaaatattagcatactggagaccttctgcaatctgaccggactcaaaacacaggggcaaaagtgccacggcttttacatcaagccgacaaagaagtcttacaccatcaatgactgcgctgcctggactatcaacggcacacccctgaacatgatcgaccccggcgaatctgagaaatacctcggcctgcagtttgacccgtggattggaatagcaaggtccggtctctccacaaaactagatttttggcttcagcggatcgatcaagcaccacttaaacctctgcagaaaactgatattctcaaaacatacaccatccctcggctgatctacatagctgaccactcagaagtgaaaactgcactactcgaaacccttgaccagaagatccggacagcggtcaaggaatggcttcacctacctccgtgcacctgcgatgccatcctgtactcgagcacgagagacggcggtttgggcatcaccaaattggcaggactgatccccagcgtgcaggcccgtagactgcatcggatcgcacagtcatctgacgatacgatgaaatgcttcatggaaaaagagaaaatggaacagctgcataagaaattgtggattcaagctggaggggacagagagaacataccctcgatttgggaagcaccaccgtcgagtgaaccaccaaacaacgtgagcacaaattcggaatgggaagcaccgacccagaaagataaatttccaaagccttgcaattggaggaaaaacgaattcaaaaaatggaccaaattggcatcccaaggccgcggaattgtaaattttgaaagagacaaaattagtaaccattggatccaatactacagacgcatacctcacaggaaactcctcactgcactacaactcagggccaacgtttaccccacgagagaatttctagccaggggtagacaagaccaatacatcaaggcgtgtaggcactgcgatgcggacaacgaatcctgcgcccacatcatcggcaactgcccagtgacacaggacgcccgaatcaagaggcacaattacatctgcgaactgcttctcgaggaggcgaagaagaaggactgggtagtgttcaaggaaccgcacataagggattccaacaaggaactgtacaaacctgacctgatatttgtgaaggatgcccgtgcacttgtcgtggatgtgacagtacggtatgaagcagccaaatcatcgctggaggaagccgctgcagagaaagtgagaaagtacaaacacctggaaacggaagtaagacatctcacgaatgcaaaggacgttacttttgtgggctttcccctaggagcgcgggggaaatggcaccaagataactttaaacttttgactgagcttggcctctccaaatcgaggcaagtgaaaatggcagagactttttccacagtagcgctcttttcatctgtggacattgtacatatgtttgccagtagggccagaaaatctatggttatgtgataataggctgccttctgcggggcttgccttctggccatgcccttcttctctcccttgcacctgtacctcttggtctttgaataaagcctgagtaggaaggaccggtagacatgataagatacattgatgagtttggacaaaccacaactagaatgcagtgaaaaaaatgctttatttgtgaaatttgtgatgctattgctttatttgtaaccattataagctgcaataaacaagttaacaacaacaaaaaaaaaaaaaaaaaaaaaaaaaaaaaaacgttgactaaaaaaaaaaaaaaaaaaaaaaaaaaaaaaaaaaaaaaaaaaaaaaaaaaaaaaaaaaaaaaaaaaaaaa

SEQ ID NO: 11509 - DNA, 4703 bp, synthetic construct
  source 1..4703: mol_type = other DNA
ggtctagttacaactgggcatcgctgcagagatcgcacctcctcgtggtcccgctggtagcccttcgaagggtgactaagtcgatctctgccccaggtacggagccgttgggactcaccagtccaacgtaactcctgcctaaattcggtgaaacaaattcctcggtaaaaagccccatggcttcttgcccgaaacctggccccccggtttcagcaggggcaatgagtttggaaagtggactgaccacccactccgttctcgccatcgaacgtggtcccaattcgttggcaaattccggatcagactttgggggggggggtctggggctaccgttacgcctattgagggtatcggtcggcactcagacctcccgctccgactgggtagacctggtgtcctggagccacccaggacccacgtctaagtcccagcaggttgacctggtgtctttatttcctaaacaccgggttgacctgttatccaaaaacgaccaggtagacctggtggctcaatttttaccatctaaatttccccccaatttggcagaaaatgatttggctttgctggtgaacttagagttctacagatcggatttgcatgtgtatgagtgtgttcattttgctgcacattgggagggattaagtggtttgcctgaggtgtatgaacaacttgcaccacaaccgtgtgtgggagaaactttacattctagcctcccacgagacagtgaactgtttgtgcctgaagaggggagcagcgagaaggagagcgaggacgcgccaaaaacatctcctccgacgcctgggaaacatggtttggaacagactggggaggaaaaagtgatggtgactgttcctgacaaaaatccaccttgtccttgctgtggtacccgggtaaactctgtgttgaatctgattgaacatctgaaagtgtcacacgggaaaaggggggtttgttttcggtgtgcaaaatgtggaaaggaaaatagtaactatcacagtgttgtttgtcattttaagaaatgcaggggtccagagacggagaaagccccagctggggagtggatttgtgaggtatgcaacagagattttacaaccaaaattggcctgggacaacacaagagattgtggcacccagcagtgagaaatcaggaaaggatcgttgcttcccaaccgaaagaaacatcaaatagaggtgctcacaaaaggtgctggacaaaggaggagagggaattactaataagactggaggctcagttcgagggaaacaaaaatattaataagcttattgcagaacacataaccaccaaaacagctaagcagatcagtgacaaaaggcgattgctgtccagaaagccagcagaggagccacgtgaggagcctggaacgtgtcatcacaccaggagagcagctgcgagcctgagaacggagcctgagatgagtcatcacgcccaggcagaggacagagataatggacctgggagacgccctctgccaggcagggcagctgccggagggagaacaatggacgagataagacgccaccctgataagggcaacggacagcagagacccaccaagcaaaaatcagaagaacagctgcaggcttactataaaaagacactagaggaacgactttcagctggggcacttaacaccttcccccgagcattcaagcaggtaatggaaggccgggatataaagctagtaatcaatcagacagcgcaggactgcttcggatgcctggaatccataagccaaataagaacggcaacccgagataaaaaggacacggtgacccgggagaaacacccaaagaaaccttttcagaagtggatgaagaagagagcaatcaaaaaaggtaattatcttcggttccagcgtttattttatcttgatagagggaaactggctaaaatcattttagatgatattgaatgcttgtcttgtgacataccactcagtgaaatttattcggtttttaaaacaagatgggaaacaactggtagctttaaaagccttggggactttaaaacttacgggaaggctgacaacactgccttcagagaattaattacggctaaagaaattgagaaaaatgtgcaggaaatgagcaaaggctcggctcccggtccagacgggattactcttggggacgtcgtaaagatggatcccgagttttcccggaccatggagattttcaatttatggttaacaactggtaaaatcccggacatggtgagggggtgcagaaccgttttgattccaaaatcatcaaagccggatcgtttgaaagacattaataactggagacctatcacgatcggttccatcttgctgagactgttctccaggattgtaacagctaggctgagcaaagcgtgccccctgaacccaaggcaaagaggctttatcagagcggcgggatgctctgaaaacttaaaactcctgcaaactataatttggtcggccaaaagagaacacagaccactgggtgttgtattcgtggacatcgccaaggcttttgacaccgtaagccaccagcacatcattcatgctttgcagcaaagagaggtggatccccacatcgtcggtctggtgagcaatatgtacgagaacatcagtacgtatatcaccacaaagaggaacacacacacagacaaaatccagatccgggttggagtaaagcagggtgacccgatgtcgccccttttatttaacctggcaatggaccctctattatgcaagctggaagagagtggcaaaggataccaccgaggacagagcagcatcacagcgatggcatttgcagacgatctggttttgctgagcgactcctgggaaaatatgaatacaaatattagcatactggagaccttctgcaatctgaccggactcaaaacacaggggcaaaagtgccacggcttttacatcaagccgacaaagaagtcttacaccatcaatgactgcgctgcctggactatcaacggcacacccctgaacatgatcgaccccggcgaatctgagaaatacctcggcctgcagtttgacccgtggattggaatagcaaggtccggtctctccacaaaactagatttttggcttcagcggatcgatcaagcaccacttaaacctctgcagaaaactgatattctcaaaacatacaccatccctcggctgatctacatagctgaccactcagaagtgaaaactgcactactcgaaacccttgaccagaagatccggacagcggtcaaggaatggcttcacctacctccgtgcacctgcgatgccatcctgtactcgagcacgagagacggcggtttgggcatcaccaaattggcaggactgatccccagcgtgcaggcccgtagactgcatcggatcgcacagtcatctgacgatacgatgaaatgcttcatggaaaaagagaaaatggaacagctgcataagaaattgtggattcaagctggaggggacagagagaacataccctcgatttgggaagcaccaccgtcgagtgaaccaccaaacaacgtgagcacaaattcggaatgggaagcaccgacccagaaagataaatttccaaagccttgcaattggaggaaaaacgaattcaaaaaatggaccaaattggcatcccaaggccgcggaattgtaaattttgaaagagacaaaattagtaaccattggatccaatactacagacgcatacctcacaggaaactcctcactgcactacaactcagggccaacgtttaccccacgagagaatttctagccaggggtagacaagaccaatacatcaaggcgtgtaggcactgcgatgcggacaacgaatcctgcgcccacatcatcggcaactgcccagtgacacaggacgcccgaatcaagaggcacaattacatctgcgaactgcttctcgaggaggcgaagaagaaggactgggtagtgttcaaggaaccgcacataagggattccaacaaggaactgtacaaacctgacctgatatttgtgaaggatgcccgtgcacttgtcgtggatgtgacagtacggtatgaagcagccaaatcatcgctggaggaagccgctgcagagaaagtgagaaagtacaaacacctggaaacggaagtaagacatctcacgaatgcaaaggacgttacttttgtgggctttcccctaggagcgcgggggaaatggcaccaagataactttaaacttttgactgagcttggcctctccaaatcgaggcaagtgaaaatggcagagactttttccacagtagcgctcttttcatctgtggacattgtacatatgtttgccagtagggccagaaaatctatggttatgtgataataggctgccttctgcggggcttgccttctggccatgcccttcttctctcccttgcacctgtacctcttggtctttgaataaagcctgagtaggaaggaccggtagacatgataagatacattgatgagtttggacaaaccacaactagaatgcagtgaaaaaaatgctttatttgtgaaatttgtgatgctattgctttatttgtaaccattataagctgcaataaacaagttaacaacaacaaaaaaaaaaaaaaaaaaaaaaaaaaaaaaacgttgactaaaaaaaaaaaaaaaaaaaaaaaaaaaaaaaaaaaaaaaaaaaaaaaaaaaaaaaaaaaaaaaaaaaaaa

SEQ ID NO: 11510 - DNA, 4564 bp, synthetic construct
  source 1..4564: mol_type = other DNA
ggtctagttacaactgggcatcgctgcagagatcgcacctcctcgtggtcccgctggtagcccttcgaagggtgactaagtcgatctctgccccaggtacggagccgttgggactcaccagtccaacgtaactcctgcctaaattcggtgaaacaaattcctcggtaaaaagccccatggcttcttgcccgaaacctggccccccggtttcagcaggggcaatgagtttggaaagtggactgaccacccactccgttctcgccatcgaacgtggtcccaattcgttggcaaattccggatcagactttgggggggggggtctggggctaccgttacgcctattgagggtatcggtcggcactcagacctcccgctccgactgggtagacctggtgtcctggagccacccaggacccacgtctaagtcccagcaggttgacctggtgtctttatttcctaaacaccgggttgacctgttatccaaaaacgaccaggtagacctggtggctcaatttttaccatctaaatttccccccaatttggcagaaaatgatttggctttgctggtgaacttagagttctacagatcggatttgcatgtgtatgagtgtgttcataaggctgcacattgggagggattaagtggtttgcctgaggtgtatgaacaacttgcaccacaaccgtgtgtgggagaaactttacattctagcctcccacgagacagtgaactgtttgtgcctgaagaggggagcagcgagaaggagagcgaggacgcgccaaaaacatctcctccgacgcctgggaaacatggtttggaacagactggggaggaaaaagtgatggtgactgttcctgacaaaaatccaccttgtccttgctgtggtacccgggtaaactctgtgttgaatctgattgaacatctgaaagtgtcacacgggaaaaggggggtttgttttcggtgtgcaaaatgtggaaaggaaaatagtaactatcacagtgttgtttgtcattttaagaaatgcaggggtccagagacggagaaagccccagctggggagtggatttgtgaggtatgcaacagagattttacaaccaaaattggcctgggacaacacaagagattggcacacccagcagtgagaaatcaggaaaggatcgttgcttcccaaccgaaagaaacatcaaatagaggtgctcacaaaaggtgctggacaaaggaggaggaagaattactaataagactggaggctcagttcgagggaaacaaaaatattaataagcttattgcagaacacataaccaccaaaacagctaagcagatcagtgacaaaaggcgattgctgtccagaaagccagcagaggagccacgtgaggagcctggaacgtgtcatcacaccaggagagcagctgcgagcctgagaacggagcctgagatgagtcatcacgcccaggcagaggacagagataatggacctgggagacgccctctgccaggcagggcagctgccggagggagaacaatggacgagataagacgccaccctgataagggcaacggacagcagagacccaccaagcaaaaatcagaagaacagctgcaggcttactataaaaagacactagaggaacgactttcagctggggcacttaacaccttcccccgagcattcaagcaggtaatggaaggccgggatataaagctagtaatcaatcagacagcgcaggactgcttcggatgcctggaatccataagccaaataagaacggcaacccgagataaaaaggacacggtgacccgggagaaacacccaaagaaaccttttcagaagtggatgaaggacagagcaatcaaaaaaggtaattatcttcggttccagcgtttattttatcttgatagagggaaactggctaaaatcattttagatgatattgaatgcttgtcttgtgacataccactcagtgaaatttattcggtttttaaaacaagatgggaaacaactggtagctttaaaagccttggggactttaaaacttacgggaaggctgacaacactgccttcagagaattaattacggctaaagaaattgagaaaaatgtgcaggaaatgagcaaaggctcggctcccggtccagacgggattactcttggggacgtcgtaaagatggatcccgagttttcccggaccatggagattttcaatttatggttaacaactggtaaaatcccggacatggtgagggggtgcagaaccgttttgattccaaaatcatcaaagccggatcgtttgaaagacattaataactggagacctatcacgatcggttccatcttgctgagactgttctccaggattgtaacagctaggctgagcaaagcgtgccccctgaacccaaggcaaagaggctttatcagagcggcgggatgctctgaaaacttaaaactcctgcaaactataatttggtcggccaaaagagaacacagaccactgggtgttgtattcgtggacatcgccaaggcttttgacaccgtaagccaccagcacatcattcatgctttgcagcaaagagaggtggatccccacatcgtcggtctggtgagcaatatgtacgagaacatcagtacgtatatcaccacaaagaggaacacacacacagacaaaatccagatccgggttggagtaaagcagggtgacccgatgtcgccccttttatttaacctggcaatggaccctctattatgcaagctggaagagagtggcaaaggataccaccgaggacagagcagcatcacagcgatggcatttgcagacgatctggttttgctgagcgactcctgggaaaatatgaatacaaatattagcatactggagaccttctgcaatctgaccggactcaaaacacaggggcaaaagtgccacggcttttacatcaagccgacaaaggactcttacaccatcaatgactgcgctgcctggactatcaacggcacacccctgaacatgatcgaccccggcgaatctgagaaatacctcggcctgcagtttgacccgtggattggaatagcaaggtccggtctctccacaaaactagatttttggcttcagcggatcgatcaagcaccacttaaacctctgcagaaaactgatattctcaaaacatacaccatccctcggctgatctacatagctgaccactcagaagtgaaaactgcactactcgaaacccttgaccagaagatccggacagcggtcaaggaatggcttcacctacctccgtgcacctgcgatgccatcctgtactcgagcacgagagacggcggtttgggcatcaccaaattggcaggactgatccccagcgtgcaggcccgtagactgcatcggatcgcacagtcatctgacgatacgatgaaatgcttcatggaaaaagagaaaatggaacagctgcataagaaattgtggattcaagctggaggggacagagagaacataccctcgatttgggaagcaccaccgtcgagtgaaccaccaaacaacgtgagcacaaattcggaatgggaagcaccgacccagaaagataaatttccaaagccttgcaattggaggaaaaacgaattcaaaaaatggaccaaattggcatcccaaggccgcggaattgtaaattttgaaagagacaaaattagtaaccattggatccaatactacagacgcatacctcacaggaaactcctcactgcactacaactcagggccaacgtttaccccacgagagaatttctagccaggggtagacaagaccaatacatcaaggcgtgtaggcactgcgatgcggacattgaatcctgcgcccacatcatcggcaactgcccagtgacacaggacgcccgaatcaagaggcacaattacatctgcgaactgcttctcgaggaggcgaagaagaaggactgggtagtgttcaaggaaccgcacataagggattccaacaaggaactgtacaaacctgacctgatatttgtgaaggatgcccgtgcacttgtcgtggatgtgacagtacggtatgaagcagccaaatcatcgctggaggaagccgctgcagagaaagtgagaaagtacaaacacctggaaacggaagtaagacatctcacgaatgcaaaggacgttacttttgtgggctttcccctaggagcgcgggggaaatggcaccaagataactttaaacttttgactgagcttggcctctccaaatcgaggcaagtgaaaatggcagagactttttccacagtagcgctcttttcatctgtggacattgtacatatgtttgccagtagggccagaaaatctatggttatgtgataataggctgccttctgcggggcttgccttctggccatgcccttcttctctcccttgcacctgtacctcttggtctttgaataaagcctgagtaggaaggaccggtaaaaaaaaaaaaaaaaaaaaaaaaaaaaaaacgttgactaaaaaaaaaaaaaaaaaaaaaaaaaaaaaaaaaaaaaaaaaaaaaaaaaaaaaaaaaaaaaaaaaaaaaa

SEQ ID NO: 11511 - DNA, 4703 bp, synthetic construct
  source 1..4703: mol_type = other DNA
ggtctagttacaactgggcatcgctgcagagatcgcacctcctcgtggtcccgctggtagcccttcgaagggtgactaagtcgatctctgccccaggtacggagccgttgggactcaccagtccaacgtaactcctgcctaaattcggtgaaacaaattcctcggtaaaaagccccatggcttcttgcccgaaacctggccccccggtttcagcaggggcaatgagtttggaaagtggactgaccacccactccgttctcgccatcgaacgtggtcccaattcgttggcaaattccggatcagactttgggggggggggtctggggctaccgttacgcctattgagggtatcggtcggcactcagacctcccgctccgactgggtagacctggtgtcctggagccacccaggacccacgtctaagtcccagcaggttgacctggtgtctttatttcctaaacaccgggttgacctgttatccaaaaacgaccaggtagacctggtggctcaatttttaccatctaaatttccccccaatttggcagaaaatgatttggctttgctggtgaacttagagttctacagatcggatttgcatgtgtatgagtgtgttcattttgctgcacattgggagggattaagtggtttgcctgaggtgtatgaacaacttgcaccacaaccgtgtgtgggagaaactttacattctagcctcccacgagacagtgaactgtttgtgcctgaagaggggagcagcgagaaggagagcgaggacgcgccaaaaacatctcctccgacgcctgggaaacatggtttggaacagactggggaggaaaaagtgatggtgactgttcctgacaaaaatccaccttgtccttgctgtggtacccgggtaaactctgtgttgaatctgattgaacatctgaaagtgtcacacgggaaaaggggggtttgttttcggtgtgcaaaatgtggaaaggaaaatagtaactatcacagtgttgtttgtcattttaagaaatgcaggggtccagagacggagaaagccccagctggggagtggatttgtgaggtatgcaacagagattttacaaccaaaattggcctgggacaacacaagagattggcacacccagcagtgagaaatcaggaaaggatcgttgcttcccaaccgaaagaaacatcaaatagaggtgctcacaaaaggtgctggacaaaggaggaggaagaattactaataagactggaggctcagttcgagggaaacaaaaatattaataagcttattgcagaacacataaccaccaaaacagctaagcagatcagtgacaaaaggcgattgctgtccagaaagccagcagaggagccacgtgaggagcctggaacgtgtcatcacaccaggagagcagctgcgagcctgagaacggagcctgagatgagtcatcacgcccaggcagaggacagagataatggacctgggagacgccctctgccaggcagggcagctgccggagggagaacaatggacgagataagacgccaccctgataagggcaacggacagcagagacccaccaagcaaaaatcagaagaacagctgcaggcttactataaaaagacactagaggaacgactttcagctggggcacttaacaccttcccccgagcattcaagcaggtaatggaaggccgggatataaagctagtaatcaatcagacagcgcaggactgcttcggatgcctggaatccataagccaaataagaacggcaacccgagataaaaaggacacggtgacccgggagaaacacccaaagaaaccttttcagaagtggatgaaggacagagcaatcaaaaaaggtaattatcttcggttccagcgtttattttatcttgatagagggaaactggctaaaatcattttagatgatattgaatgcttgtcttgtgacataccactcagtgaaatttattcggtttttaaaacaagatgggaaacaactggtagctttaaaagccttggggactttaaaacttacgggaaggctgacaacactgccttcagagaattaattacggctaaagaaattgagaaaaatgtgcaggaaatgagcaaaggctcggctcccggtccagacgggattactcttggggacgtcgtaaagatggatcccgagttttcccggaccatggagattttcaatttatggttaacaactggtaaaatcccggacatggtgagggggtgcagaaccgttttgattccaaaatcatcaaagccggatcgtttgaaagacattaataactggagacctatcacgatcggttccatcttgctgagactgttctccaggattgtaacagctaggctgagcaaagcgtgccccctgaacccaaggcaaagaggctttatcagagcggcgggatgctctgaaaacttaaaactcctgcaaactataatttggtcggccaaaagagaacacagaccactgggtgttgtattcgtggacatcgccaaggcttttgacaccgtaagccaccagcacatcattcatgctttgcagcaaagagaggtggatccccacatcgtcggtctggtgagcaatatgtacgagaacatcagtacgtatatcaccacaaagaggaacacacacacagacaaaatccagatccgggttggagtaaagcagggtgacccgatgtcgccccttttatttaacctggcaatggaccctctattatgcaagctggaagagagtggcaaaggataccaccgaggacagagcagcatcacagcgatggcatttgcagacgatctggttttgctgagcgactcctgggaaaatatgaatacaaatattagcatactggagaccttctgcaatctgaccggactcaaaacacaggggcaaaagtgccacggcttttacatcaagccgacaaaggactcttacaccatcaatgactgcgctgcctggactatcaacggcacacccctgaacatgatcgaccccggcgaatctgagaaatacctcggcctgcagtttgacccgtggattggaatagcaaggtccggtctctccacaaaactagatttttggcttcagcggatcgatcaagcaccacttaaacctctgcagaaactggatattctcaaaacatacaccatccctcggctgatctacatagctgaccactcagaagtgaaaactgcactactcgaaacccttgaccagaagatccggacagcggtcaaggaatggcttcacctacctccgtgcacctgcgatgccatcctgtactcgagcacgagagacggcggtttgggcatcaccaaattggcaggactgatccccagcgtgcaggcccgtagactgcatcggatcgcacagtcatctgacgatacgatgaaatgcttcatggaaaaagagaaaatggaacagctgcataagaaattgtggattcaagctggaggggacagagagaacataccctcgatttgggaagcaccaccgtcgagtgaaccaccaaacaacgtgagcacaaattcggaatgggaagcaccgacccagaaagataaatttccaaagccttgcaattggaggaaaaacgaattcaaaaaatggaccaaattggcatcccaaggccgcggaattgtaaattttgaaagagacaaaattagtaaccattggatccaatactacagacgcatacctcacaggaaactcctcactgcactacaactcagggccaacgtttaccccacgagagaatttctagccaggggtagacaagaccaatacatcaaggcgtgtaggcactgcgatgcggacattgaatcctgcgcccacatcatcggcaactgcccagtgacacaggacgcccgaatcaagaggcacaattacatctgcgaactgcttctcgaggaggcgaagaagaaggactgggtagtgttcaaggaaccgcacataagggattccaacaaggaactgtacaaacctgacctgatatttgtgaaggatgcccgtgcacttgtcgtggatgtgacagtacggtatgaagcagccaaatcatcgctggaggaagccgctgcagagaaagtgagaaagtacaaacacctggaaacggaagtaagacatctcacgaatgcaaaggacgttacttttgtgggctttcccctaggagcgcgggggaaatggcaccaagataactttaaacttttgactgagcttggcctctccaaatcgaggcaagtgaaaatggcagagactttttccacagtagcgctcttttcatctgtggacattgtacatatgtttgccagtagggccagaaaatctatggttatgtgataataggctgccttctgcggggcttgccttctggccatgcccttcttctctcccttgcacctgtacctcttggtctttgaataaagcctgagtaggaaggaccggtagacatgataagatacattgatgagtttggacaaaccacaactagaatgcagtgaaaaaaatgctttatttgtgaaatttgtgatgctattgctttatttgtaaccattataagctgcaataaacaagttaacaacaacaaaaaaaaaaaaaaaaaaaaaaaaaaaaaaacgttgactaaaaaaaaaaaaaaaaaaaaaaaaaaaaaaaaaaaaaaaaaaaaaaaaaaaaaaaaaaaaaaaaaaaaaa

SEQ ID NO: 11512 - DNA, 4703 bp, synthetic construct
  source 1..4703: mol_type = other DNA
ggtctagttacaactgggcatcgctgcagagatcgcacctcctcgtggtcccgctggtagcccttcgaagggtgactaagtcgatctctgccccaggtacggagccgttgggactcaccagtccaacgtaactcctgcctaaattcggtgaaacaaattcctcggtaaaaagccccatggcttcttgcccgaaacctggccccccggtttcagcaggggcaatgagtttggaaagtggactgaccacccactccgttctcgccatcgaacgtggtcccaattcgttggcaaattccggatcagactttgggggggggggtctggggctaccgttacgcctattgagggtatcggtcggcactcagacctcccgctccgactgggtagacctggtgtcctggagccacccaggacccacgtctaagtcccagcaggttgacctggtgtctttatttcctaaacaccgggttgacctgttatccaaaaacgaccaggtagacctggtggctcaatttttaccatctaaatttccccccaatttggcagaaaatgatttggctttgctggtgaacttagagttctacagatcggatttgcatgtgtatgagtgtgttcattttgctgcacattgggagggattaagtggtttgcctgaggtgtatgaacaacttgcaccacaaccgtgtgtgggagaaactttacattctagcctcccacgagacagtgaactgtttgtgcctgaagaggggagcagcgagaaggagagcgaggacgcgccaaaaacatctcctccgacgcctgggaaacatggtttggaacagactggggaggaaaaagtgatggtgactgttcctgacaaaaatccaccttgtccttgctgtggtacccgggtaaactctgtgttgaatctgattgaacatctgaaagtgtcacacgggaaaaggggggtttgttttcggtgtgcaaaatgtggaaaggaaaatagtaactatcacagtgttgtttgtcattttaagaaatgcaggggtccagagacggagaaagccccagctggggagtggatttgtgaggtatgcaacagagattttacaaccaaaattggcctgggacaacacaagagattggcacacccagcagtgagaaatcaggaaaggatcgttgcttcccaaccgaaagaaacatcaaatagaggtgctcacaaaaggtgctggacaaaggaggaggaagaattactaataagactggaggctcagttcgagggaaacaaaaatattaataagcttattgcagaacacataaccaccaaaacagctaagcagatcagtgacaaaaggcgattgctgtccagaaagccagcagaggagccacgtgaggagcctggaacgtgtcatcacaccaggagagcagctgcgagcctgagaacggagcctgagatgagtcatcacgcccaggcagaggacagagataatggacctgggagacgccctctgccaggcagggcagctgccggagggagaacaatggacgagataagacgccaccctgataagggcaacggacagcagagacccaccaagcaaaaatcagaagaacagctgcaggcttactataaaaagacactagaggaacgactttcagctggggcacttaacaccttcccccgagcattcaagcaggtaatggaaggccgggatataaagctagtaatcaatcagacagcgcaggactgcttcggatgcctggaatccataagccaaataagaacggcaacccgagataaaaaggacacggtgacccgggagaaacacccaaagaaaccttttcagaagtggatgaaggacagagcaatcaaaaaaggtaattatcttcggttccagcgtttattttatcttgatagagggaaactggctaaaatcattttagatgatattgaatgcttgtcttgtgacataccactcagtgaaatttattcggtttttaaaacaagatgggaaacaactggtagctttaaaagccttggggactttaaaacttacgggaaggctgacaacactgccttcagagaattaattacggctaaagaaattgagaaaaatgtgcaggaaatgagcaaaggctcggctcccggtccagacgggattactcttggggacgtcgtaaagatggatcccgagggctcccggaccatggagattttcaatttatggttaacaactggtaaaatcccggacatggtgagggggtgcagaaccgttttgattccaaaatcatcaaagccggatcgtttgaaagacattaataactggagacctatcacgatcggttccatcttgctgagactgttctccaggattgtaacagctaggctgagcaaagcgtgccccctgaacccaaggcaaagaggctttatcagagcggcgggatgctctgaaaacttaaaactcctgcaaactataatttggtcggccaaaagagaacacagaccactgggtgttgtattcgtggacatcgccaaggcttttgacaccgtaagccaccagcacatcattcatgctttgcagcaaagagaggtggatccccacatcgtcggtctggtgagcaatatgtacgagaacatcagtacgtatatcaccacaaagaggaacacacacacagacaaaatccagatccgggttggagtaaagcagggtgacccgatgtcgccccttttatttaacctggcaatggaccctctattatgcaagctggaagagagtggcaaaggataccaccgaggacagagcagcatcacagcgatggcatttgcagacgatctggttttgctgagcgactcctgggaaaatatgaatacaaatattagcatactggagaccttctgcaatctgaccggactcaaaacacaggggcaaaagtgccacggcttttacatcaagccgacaaaggactcttacaccatcaatgactgcgctgcctggactatcaacggcacacccctgaacatgatcgaccccggcgaatctgagaaatacctcggcctgcagtttgacccgtggattggaatagcaaggtccggtctctccacaaaactagatttttggcttcagcggatcgatcaagcaccacttaaacctctgcagaaaactgatattctcaaaacatacaccatccctcggctgatctacatagctgaccactcagaagtgaaaactgcactactcgaaacccttgaccagaagatccggacagcggtcaaggaatggcttcacctacctccgtgcacctgcgatgccatcctgtactcgagcacgagagacggcggtttgggcatcaccaaattggcaggactgatccccagcgtgcaggcccgtagactgcatcggatcgcacagtcatctgacgatacgatgaaatgcttcatggaaaaagagaaaatggaacagctgcataagaaattgtggattcaagctggaggggacagagagaacataccctcgatttgggaagcaccaccgtcgagtgaaccaccaaacaacgtgagcacaaattcggaatgggaagcaccgacccagaaagataaatttccaaagccttgcaattggaggaaaaacgaattcaaaaaatggaccaaattggcatcccaaggccgcggaattgtaaattttgaaagagacaaaattagtaaccattggatccaatactacagacgcatacctcacaggaaactcctcactgcactacaactcagggccaacgtttaccccacgagagaatttctagccaggggtagacaagaccaatacatcaaggcgtgtaggcactgcgatgcggacattgaatcctgcgcccacatcatcggcaactgcccagtgacacaggacgcccgaatcaagaggcacaattacatctgcgaactgcttctcgaggaggcgaagaagaaggactgggtagtgttcaaggaaccgcacataagggattccaacaaggaactgtacaaacctgacctgatatttgtgaaggatgcccgtgcacttgtcgtggatgtgacagtacggtatgaagcagccaaatcatcgctggaggaagccgctgcagagaaagtgagaaagtacaaacacctggaaacggaagtaagacatctcacgaatgcaaaggacgttacttttgtgggctttcccctaggagcgcgggggaaatggcaccaagataactttaaacttttgactgagcttggcctctccaaatcgaggcaagtgaaaatggcagagactttttccacagtagcgctcttttcatctgtggacattgtacatatgtttgccagtagggccagaaaatctatggttatgtgataataggctgccttctgcggggcttgccttctggccatgcccttcttctctcccttgcacctgtacctcttggtctttgaataaagcctgagtaggaaggaccggtagacatgataagatacattgatgagtttggacaaaccacaactagaatgcagtgaaaaaaatgctttatttgtgaaatttgtgatgctattgctttatttgtaaccattataagctgcaataaacaagttaacaacaacaaaaaaaaaaaaaaaaaaaaaaaaaaaaaaacgttgactaaaaaaaaaaaaaaaaaaaaaaaaaaaaaaaaaaaaaaaaaaaaaaaaaaaaaaaaaaaaaaaaaaaaaa

SEQ ID NO: 11513 - DNA, 4564 bp, synthetic construct
  source 1..4564: mol_type = other DNA
ggtctagttacaactgggcatcgctgcagagatcgcacctcctcgtggtcccgctggtagcccttcgaagggtgactaagtcgatctctgccccaggtacggagccgttgggactcaccagtccaacgtaactcctgcctaaattcggtgaaacaaattcctcggtaaaaagccccatggcttcttgcccgaaacctggccccccggtttcagcaggggcaatgagtttggaaagtggactgaccacccactccgttctcgccatcgaacgtggtcccaattcgttggcaaattccggatcagactttgggggggggggtctggggctaccgttacgcctattgagggtatcggtcggcactcagacctcccgctccgactgggtagacctggtgtcctggagccacccaggacccacgtctaagtcccagcaggttgacctggtgtctttatttcctaaacaccgggttgacctgttatccaaaaacgaccaggtagacctggtggctcaatttttaccatctaaatttccccccaatttggcagaaaatgatttggctttgctggtgaacttagagttctacagatcggatttgcatgtgtatgagtgtgttcattttgctgcacattgggagggattaagtggtttgcctgaggtgtatgaacaacttgcaccacaaccgtgtgtgggagaaactttacattctagcctcccacgagacagtgaactgtttgtgcctgaagaggggagcagcgagaaggagagcgaggacgcgccaaaaacatctcctccgacgcctgggaaacatggtttggaacagactggggaggaaaaagtgatggtgactgttcctgacaaaaatccaccttgtccttgctgtggtacccgggtaaactctgtgttgaatctgattgaacatctgaaagtgtcacacgggaaaaggggggtttgttttcggtgtgcaaaatgtggaaaggaaaatagtaactatcacagtgttgtttgtcattttaagaaatgcaggggtccagagacggagaaagccccagctggggagtggatttgtgaggtatgcaacagagattttacaaccaaaattggcctgggacaacacaagagattggcacacccagcagtgagaaatcaggaaaggatcgttgcttcccaaccgaaagaaacatcaaatagaggtgctcacaaaaggtgctggacaaaggaggaggaagaattactaataagactggaggctcagttcgagggaaacaaaaatattaataagcttattgcagaacacataaccaccaaaacagctaagcagatcagtgacaaaaggcgattgctgtccagaaagccagcagaggagccacgtgaggagcctggaacgtgtcatcacaccaggagagcagctgcgagcctgagaacggagcctgagatgagtcatcacgcccaggcagaggacagagataatggacctgggagacgccctctgccaggcagggcagctgccggagggagaacaatggacgagataagacgccaccctgataagggcaacggacagcagagacccaccaagcaaaaatcagaagaacagctgcaggcttactataaaaagacactagaggaacgactttcagctggggcacttaacaccttcccccgagcattcaagcaggtaatggaaggccgggatataaagctagtaatcaatcagacagcgcaggactgcttcggatgcctggaatccataagccaaataagaacggcaacccgagataaaaaggacacggtgacccgggagaaacacccaaagaaaccttttcagaagtggatgaaggacagagcaatcaaaaaaggtaattatcttcggttccagcgtttattttatcttgatagagggaaactggctaaaatcattttagatgatattgaatgcttgtcttgtgacataccactcagtgaaatttattcggtttttaaaacaagatgggaaacaactggtagctttaaaagccttggggactttaaaacttacgggaaggctgacaacactgccttcagagaattaattacggctaaagaaattgagaaaaatgtgcaggaaatgagcaaaggctcggctcccggtccagacgggattactcttggggacgtcgtaaagatggatcccgagttttcccggaccatggagattttcaatttatggttaacaactggtaaaatcccggacatggtgagggggtgcagaaccgttttgattccaaaatcatcaaagccggatcgtttgaaagacattaataactggagacctatcacgatcggttccatcttgctgagactgttctccaggattgtaacagctaggctgagcaaagcgtgccccctgaacccaaggcaaagaggctttatcagagcggcgggatgctctgaaaacttaaaactcctgcaaactataatttggtcggccaaaagagaacacagaccactgggtgttgtattcgtggacatcgccaaggcttttgacaccgtaagccaccagcacatcattcatgctttgcagcaaagagaggtggatccccacatcgtcggtctggtgagcaatatgtacgagaacatcagtacgtatatcaccacaaagaggaacacacacacagacaaaatccagatccgggttggagtaaagcagggtgacccgatgtcgccccttttatttaacctggcaatggaccctctattatgcaagctggaagagagtggcaaaggataccaccgaggacagagcagcatcacagcgatggcatttgcagacgatctggttttgctgagcgactcctgggaaaatatgaatacaaatattagcatactggagaccttctgcaatctgaccggactcaaaacacaggggcaaaagtgccacggcttttacatcaagccgacaaaggactcttacaccatcaatgactgcgctgcctggactatcaacggcacacccctgaacatgatcgaccccggcgaatctgagaaatacctcggcctgcagtttgacccgtggattggaatagcaaggtccggtctctccacaaaactagatttttggcttcagcggatcgatcaagcaccacttaaacctctgcagaaaactgatattctcaaaacatacaccatccctcggctgatctacatagctgaccactcagaagtgaaaactgcactactcgaaacccttgaccagaagatccggacagcggtcaaggaatggcttcacctacctccgtgcacctgcgatgccatcctgtactcgagcacgagagacggcggtttgggcatcaccaaattggcaggactgatccccagcgtgcaggcccgtagactgcatcggatcgcacagtcatctgacgatacgatgaaatgcttcatggaaaaagagaaaatggaacagctgcataagaaattgtggattcaagctggaggggacagagagaacataccctcgatttgggaagcaccaccgtcgagtgaaccaccaaacaacgtgagcacaaattcggaatgggaagcaccgacccagaaagataaatttccaaagccttgcaattggaggaaaaacgaattcaaaaaatggaccaaattggcatcccaaggccgcggaattgtaaattttgaaagagacaaaattagtaaccattggatccaatactacagacgcatacctcacaggaaactcctcactgcactacaactcagggccaacgtttaccccacgagagaatttctagccaggggtagacaagaccaatacatcaaggcgtgtaggcactgcgatgcggacattgaatcctgcgcccacatcatcggcaactgcccagtgacacaggacgcccgaatcaagaggcacaattacatctgcgaactgcttctcgaggaggcgaagaagaaggactgggtagtgttcaaggaaccgcacataagggattccaacaaggaactgtacaaacctgacctgatatttgtgaaggatgcccgtgcacttgtcgtggatgtgacagtacggtatgaagcagccaaatcatcgctggaggaagccgctgcagagaaagtgagaaagtacaaacacctggaaacggaagtaagacatctcacgaatgcaaaggacgttacttttgtgggctttcccctaggagcgcgggggaaatggcaccaagataactttaaacttttgactgagcttggcctctccaaatcgaggcaagtgaaaatggcagagactttttccacagtagcgctcttttcatctgtggacattgtacatatgtttgccagtagggccagaaaatctatggttatgtgataataggctgccttctgcggggcttgccttctggccatgcccttcttctctcccttgcacctgtacctcttggtctttgaataaagcctgagtaggaaggaccggtaaaaaaaaaaaaaaaaaaaaaaaaaaaaaaacgttgactaaaaaaaaaaaaaaaaaaaaaaaaaaaaaaaaaaaaaaaaaaaaaaaaaaaaaaaaaaaaaaaaaaaaaa

SEQ ID NO: 11514 - DNA, 4703 bp, synthetic construct
  source 1..4703: mol_type = other DNA
ggtctagttacaactgggcatcgctgcagagatcgcacctcctcgtggtcccgctggtagcccttcgaagggtgactaagtcgatctctgccccaggtacggagccgttgggactcaccagtccaacgtaactcctgcctaaattcggtgaaacaaattcctcggtaaaaagccccatggcttcttgcccgaaacctggccccccggtttcagcaggggcaatgagtttggaaagtggactgaccacccactccgttctcgccatcgaacgtggtcccaattcgttggcaaattccggatcagactttgggggggggggtctggggggcccgttacgcctattgagggtatcggtcggcactcagacctcccgctccgactgggtagacctggtgtcctggagccacccaggacccacgtctaagtcccagcaggttgacctggtgtctttatttcctaaacaccgggttgacctgttatccaaaaacgaccaggtagacctggtggctcaatttttaccatctaaatttccccccaatttggcagaaaatgatttggctttgctggtgaacttagagttctacagatcggatttgcatgtgtatgagtgtgttcattttgctgcacattgggagggattaagtggtttgcctgaggtgtatgaacaacttgcaccacaaccgtgtgtgggagaaactttacattctagcctcccacgagacagtgaactgtttgtgcctgaagaggggagcagcgagaaggagagcgaggacgcgccaaaaacatctcctccgacgcctgggaaacatggtttggaacagactggggaggaaaaagtgatggtgactgttcctgacaaaaatccaccttgtccttgctgtggtacccgggtaaactctgtgttgaatctgattgaacatctgaaagtgtcacacgggaaaaggggggtttgttttcggtgtgcaaaatgtggaaaggaaaatagtaactatcacagtgttgtttgtcattttaagaaatgcaggggtccagagacggagaaagccccagctggggagtggatttgtgaggtatgcaacagagattttacaaccaaaattggcctgggacaacacaagagattggcacacccagcagtgagaaatcaggaaaggatcgttgcttcccaaccgaaagaaacatcaaatagaggtgctcacaaaaggtgctggacaaaggaggaggaagaattactaataagactggaggctcagttcgagggaaacaaaaatattaataagcttattgcagaacacataaccaccaaaacagctaagcagatcagtgacatgaggcgattgctgtccagaaagccagcagaggagccacgtgaggagcctggaacgtgtcatcacaccaggagagcagctgcgagcctgagaacggagcctgagatgagtcatcacgcccaggcagaggacagagataatggacctgggagacgccctctgccaggcagggcagctgccggagggagaacaatggacgagataagacgccaccctgataagggcaacggacagcagagacccaccaagcaaaaatcagaagaacagctgcaggcttactataaaaagacactagaggaacgactttcagctggggcacttaacaccttcccccgagcattcaagcaggtaatggaaggccgggatataaagctagtaatcaatcagacagcgcaggactacttcggatgcctggaatccataagccaaataagaacggcaacccgagataaaaaggacacgggcacccgggagaaacacccaaagaaaccttttcagaagtggatgaagaagagagcaatcaaaaaaggtaattatcttcggttccagcgtttattttatcttgatagagggaaactggctaaaatcattttagatgatattgaatgcttgtcttgtgacataccactcagtgaaatttattcggtttttaaaacaagatgggaaacaactggtagctttaaaagccttggggactttaaaacttacgggaaggctgacaacactgccttcagagaattaattacggctaaagaaattgagaaaaatgtgcaggaaatgagcaaaggctcggctcccggtccagacgggattactcttggggacgtcgtaaagatggatcccgagttttcccggaccatggagattttcaatttatggttaacaactggtaaaatcccggacatggtgagggggtgcagaaccgttttgattccaaaatcatcaaagccggatcgtttgaaagacattaataactggagacctatcacgatcggttccatcttgctgagactgttctccaggattgtaacagctaggctgagcaaagcgtgccccctgaacccaaggcaaagaggctttatcagagcggcgggatgctctgaaaacttaaaactcctgcaaactataatttggtcggccaaaagagaacacagaccactgggtgttgtattcgtggacatcgccaaggcttttgacaccgtaagccaccagcacatcattcatgctttgcagcaaagagaggtggatccccacatcgtcggtctggtgagcaatatgtacgagaacatcagtacgtatatcaccacaaagaggaacacacacacagacaaaatccagatccgggttggagtaaagcagggtgacccgatgtcgccccttttatttaacctggcaatggaccctctattatgcaagctggaagagagtggcaaaggataccaccgaggacagagcagcatcacagcgatggcatttgcagacgatctggttttgctgagcgactcctgggaaaatatgaatacaaatattagcatactggagaccttctgcaatctgaccggactcaaaacacaggggcaaaagtgccacggcttttacatcaagccgacaaaggactcttacaccatcaatgactgcgctgcctggactatcaacggcacacccctgaacatgatcgaccccggcgaatctgagaaatacctcggcctgcagtttgacccgtggattggaatagcaaggtccggtctctccacaaaactagatttttggcttcagcggatcgatcaagcaccacttaaacctctgcagaaaactgatattctcaaaacatacaccatccctcggctgatctacatagctgaccactcagaagtgaaaactgcactactcgaaacccttgaccagaagatccggacagcggtcaaggaatggcttcacctacctccgtgcacctgcgatgccatcctgtactcgagcacgagagacggcggtttgggcatcaccaaattggcaggactgatccccagcgtgcaggcccgtagactgcatcggatcgcacagtcatctgacgatacgatgaaatgcttcatggaaaaagagaaaatggaacagctgcataagaaattgtggattcaagctggaggggacagagagaacataccctcgatttgggaagcaccaccgtcgagtgaaccaccaaacaacgtgagcacaaattcggaatgggaagcaccgacccagaaagataaatttccaaagccttgcaattggaggaaaaacgaattcaaaaaatggaccaaattggcatcccaaggccgcggaattgtaaattttgaaagagacaaaattagtaaccattggatccaatactacagacgcatacctcacaggaaactcctcactgcactacaactcagggccaacgtttaccccacgagagaatttctagccaggggtagacaagaccaatacatcaaggcgtgtaggcactgcgatgcggacattgaatcctgcgcccacatcatcggcaactgcccagtgacacaggacgcccgaatcaagaggcacaattacatctgcgaactgcttctcgaggaggcgaagaagaaggactgggtagtgttcaaggaaccgcacataagggattccaacaaggaactgtacaaacctgacctgatatttgtgaaggatgcccgtgcacttgtcgtggatgtgacagtacggtatgaagcagccaaatcatcgctggaggaagccgctgcagagaaagtgagaaagtacaaacacctggaaacggaagtaagacatctcacgaatgcaaaggacgttacttttgtgggctttcccctaggagcgcgggggaaatggcaccaagataactttaaacttttgactgagcttggcctctccaaatcgaggcaagtgaaaatggcagagactttttccacagtagcgctcttttcatctgtggacattgtacatatgtttgccagtagggccagaaaatctatggttatgtgataataggctgccttctgcggggcttgccttctggccatgcccttcttctctcccttgcacctgtacctcttggtctttgaataaagcctgagtaggaaggaccggtagacatgataagatacattgatgagtttggacaaaccacaactagaatgcagtgaaaaaaatgctttatttgtgaaatttgtgatgctattgctttatttgtaaccattataagctgcaataaacaagttaacaacaacaaaaaaaaaaaaaaaaaaaaaaaaaaaaaaacgttgactaaaaaaaaaaaaaaaaaaaaaaaaaaaaaaaaaaaaaaaaaaaaaaaaaaaaaaaaaaaaaaaaaaaaaa

SEQ ID NO: 11515 - DNA, 4703 bp, synthetic construct
  source 1..4703: mol_type = other DNA
ggtctagttacaactgggcatcgctgcagagatcgcacctcctcgtggtcccgctggtagcccttcgaagggtgactaagtcgatctctgccccaggtacggagccgttgggactcaccagtccaacgtaactcctgcctaaattcggtgaaacaaattcctcggtaaaaagccccatggcttcttgcccgaaacctggccccccggtttcagcaggggcaatgagtttggaaagtggactgaccacccactccgttctcgccatcgaacgtggtcccaattcgttggcaaattccggatcagactttgggggggggggtctggggggcccgttacgcctattgagggtatcggtcggcactcagacctcccgctccgactgggtagacctggtgtcctggagccacccaggacccacgtctaagtcccagcaggttgacctggtgtctttatttcctaaacaccgggttgacctgttatccaaaaacgaccaggtagacctggtggctcaatttttaccatctaaatttccccccaatttggcagaaaatgatttggctttgctggtgaacttagagttctacagatcggatttgcatgtgtatgagtgtgttcattttgctgcacattgggagggattaagtggtttgcctgaggtgtatgaacaacttgcaccacaaccgtgtgtgggagaaactttacattctagcctcccacgagacagtgaactgtttgtgcctgaagaggggagcagcgagaaggagagcgaggacgcgccaaaaacatctcctccgacgcctgggaaacatggtttggaacagactggggaggaaaaagtgatggtgactgttcctgacaaaaatccaccttgtccttgctgtggtacccgggtaaactctgtgttgaatctgattgaacatctgaaagtgtcacacgggaaaaggggggtttgttttcggtgtgcaaaatgtggaaaggaaaatagtaactatcacagtgttgtttgtcattttaagaaatgcaggggtccagagacggagaaagccccagctggggagtggatttgtgaggtatgcaacagagattttacaaccaaaattggcctgggacaacacaagagattggcacacccagcagtgagaaatcaggaaaggatcgttgcttcccaaccgaaagaaacatcaaatagaggtgctcacaaaaggtgctggacaaaggaggaggaagaattactaataagactggaggctcagttcgagggaaacaaaaatattaataagcttattgcagaacacataaccaccaaaacagctaagcagatcagtgacatgaggcgattgctgtccagaaagccagcagaggagccacgtgaggagcctggaacgtgtcatcacaccaggagagcagctgcgagcctgagaacggagcctgagatgagtcatcacgcccaggcagaggacagagataatggacctgggagacgccctctgccaggcagggcagctgccggagggagaacaatggacgagataagacgccaccctgataagggcaacggacagcagagacccaccaagcaaaaatcagaagaacagctgcaggcttactataaaaagacactagaggaacgactttcagctggggcacttaacaccttcccccgagcattcaagcaggtaatggaaggccgggatataaagctagtaatcaatcagacagcgcaggactacttcggatgcctggaatccataagccaaataagaacggcaacccgagataaaaaggacacgggcacccgggagaaacacccaaagaaaccttttcagaagtggatgaagaagagagcaatcaaaaaaggtaattatcttcggttccagcgtttattttatcttgatagagggaaactggctaaaatcattttagatgatattgaatgcttgtcttgtgacataccactcagtgaaatttattcggtttttaaaacaagatgggaaacaactggtagctttaaaagccttggggactttaaaacttacgggaaggctgacaacactgccttcagagaattaattacggctaaagaaattgagaaaaatgtgcaggaaatgagcaaaggctcggctcccggtccagacgggattactcttggggacatcgtaaagatggatcccgagttttcccggaccatggagattttcaatttatggttaacaactggtaaaatcccggacatggtgagggggtgcagaaccgttttgattccaaaatcatcaaagccggatcgtttgaaagacattaataactggagacctatcacgatcggttccatcttgctgagactgttctccaggattgtaacagctaggctgagcaaagcgtgccccctgaacccaaggcaaagaggctttatcagagcggcgggatgctctgaaaacttaaaactcctgcaaactataatttggtcggccaaaagagaacacagaccactgggtgttgtattcgtggacatcgccaaggcttttgacaccgtaagccaccagcacatcattcatgctttgcagcaaagagaggtggatccccacatcgtcggtctggtgagcaatatgtacgagaacatcagtacgtatatcaccacaaagaggaacacacacacagacaaaatccagatccgggttggagtaaagcagggtgacccgatgtcgccccttttatttaacctggcaatggaccctctattatgcaagctggaagagagtggcaaaggataccaccgaggacagagcagcatcacagcgatggcatttgcagacgatctggttttgctgagcgactcctgggaaaatatgaatacaaatattagcatactggagaccttctgcaatctgaccggactcaaaacacaggggcaaaagtgccacggcttttacatcaagccgacaaaggactcttacaccatcaatgactgcgctgcctggactatcaacggcacacccctgaacatgatcgaccccggcgaatctgagaaatacctcggcctgcagtttgacccgtggattggaatagcaaggtccggtctctccacaaaactagatttttggcttcagcggatcgatcaagcaccacttaaacctctgcagaaaactgatattctcaaaacatacaccatccctcggctgatctacatagctgaccactcagaagtgaaaactgcactactcgaaacccttgaccagaagatccggacagcggtcaaggaatggcttcacctacctccgtgcacctgcgatgccatcctgtactcgagcacgagagacggcggtttgggcatcaccaaattggcaggactgatccccagcgtgcaggcccgtagactgcatcggatcgcacagtcatctgacgatacgatgaaatgcttcatggaaaaagagaaaatggaacagctgcataagaaattgtggattcaagctggaggggacagagagaacataccctcgatttgggaagcaccaccgtcgagtgaaccaccaaacaacgtgagcacaaattcggaatgggaagcaccgacccagaaagataaatttccaaagccttgcaattggaggaaaaacgaattcaaaaaatggaccaaattggcatcccaaggccgcggaattgtaaattttgaaagagacaaaattagtaaccattggatccaatactacagacgcatacctcacaggaaactcctcactgcactacaactcagggccaacgtttaccccacgagagaatttctagccaggggtagacaagaccaatacatcaaggcgtgtaggcactgcgatgcggacattgaatcctgcgcccacatcatcggcaactgcccagtgacacaggacgcccgaatcaagaggcacaattacatctgcgaactgcttctcgaggaggcgaagaagaaggactgggtagtgttcaaggaaccgcacataagggattccaacaaggaactgtacaaacctgacctgatatttgtgaaggatgcccgtgcacttgtcgtggatgtgacagtacggtatgaagcagccaaatcatcgctggaggaagccgctgcagagaaagtgagaaagtacaaacacctggaaacggaagtaagacatctcacgaatgcaaaggacgttacttttgtgggctttcccctaggagcgcgggggaaatggcaccaagataactttaaacttttgactgagcttggcctctccaaatcgaggcaagtgaaaatggcagagactttttccacagtagcgctcttttcatctgtggacattgtacatatgtttgccagtagggccagaaaatctatggttatgtgataataggctgccttctgcggggcttgccttctggccatgcccttcttctctcccttgcacctgtacctcttggtctttgaataaagcctgagtaggaaggaccggtagacatgataagatacattgatgagtttggacaaaccacaactagaatgcagtgaaaaaaatgctttatttgtgaaatttgtgatgctattgctttatttgtaaccattataagctgcaataaacaagttaacaacaacaaaaaaaaaaaaaaaaaaaaaaaaaaaaaaacgttgactaaaaaaaaaaaaaaaaaaaaaaaaaaaaaaaaaaaaaaaaaaaaaaaaaaaaaaaaaaaaaaaaaaaaaa

SEQ ID NO: 11516-11517 - skipped (2 entries)

SEQ ID NO: 11518 - DNA, 4564 bp, synthetic construct
  source 1..4564: mol_type = other DNA
ggtctagttacaactgggcatcgctgcagagatcgcacctcctcgtggtcccgctggtagcccttcgaagggtgactaagtcgatctctgccccaggtacggagccgttgggactcaccagtccaacgtaactcctgcctaaattcggtgaaacaaattcctcggtaaaaagccccatggcttcttgcccgaaacctggccccccggtttcagcaggggcaatgagtttggaaagtggactgaccacccactccgttctcgccatcgaacgtggtcccaattcgttggcaaattccggatcagactttgggggggggggtctggggctaccgttacgcctattgagggtatcggtcggcactcagacctcccgctccgactgggtagacctggtgtcctggagccacccaggacccacgtctaagtcccagcaggttgacctggtgtctttatttcctaaacaccgggttgacctgttatccaaaaacgaccaggtagacctggtggctcaatttttaccatctaaatttccccccaatttggcagaaaatgatttggctttgctggtgaacttagagttctacagatcggatttgcatgtgtatgagtgtgttcattttgctgcacattgggagggattaagtggtttgcctgaggtgtatgaacaacttgcaccacaaccgtgtgtgggagaaactttacattctagcctcccacgagacagtgaactgtttgtgcctgaagaggggagcagcgagaaggagagcgaggacgcgccaaaaacatctcctccgacgcctgggaaacatggtttggaacagactggggaggaaaaagtgatggtgactgttcctgacaaaaatccaccttgtccttgctgtggtacccgggtaaactctgtgttgaatctgattgaacatctgaaagtgtcacacgggaaaaggagggtttgttttcggtgtgcaaaatgtggaaaggaaaatagtaactatcacagtgttgtttgtcattttccaaaatgcaggggtccagagacggagaaagccccagctggggagtggatttgtgaggtatgcaacagagattttacaaccaaaattggcctgggacaacacaagagattggcacacccagcagtgagaaatcaggaaaggatcgttgcttcccaaccgaaagaaacatcaaatagaggtgctcacaaaaggtgctggacaaaggaggaggaagaattactaataagactggaggctcagttcgagggaaacaaaaatattaataagcttattgcagaacacataaccaccaaaacagctaagcagatcagtgacaaaaggcgattgctgtccagaaagccagcagaggagccacgtgaggagcctggaacgtgtcatcacaccaggagagcagctgcgagcctgagaacggagcctgagatgagtcatcacgcccaggcagaggacagagataatggacctgggagacgccctctgccaggcagggcagctgccggagggagaacaatggacgagataagacgccaccctgataagggcaacggacagcagagacccaccaagcaaaaatcagaagaacagctgcaggcttactataaaaagacactagaggaacgactttcagctggggcacttaacaccttcccccgagcattcaagcaggtaatggaaggccgggatataaagctagtaatcaatcagacagcgcaggactgcttcggatgcctggaatccataagccaaataagaacggcaacccgagataaaaaggacacggtgacccgggagaaacacccaaagaaaccttttcagaagtggatgaagaagagagcaatcaaaaaaggtaattatcttcggttccagcgtttattttatcttgatagagggaaactggctaaaatcattttagatgatattgaatgcttgtcttgtgacataccactcagtgaaatttattcggtttttaaaacaagatgggaaacaactggtagctttaaaagccttggggactttaaaacttacgggaaggctgacaacactgccttcagagaattaattacggctaaagaaattgagaaaaatgtgcaggaaatgagcaaaggctcggctcccggtccagacgggattactcttggggacgtcgtaaagatggatcccgagttttcccggaccatggagattttcaatttatggttaacaactggtaaaatcccggacatggtgagggggtgcagaaccgttttgattccaaaatcatcaaagccggatcgtttgaaagacattaataactggagacctatcacgatcggttccatcttgctgagactgttctccaggattgtaacagctaggctgagcaaagcgtgccccctgaacccaaggcaaagaggctttatcagagcggcgggatgctctgaaaacttaaaactcctgcaaactataatttggtcggccaaaagagaacacagaccactgggtgttgtattcgtggacatcgccaaggcttttgacaccgtaagccaccagcacatcattcatgctttgcagcaaagagaggtggatccccacatcgtcggtctggtgagcaatatgtacgagaacatcagtacgtatatcaccacaaagaggaacacacacacagacaaaatccagatccgggttggagtaaagcagggtgacccgatgtcgccccttttatttaacctggcaatggaccctctattatgcaagctggaagagagtggcaaaggataccaccgaggacagagcagcatcacagcgatggcatttgcagacgatctggttttgctgagcgactcctgggaaaatatgaatacaaatattagcatactggagaccttctgcaatctgaccggactcaaaacacaggggcaaaagtgccacggcttttacatcaagccgacaaaggactcttacaccatcaatgactgcgctgcctggactatcaacggcacacccctgaacatgatcgaccccggcgaatctgagaaatacctcggcctgcagtttgacccgtggattggaatagcaaggtccggtctctccacaaaactagatttttggcttcagcggatcgatcaagcaccacttaaacctctgcagaaaactgatattctcaaaacatacaccatccctcggctgatctacatagctgaccactcagaagtgaaaactgcactactcgaaacccttgaccagaagatccggacagcggtcaaggaatggcttcacctacctccgtgcacctgcgatgccatcctgtactcgagcacgagagacggcggtttgggcatcaccaaattggcaggactgatccccagcgtgcaggcccgtagactgcatcggatcgcacagtcatctgacgatacgatgaaatgcttcatggaaaaagagaaaatggaacagctgcataagaaattgtggattcaagctggaggggacagagagaacataccctcgatttgggaagcaccaccgtcgagtgaaccaccaaacaacgtgagcacaaattcggaatgggaagcaccgacccagaaagataaatttccaaagccttgcaattggaggaaaaacgaattcaaaaaatggaccaaattggcatcccaaggccgcggaattgtaaattttgaaagagacaaaattagtaaccattggatccaatactacagacgcatacctcacaggaaactcctcactgcactacaactcagggccaacgtttaccccacgagagaatttctagccaggggtagacaagaccaatacatcaaggcgtgtaggcactgcgatgcggacattgaatcctgcgcccacatcatcggcaactgcccagtgacacaggacgcccgaatcaagaggcacaattacatctgcgaactgcttctcgaggaggcgaagaagaaggactgggtagtgttcaaggaaccgcacataagggattccaacaaggaactgtacaaacctgacctgatatttgtgaaggatgcccgtgcacttgtcgtggatgtgacagtacggtatgaagcagccaaatcatcgctggaggaagccgctgcagagaaagtgagaaagtacaaacacctggaaacggaagtaagacatctcacgaatgcaaaggacgttacttttgtgggctttcccctaggagcgcgggggaaatggcaccaagataactttaaacttttgactgagcttggcctctccaaatcgaggcaagtgaaaatggcagagactttttccacagtagcgctcttttcatctgtggacattgtacatatgtttgccagtagggccagaaaatctatggttatgtgataataggctgccttctgcggggcttgccttctggccatgcccttcttctctcccttgcacctgtacctcttggtctttgaataaagcctgagtaggaaggaccggtaaaaaaaaaaaaaaaaaaaaaaaaaaaaaaacgttgactaaaaaaaaaaaaaaaaaaaaaaaaaaaaaaaaaaaaaaaaaaaaaaaaaaaaaaaaaaaaaaaaaaaaaa

SEQ ID NO: 11519 - DNA, 5144 bp, synthetic construct
  source 1..5144: mol_type = other DNA
gaaataagagagaaaagaagagtaagaagaaatataagagaattcgccaccatggcccctaagaaaaagagaaaggtggtgaccgtgaagttcaagtacaagggcgaggaaaaggaagtggacatcagcaagatcaagaaggtctggcgggtgggcaagatgatcagctttacctacgacgataacggcaagacaggcagaggcgccgtgtccgagaaggacgcccctaaagagctgctgcagatgctggaaaaaagcggctctgagacacctggaacaagcgagagcgccaccccggaatccaatatcagcggctctagctgcggcagccccaacagcgccgacaccagcagcgacttcaaggacctgtggaccaagctgaaggaatgccacgaccgggaagtgcagggactccaggtgaaggtcaccaaactcaagcaagaaagaatcctggacgcccagagactggaagaattcttcaccaagaaccagcagctgagagagcagcagaaagtgctgcacgagacaatcaaggttctggaagatagactgcgggccggcctgtgcgacagatgcgccgtgaccgaggaacacatgcgcaaaaagcagcaggagttcgagaacattagacagcaaaatctgaaattgatcacagagctgatgaacgagagaaacacactgcaggaggagaacaagaagctgagcgagcagctgcaacagaagatcgagaatgatcagcaacaccaggccgctgagctggaatgtgaagaggacgtgatccccgacagcccaatcacagctttcagcttttctggcgtgaacagactgaggcggaaggaaaacccccacgtgcggtacatcgagcagacccataccaagctggaacacagcgtgtgtgccaacgagatgagaaaggtgtccaagtcctccacccatccccagcacaaccctaacgaaaatgagatcctggtggctgatacctacgaccagtctcagagccctatggccaaggcccacggcaccagctcttatacccctgataagagctccttcaacctggccaccgtggtggccgagacactgggcctgggcgtgcaggaggaaagcgagacacagggcccaatgagccctctgggagatgagctgtaccactgcctggaaggcaaccacaagaaacagccttttgagtccggctccgagactcctggaacaagcgagagcgctacacctgagggcagctatgaacaacttgcaccacaaccgtgtgtgggagaaactttacattctagcctcccacgagacagtgaactgtttgtgcctgaagaggggagcagcgagaaggagagcgaggacgcgccaaaaacatctcctccgacgcctgggaaacatggtttgaggcagactggggaggaaaaagtgatggtgactgttcctgacaaaaatccaccttgtccttgctgtggtacccgggtaaactctgtgttgaatctgattgaacatctgaaagtgtcacacgggaaaaggggggtttgttttcggtgtgcaaaatgtggaaaggaaaatagtaactatcacagtgttgtttgtcattttaagaaatgcaggggtccagagacggagaaagccccagctggggagtggatttgtgaggtatgcaacagagattttacaaccaaaattggcctgggacaacacaagagattggcacacccagcagtgagaaatcaggaaaggatcgttgcttcccaaccgaaagaaacatcaaatagaggtgctcacaaaaggtgctggacaaaggaggaggaagaattactaataagactggaggctcagttcgagggaaacaaaaatattaataagcttattgcagaacacataaccaccaaaacagctaagcagatcagtgacaaaaggcgattgctgtccagaaagccagcagaggagccacgtgaggagcctggaacgtgtcatcacaccaggagagcagctgcgagcctgagaacggagcctgagatgagtcatcacgcccaggcagaggacagagataatggacctgggagacgccctctgccaggcagggcagctgccggagggagaacaatggacgagataagacgccaccctgataagggcaacggacagcagagacccaccaagcaaaaatcagaagaacagctgcaggcttactataaaaagacactagaggaacgactttcagctggggcacttaacaccttcccccgagcattcaagcaggtaatggaaggccgggatataaagctagtaatcaatcagacagcgcaggactgcttcggatgcctggaatccataagccaaataagaacggcaacccgagataaaaaggacacggtgacccgggagaaacacccaaagaaaccttttcagaagtggatgaagaagagagcaatcaaaaaaggtaattatcttcggttccagcgtttattttatcttgatagagggaaactggctaaaatcattttagatgatattgaatgcttgtcttgtgacataccactcagtgaaatttattcggtttttaaaacaagatgggaaacaactggtagctttaaaagccttggggactttaaaacttacgggaaggctgacaacactgccttcagagaattaattacggctaaagaaattgagaaaaatgtgcaggaaatgagcaaaggctcggctcccggtccagacgggattactcttggggacgtcgtaaagatggatcccgagttttcccggaccatggagattttcaatttatggttaacaactggtaaaatcccggacatggtgagggggtgcagaaccgttttgattccaaaatcatcaaagccggatcgtttgaaagacattaataactggagacctatcacgatcggttccatcttgctgagactgttctccaggattgtaacagctaggctgagcaaagcgtgccccctgaacccaaggcaaagaggctttatcagagcggcgggatgctctgaaaacttaaaactcctgcaaactataatttggtcggccaaaagagaacacagaccactgggtgttgtattcgtggacatcgccaaggcttttgacaccgtaagccaccagcacatcattcatgctttgcagcaaagagaggtggatccccacatcgtcggtctggtgagcaatatgtacgagaacatcagtacgtatatcaccacaaagaggaacacacacacagacaaaatccagatccgggttggagtaaagcagggtgacccgatgtcgccccttttatttaacctggcaatggaccctctattatgcaagctggaagagagtggcaaaggataccaccgaggacagagcagcatcacagcgatggcatttgcagacgatctggttttgctgagcgactcctgggaaaatatgaatacaaatattagcatactggagaccttctgcaatctgaccggactcaaaacacaggggcaaaagtgccacggcttttacatcaagccgacaaaggactcttacaccatcaatgactgcgctgcctggactatcaacggcacacccctgaacatgatcgaccccggcgaatctgagaaatacctcggcctgcagtttgacccgtggattggaatagcaaggtccggtctctccacaaaactagatttttggcttcagcggatcgatcaagcaccacttaaacctctgcagaaaactgatattctcaaaacatacaccatccctcggctgatctacatagctgaccactcagaagtgaaaagcgcactactcgaaacccttgaccagaagatccggacagcggtcaaggaatggcttcacctacctccgtgcacctgcgatgccatcctgtactcgagcacgagagacggcggtttgggcatcaccaaattggcaggactgatccccagcgtgcaggcccgtagactgcatcggatcgcacagtcatctgacgatacgatgaaatgcttcatggaaaaagagaaaatggaacagctgcataagaaattgtggattcaagctggaggggacagagagaacataccctcgatttgggaagcaccaccgtcgagtgaaccaccaaacaacgtgagcacaaattcggaatgggaagcaccgacccagaaagataaatttccaaagccttgcaattggaggaaaaacgaattcaaaaaatggaccaaattggcatcccaaggccgcggaattgtaaattttgaaagagacaaaattagtaaccattggatccaatactacagacgcatacctcacaggaaactcctcactgcactacaactcagggccaacgtttaccccacgagagaatttctagccaggggtagacaagaccaatacatcaaggcgtgtaggcactgcgatgcggacaacgaatcctgcgcccacatcatcggcaactgcccagtgacacaggacgcccgaatcaagaggcacaattacatctgcgaactgcttctcgaggaggcgaagaagaaggactgggtagtgttcaaggaaccgcacataagggattccaacaaggaactgtacaaacctgacctgatatttgtgaaggatgggcgtgcacttgtcgtggatgtgacagtacggtatgaagcagccaaatcatcgctggaggaagccgctgcagagaaagtgagaaagtacaaacacctggaaacggaagtaagacatctcacgaatgcaaaggacgttacttttgtgggctttcccctaggagcgcgggggaaatggcaccaagataactttaaacttttgactgagcttggcctctccaaatcgaggcaagtgaaaatggcagagactttttccacagtagcgctcttttcatctgtggacattgtacatatgtttgccagtagggccagaaaatctatggttatgtgataataggctgccttctgcggggcttgccttctggccatgcccttcttctctcccttgcacctgtacctcttggtctttgaataaagcctgagtaggaaggaccggtaaaaaaaaaaaaaaaaaaaaaaaaaaaaaaacgttgactaaaaaaaaaaaaaaaaaaaaaaaaaaaaaaaaaaaaaaaaaaaaaaaaaaaaaaaaaaaaaaaaaaaaaa

SEQ ID NO: 11520 - DNA, 4703 bp, synthetic construct
  source 1..4703: mol_type = other DNA
ggtctagttacaactgggcatcgctgcagagatcgcacctcctcgtggtcccgctggtagcccttcgaagggtgactaagtcgatctctgccccaggtacggagccgttgggactcaccagtccaacgtaactcctgcctaaattcggtgaaacaaattcctcggtaaaaagccccatggcttcttgcccgaaacctggccccccggtttcagcaggggcaatgagtttggaaagtggactgaccacccactccgttctcgccatcgaacgtggtcccaattcgttggcaaattccggatcagactttgggggggggggtctggggctaccgttacgcctattgagggtatcggtcggcactcagacctcccgctccgactgggtagacctggtgtcctggagccacccaggacccacgtctaagtcccagcaggttgacctggtgtctttatttcctaaacaccgggttgacctgttatccaaaaacgaccaggtagacctggtggctcaatttttaccatctaaatttccccccaatttggcagaaaatgatttggctttgctggtgaacttagagttctacagatcggatttgcatgtgtatgagtgtgttcattttgctgcacattgggagggattaagtggtttgcctgaggtgtatgaacaacttgcaccacaaccgtgtgtgggagaaactttacattctagcctcccacgagacagtgaactgtttgtgcctgaagaggggagcagcgagaaggagagcgaggacgcgccaaaaacatctcctccgacgcctgggaaacatggtttggaacagactggggaggaaaaagtgatggtgactgttcctgacaaaaatccaccttgtccttgctgtggtacccgggtaaactctgtgttgaatctgattgaacatctgaaagtgtcacacgggaaaaggggggtttgttttcggtgtgcaaaatgtggaaaggaaaatagtaactatcacagtgttgtttgtcattttccaaaatgcaggggtccagagacggagaaagccccagctggggagtggatttgtgaggtatgcaacagagattttacaaccaaaattggcctgggacaacacaagagattggcacacccagcagtgagaaatcaggaaaggatcgttgcttcccaaccgaaagaaacatcaaatagaggtgctcacaaaaggtgctggacaaaggaggaggaagaattactaataagactggaggctcagttcgagggaaacaaaaatattaataagcttattgcagaacacataaccaccaaaacagctaagcagatcagtgacaaaaggcgattgctgtccagaaagccagcagaggagccacgtgaggagcctggaacgtgtcatcacaccaggagagcagctgcgagcctgagaacggagcctgagatgagtcatcacgcccaggcagaggacagagataatggacctgggagacgccctctgccaggcagggcagctgccggagggagaacaatggacgagataagacgccaccctgataagggcaacggacagcagagacccaccaagcaaaaatcagaagaacagctgcaggcttactataaaaagacactagaggaacgactttcagctggggcacttaacaccttcccccgagcattcaagcaggtaatggaaggccgggatataaagctagtaatcaatcagacagcgcaggactacttcggatgcctggaatccataagccaaataagaacggcaacccgagataaaaaggacacggtgacccgggagaaacacccaaagaaaccttttcagaagtggatgaaggacagagcaatcaaaaaaggtaattatcttcggttccagcgtttattttatcttgatagagggaaactggctaaaatcattttagatgatattgaatgcttgtcttgtgacataccactcagtgaaatttattcggtttttaaaacaagatgggaaacaactggtagctttaaaagccttggggactttaaaacttacgggaaggctgacaacactgccttcagagaattaattacggctaaagaaattgagaaaaatgtgcaggaaatgagcaaaggctcggctcccggtccagacgggattactcttggggacgtcgtaaagatggatcccgagggctcccggaccatggagattttcaatttatggttaacaactggtaaaatcccggacatggtgagggggtgcagaaccgttttgattccaaaatcatcaaagccggatcgtttgaaagacattaataactggagacctatcacgatcggttccatcttgctgagactgttctccaggattgtaacagctaggctgagcaaagcgtgccccctgaacccaaggcaaagaggctttatcagagcggcgggatgctctgaaaacttaaaactcctgcaaactataatttggtcggccaaaagagaacacagaccactgggtgttgtattcgtggacatcgccaaggcttttgacaccgtaagccaccagcacatcattcatgctttgcagcaaagagaggtggatccccacatcgtcggtctggtgagcaatatgtacgagaacatcagtacgtatatcaccacaaagaggaacacacacacagacaaaatccagatccgggttggagtaaagcagggtgacccgatgtcgccccttttatttaacctggcaatggaccctctattatgcaagctggaagagagtggcaaaggataccaccgaggacagagcagcatcacagcgatggcatttgcagacgatctggttttgctgagcgactcctgggaaaatatgaatacaaatattagcatactggagaccttctgcaatctgaccggactcaaaacacaggggcaaaagtgccacggcttttacatcaagccgacaaaggactcttacaccatcaatgactgcgctgcctggactatcaacggcacacccctgaacatgatcgaccccggcgaatctgagaaatacctcggcctgcagtttgacccgtggattggaatagcaaggtccggtctctccacaaaactagatttttggcttcagcggatcgatcaagcaccacttaaacctctgcagaaaactgatattctcaaaacatacaccatccctcggctgatctacatagctgaccactcagaagtgaaaactgcactactcgaaacccttgaccagaagatccggacagcggtcaaggaatggcttcacctacctccgtgcacctgcgatgccatcctgtactcgagcacgagagacggcggtttgggcatcaccaaattggcaggactgatccccagcgtgcaggcccgtagactgcatcggatcgcacagtcatctgacgatacgatgaaatgcttcatggaaaaagagaaaatggaacagctgcataagaaattgtggattcaagctggaggggacagagagaacataccctcgatttgggaagcaccaccgtcgagtgaaccaccaaacaacgtgagcacaaattcggaatgggaagcaccgacccagaaagataaatttccaaagccttgcaattggaggaaaaacgaattcaaaaaatggaccaaattggcatcccaaggccgcggaattgtaaattttgaaagagacaaaattagtaaccattggatccaatactacagacgcatacctcacaggaaactcctcactgcactacaactcagggccaacgtttaccccacgagagaatttctagccaggggtagacaagaccaatacatcaaggcgtgtaggcactgcgatgcggacattgaatcctgcgcccacatcatcggcaactgcccagtgacacaggacgcccgaatcaagaggcacaattacatctgcgaactgcttctcgaggaggcgaagaagaaggactgggtagtgttcaaggaaccgcacataagggattccaacaaggaactgtacaaacctgacctgatatttgtgaaggatgcccgtgcacttgtcgtggatgtgacagtacggtatgaagcagccaaatcatcgctggaggaagccgctgcagagaaagtgagaaagtacaaacacctggaaacggaagtaagacatctcacgaatgcaaaggacgttacttttgtgggctttcccctaggagcgcgggggaaatggcaccaagataactttaaacttttgactgagcttggcctctccaaatcgaggcaagtgaaaatggcagagactttttccacagtagcgctcttttcatctgtggacattgtacatatgtttgccagtagggccagaaaatctatggttatgtgataataggctgccttctgcggggcttgccttctggccatgcccttcttctctcccttgcacctgtacctcttggtctttgaataaagcctgagtaggaaggaccggtagacatgataagatacattgatgagtttggacaaaccacaactagaatgcagtgaaaaaaatgctttatttgtgaaatttgtgatgctattgctttatttgtaaccattataagctgcaataaacaagttaacaacaacaaaaaaaaaaaaaaaaaaaaaaaaaaaaaaacgttgactaaaaaaaaaaaaaaaaaaaaaaaaaaaaaaaaaaaaaaaaaaaaaaaaaaaaaaaaaaaaaaaaaaaaaa

SEQ ID NO: 11521 - DNA, 4703 bp, synthetic construct
  source 1..4703: mol_type = other DNA
ggtctagttacaactgggcatcgctgcagagatcgcacctcctcgtggtcccgctggtagcccttcgaagggtgactaagtcgatctctgccccaggtacggagccgttgggactcaccagtccaacgtaactcctgcctaaattcggtgaaacaaattcctcggtaaaaagccccatggcttcttgcccgaaacctggccccccggtttcagcaggggcaatgagtttggaaagtggactgaccacccactccgttctcgccatcgaacgtggtcccaattcgttggcaaattccggatcagactttgggggggggggtctggggctaccgttacgcctattgagggtatcggtcggcactcagacctcccgctccgactgggtagacctggtgtcctggagccacccaggacccacgtctaagtcccagcaggttgacctggtgtctttatttcctaaacaccgggttgacctgttatccaaaaacgaccaggtagacctggtggctcaatttttaccatctaaatttccccccaatttggcagaaaatgatttggctttgctggtgaacttagagttctacagatcggatttgcatgtgtatgagtgtgttcattttgctgcacattgggagggattaagtggtttgcctgaggtgtatgaacaacttgcaccacaaccgtgtgtgggagaaactttacattctagcctcccacgagacagtgaactgtttgtgcctgaagaggggagcagcgagaaggagagcgaggacgcgccaaaaacatctcctccgacgcctgggaaacatggtttggaacagactggggaggaaaaagtgatggtgactgttcctgacaaaaatccaccttgtccttgctgtggtacccgggtaaactctgtgttgaatctgattgaacatctgaaagtgtcacacgggaaaaggggggtttgttttcggtgtgcaaaatgtggaaaggaaaatagtaactatcacagtgttgtttgtcattttaagaaatgcaggggtccagagacggagaaagccccagctggggagtggatttgtgaggtatgcaacagagattttacaaccaaaattggcctgggacaacacaagagattggcacacccagcagtgagaaatcaggaaaggatcgttgcttcccaaccgaaagaaacatcaaatagaggtgctcacaaaaggtgctggacaaaggaggaggaagaattactaataagactggaggctcagttcgagggaaacaaaaatattaataagcttattgcagaacacataaccaccaaaacagctaagcagatcagtgacaaaaggcgattgctgtccagaaagccagcagaggagccacgtgaggagcctggaacgtgtcatcacaccaggagagcagctgcgagcctgagaacggagcctgagatgagtcatcacgcccaggcagaggacagagataatggacctgggagacgccctctgccaggcagggcagctgccggagggagaacaatggacgagataagacgccaccctgataagggcaacggacagcagagacccaccaagcaaaaatcagaagaacagctgcaggcttactataaaaagacactagaggaacgactttcagctggggcacttaacaccttcccccgagcattcaagcaggtaatggaaggccgggatataaagctagtaatcaatcagacagcgcaggactacttcggatgcctggaatccataagccaaataagaacggcaacccgagataaaaaggacacggtgacccgggagaaacacccaaagaaaccttttcagaagtggatgaaggacagagcaatcaaaaaaggtaattatcttcggttccagcgtttattttatcttgatagagggaaactggctaaaatcattttagatgatattgaatgcttgtcttgtgacataccactcagtgaaatttattcggtttttaaaacaagatgggaaacaactggtagctttaaaagccttggggactttaaaacttacgggaaggctgacaacactgccttcagagaattaattacggctaaagaaattgagaaaaatgtgcaggaaatgagcaaaggctcggctcccggtccagacgggattactcttggggacgtcgtaaagatggatcccgagttttcccggaccatggagattttcaatttatggttaacaactggtaaaatcccggacatggtgagggggtgcagaaccgttttgattccaaaatcatcagacccggatcgtttgaaagacattaataactggagacctatcacgatcggttccatcttgctgagactgttctccaggattgtaacagctaggctgagcaaagcgtgccccctgaacccaaggcaaagaggctttatcagagcggcgggatgctctgaaaacttaaaactcctgcaaactataatttggtcggccaaaagagaacacagaccactgggtgttgtattcgtggacatcgccaaggcttttgacaccgtaagccaccagcacatcattcatgctttgcagcaaagagaggtggatccccacatcgtcggtctggtgagcaatatgtacgagaacatcagtacgtatatcaccacaaagaggaacacacacacagacaaaatccagatccgggttggagtaaagcagggtgacccgatgtcgccccttttatttaacctggcaatggaccctctattatgcaagctggaagagagtggcaaaggataccaccgaggacagagcagcatcacagcgatggcatttgcagacgatctggttttgctgagcgactcctgggaaggcatgaatacaaatattagcatactggagaccttctgcaatctgaccggactcaaaacacaggggcaaaagtgccacggcttttacatcaagccgacaaaggactcttacaccatcaatgactgcgctgcctggactatcaacggcacacccctgaacatgatcgaccccggcgaatctgagaaatacctcggcctgcagtttgacccgtggattggaatagcaaggtccggtctctccacaaaactagatttttggcttcagcggatcgatcaagcaccacttaaacctctgcagaaaactgatattctcaaaacatacaccatccctcggctgatctacatagctgaccactcagaagtgaaaactgcactactcgaaacccttgaccagaagatccggacagcggtcaaggaatggcttcacctacctccgtgcacctgcgatgccatcctgtactcgagcacgagagacggcggtttgggcatcaccaaattggcaggactgatccccagcgtgcaggcccgtagactgcatcggatcgcacagtcatctgacgatacgatgaaatgcttcatggaaaaagagaaaatggaacagctgcataagaaattgtggattcaagctggaggggacagagagaacataccctcgatttgggaagcaccaccgtcgagtgaaccaccaaacaacgtgagcacaaattcggaatgggaagcaccgacccagaaagataaatttccaaagccttgcaattggaggaaaaacgaattcaaaaaatggaccaaattggcatcccaaggccgcggaattgtaaattttgaaagagacaaaattagtaaccattggatccaatactacagacgcatacctcacaggaaactcctcactgcactacaactcagggccaacgtttaccccacgagagaatttctagccaggggtagacaagaccaatacatcaaggcgtgtaggcactgcgatgcggacattgaatcctgcgcccacatcatcggcaactgcccagtgacacaggacgcccgaatcaagaggcacaataagatctgcgaactgcttctcgaggaggcgaagaagaaggactgggtagtgttcaaggaaccgcacataagggattccaacaaggaactgtacaaacctgacctgatatttgtgaaggatgcccgtgcacttgtcgtggatgtgacagtacggtatgaagcagccaaatcatcgctggaggaagccgctgcagagaaagtgagaaagtacaaacacctggaaacggaagtaagacatctcacgaatgcaaaggacgttacttttgtgggctttcccctaggagcgcgggggaaatggcaccaagataactttaaacttttgactgagcttggcctctccaaatcgaggcaagtgaaaatggcagagactttttccacagtagcgctcttttcatctgtggacattgtacatatgtttgccagtagggccagaaaatctatggttatgtgataataggctgccttctgcggggcttgccttctggccatgcccttcttctctcccttgcacctgtacctcttggtctttgaataaagcctgagtaggaaggaccggtagacatgataagatacattgatgagtttggacaaaccacaactagaatgcagtgaaaaaaatgctttatttgtgaaatttgtgatgctattgctttatttgtaaccattataagctgcaataaacaagttaacaacaacaaaaaaaaaaaaaaaaaaaaaaaaaaaaaaacgttgactaaaaaaaaaaaaaaaaaaaaaaaaaaaaaaaaaaaaaaaaaaaaaaaaaaaaaaaaaaaaaaaaaaaaaa

SEQ ID NO: 11522 - DNA, 4703 bp, synthetic construct
  source 1..4703: mol_type = other DNA
ggtctagttacaactgggcatcgctgcagagatcgcacctcctcgtggtcccgctggtagcccttcgaagggtgactaagtcgatctctgccccaggtacggagccgttgggactcaccagtccaacgtaactcctgcctaaattcggtgaaacaaattcctcggtaaaaagccccatggcttcttgcccgaaacctggccccccggtttcagcaggggcaatgagtttggaaagtggactgaccacccactccgttctcgccatcgaacgtggtcccaattcgttggcaaattccggatcagactttgggggggggggtctggggctaccgttacgcctattgagggtatcggtcggcactcagacctcccgctccgactgggtagacctggtgtcctggagccacccaggacccacgtctaagtcccagcaggttgacctggtgtctttatttcctaaacaccgggttgacctgttatccaaaaacgaccaggtagacctggtggctcaatttttaccatctaaatttccccccaatttggcagaaaatgatttggctttgctggtgaacttagagttctacagatcggatttgcatgtgtatgagtgtgttcattttgctgcacattgggagggattaagtggtttgcctgaggtgtatgaacaacttgcaccacaaccgtgtgtgggagaaactttacattctagcctcccacgagacagtgaactgtttgtgcctgaagaggggagcagcgagaaggagagcgaggacgcgccaaaaacatctcctccgacgcctgggaaacatggtttggaacagactggggaggaaaaagtgatggtgactgttcctgacaaaaatccaccttgtccttgctgtggtacccgggtaaactctgtgttgaatctgattgaacatctgaaagtgtcacacgggaaaaggggggtttgttttcggtgtgcaaaatgtggaaaggaaaatagtaactatcacagtgttgtttgtcattttaagaaatgcaggggtccagagacggagaaagccccagctggggagtggatttgtgaggtatgcaacagagattttacaaccaaaattggcctgggacaacacaagagattggcacacccagcagtgagaaatcaggaaaggatcgttgcttcccaaccgaaagaaacatcaaatagaggtgctcacaaaaggtgctggacaaaggaggaggaagaattactaataagactggaggctcagttcgagggaaacaaaaatattaataagcttattgcagaacacataaccaccaaaacagctaagcagatcagtgacaaaaggcgattgctgtccagaaagccagcagaggagccacgtgaggagcctggaacgtgtcatcacaccaggagagcagctgcgagcctgagaacggagcctgagatgagtcatcacgcccaggcagaggacagagataatggacctgggagacgccctctgccaggcagggcagctgccggagggagaacaatggacgagataagacgccaccctgataagggcaacggacagcagagacccaccaagcaaaaatcagaagaacagctgcaggcttactataaaaagacactagaggaacgactttcagctggggcacttaacaccttcccccgagcattcaagcaggtaatggaaggccgggatataaagctagtaatcaatcagacagcgcaggactacttcggatgcctggaatccataagccaaataagaacggcaacccgagataaaaaggacacggtgacccgggagaaacacccaaagaaaccttttcagaagtggatgaagaagagagcaatcaaaaaaggtaattatcttcggttccagcgtttattttatcttgatagagggaaactggctaaaatcattttagatgatattgaatgcttgtcttgtgacataccactcagtgaaatttattcggtttttaaaacaagatgggaaacaactggtagctttaaaagccttggggactttaaaacttacgggaaggctgacaacactgccttcagagaattaattacggctaaagaaattgagaaaaatgtgcaggaaatgagcaaaggctcggctcccggtccagacgggattactcttggggacgtcgtaaagatggatcccgagttttcccggaccatggagattttcaatttatggttaacaactggtaaaatcccggacatggtgagggggtgcagaaccgttttgattccaaaatcatcagacccggatcgtttgaaagacattaataactggagacctatcacgatcggttccatcttgctgagactgttctccaggattgtaacagctaggctgagcaaagcgtgccccctgaacccaaggcaaagaggctttatcagagcggcgggatgctctgaaaacttaaaactcctgcaaactataatttggtcggccaaaagagaacacagaccactgggtgttgtattcgtggacatcgccaaggcttttgacaccgtaagccaccagcacatcattcatgctttgcagcaaagagaggtggatccccacatcgtcggtctggtgagcaatatgtacgagaacatcagtacgtatatcaccacaaagaggaacacacacacagacaaaatccagatccgggttggagtaaagcagggtgacccgatgtcgccccttttatttaacctggcaatggaccctctattatgcaagctggaagagagtggcaaaggataccaccgaggacagagcagcatcacagcgatggcatttgcagacgatctggttttgctgagcgactcctgggaaaatatgaatacaaatattagcatactggagaccttctgcaatctgaccggactcaaaacacaggggcaaaagtgccacggcttttacatcaagccgacaaaggactcttacaccatcaatgactgcgctgcctggactatcaacggcacacccctgaacatgatcgaccccggcgaatctgagaaatacctcggcctgcagtttgacccgtggattggaatagcaaggtccggtctctccacaaaactagatttttggcttcagcggatcgatcaagcaccacttaaacctctgcagaaaactgatattctcaaaacatacaccatccctcggctgatctacatagctgaccactcagaagtgaaaactggcctactcgaaacccttgaccagaagatccggacagcggtcaaggaatggcttcacctacctccgtgcacctgcgatgccatcctgtactcgagcacgagagacggcggtttgggcatcaccaaattggcaggactgatccccagcgtgcaggcccgtagactgcatcggatcgcacagtcatctgacgatacgatgaaatgcttcatggaaaaagagaaaatggaacagctgcataagaaattgtggattcaagctggaggggacagagagaacataccctcgatttgggaagcaccaccgtcgagtgaaccaccaaacaacgtgagcacaaattcggaatgggaagcaccgacccagaaagataaatttccaaagccttgcaattggaggaaaaacgaattcaaaaaatggaccaaattggcatcccaaggccgcggaattgtaaattttgaaagagacaaaattagtaaccattggatccaatactacagacgcatacctcacaggaaactcctcactgcactacaactcagggccaacgtttaccccacgagagaatttctagccaggggtagacaagaccaatacatcaaggcgtgtaggcactgcgatgcggacattgaatcctgcgcccacatcatcggcaactgcccagtgacacaggacgcccgaatcaagaggcacaattacatctgcgaactgcttctcgaggaggcgaagaagaaggactgggtagtgttcaaggaaccgcacataagggattccaacaaggaactgtacaaacctgacctgatatttgtgaaggatgcccgtgcacttgtcgtggatgtgacagtacggtatgaagcagccaaatcatcgctggaggaagccgctgcagagaaagtgagaaagtacaaacacctggaaacggaagtaagacatctcacgaatgcaaaggacgttacttttgtgggctttcccctaggagcgcgggggaaatggcaccaagataactttaaacttttgactgagcttggcctctccaaatcgaggcaagtgaaaatggcagagactttttccacagtagcgctcttttcatctgtggacattgtacatatgtttgccagtagggccagaaaatctatggttatgtgataataggctgccttctgcggggcttgccttctggccatgcccttcttctctcccttgcacctgtacctcttggtctttgaataaagcctgagtaggaaggaccggtagacatgataagatacattgatgagtttggacaaaccacaactagaatgcagtgaaaaaaatgctttatttgtgaaatttgtgatgctattgctttatttgtaaccattataagctgcaataaacaagttaacaacaacaaaaaaaaaaaaaaaaaaaaaaaaaaaaaaacgttgactaaaaaaaaaaaaaaaaaaaaaaaaaaaaaaaaaaaaaaaaaaaaaaaaaaaaaaaaaaaaaaaaaaaaaa

SEQ ID NO: 11523 - DNA, 4703 bp, synthetic construct
  source 1..4703: mol_type = other DNA
ggtctagttacaactgggcatcgctgcagagatcgcacctcctcgtggtcccgctggtagcccttcgaagggtgactaagtcgatctctgccccaggtacggagccgttgggactcaccagtccaacgtaactcctgcctaaattcggtgaaacaaattcctcggtaaaaagccccatggcttcttgcccgaaacctggccccccggtttcagcaggggcaatgagtttggaaagtggactgaccacccactccgttctcgccatcgaacgtggtcccaattcgttggcaaattccggatcagactttgggggggggggtctggggctaccgttacgcctattgagggtatcggtcggcactcagacctcccgctccgactgggtagacctggtgtcctggagccacccaggacccacgtctaagtcccagcaggttgacctggtgtctttatttcctaaacaccgggttgacctgttatccaaaaacgaccaggtagacctggtggctcaatttttaccatctaaatttccccccaatttggcagaaaatgatttggctttgctggtgaacttagagttctacagatcggatttgcatgtgtatgagtgtgttcattttgctgcacattgggagggattaagtggtttgcctgaggtgtatgaacaacttgcaccacaaccgtgtgtgggagaaactttacattctagcctcccacgagacagtgaactgtttgtgcctgaagaggggagcagcgagaaggagagcgaggacgcgccaaaaacatctcctccgacgcctgggaaacatggtttggaacagactggggaggaaaaagtgatggtgactgttcctgacaaaaatccaccttgtccttgctgtggtacccgggtaaactctgtgttgaatctgattgaacatctgaaagtgtcacacgggaaaaggggggtttgttttcggtgtgcaaaatgtggaaaggaaaatagtaactatcacagtgttgtttgtcattttaagaaatgcaggggtccagagacggagaaagccccagctggggagtggatttgtgaggtatgcaacagagattttacaaccaaaattggcctgggacaacacaagagattggcacacccagcagtgagaaatcaggaaaggatcgttgcttcccaaccgaaagaaacatcaaatagaggtgctcacaaaaggtgctggacaaaggaggaggaagaattactaataagactggaggctcagttcgagggaaacaaaaatattaataagcttattgcagaacacataaccaccaaaacagctaagcagatcagtgacaaaaggcgattgctgtccagaaagccagcagaggagccacgtgaggagcctggaacgtgtcatcacaccaggagagcagctgcgagcctgagaacggagcctgagatgagtcatcacgcccaggcagaggacagagataatggacctgggagacgccctctgccaggcagggcagctgccggagggagaacaatggacgagataagacgccaccctgataagggcaacggacagcagagacccaccaagcaaaaatcagaagaacagctgcaggcttactataaaaagacactagaggaacgactttcagctggggcacttaacaccttcccccgagcattcaagcaggtaatggaaggccgggatataaagctagtaatcaatcagacagcgcaggactacttcggatgcctggaatccataagccaaataagaacggcaacccgagataaaaaggacacggtgacccgggagaaacacccaaagaaaccttttcagaagtggatgaagaagagagcaatcaaaaaaggtaattatcttcggttccagcgtttattttatcttgatagagggaaactggctaaaatcattttagatgatattgaatgcttgtcttgtgacataccactcagtgaaatttattcggtttttaaaacaagatgggaaacaactggtagctttaaaagccttggggactttaaaacttacgggaaggctgacaacactgccttcagagaattaattacggctaaagaaattgagaaaaatgtgcaggaaatgagcaaaggctcggctcccggtccagacgggattactcttggggacgtcgtaaagatggatcccgagttttcccggaccatggagattttcaatttatggttaacaactggtaaaatcccggacatggtgagggggtgcagaaccgttttgattccaaaatcatcagacccggatcgtttgaaagacattaataactggagacctatcacgatcggttccatcttgctgagactgttctccaggattgtaacagctaggctgagcaaagcgtgccccctgaacccaaggcaaagaggctttatcagagcggcgggatgctctgaaaacttaaaactcctgcaaactataatttggtcggccaaaagagaacacagaccactgggtgttgtattcgtggacatcgccaaggcttttgacaccgtaagccaccagcacatcattcatgctttgcagcaaagagaggtggatccccacatcgtcggtctggtgagcaatatgtacgagaacatcagtacgtatatcaccacaaagaggaacacacacacagacaaaatccagatccgggttggagtaaagcagggtgacccgatgtcgccccttttatttaacctggcaatggaccctctattatgcaagctggaagagagtggcaaaggataccaccgaggacagagcagcatcacagcgatggcatttgcagacgatctggttttgctgagcgactcctgggaaaatatgaatacaaatattagcatactggagaccttctgcaatctgaccggactcaaaacacaggggcaaaagtgccacggcttttacatcaagccgacaaaggactcttacaccatcaatgactgcgctgcctggactatcaacggcacacccctgaacatgatcgaccccggcgaatctgagaaatacctcggcctgcagtttgacccgtggattggaatagcaaggtccggtctctccacaaaactagatttttggcttcagcggatcgatcaagcaccacttaaacctctgcagaaaactgatattctcaaaacatacaccatccctcggctgatctacatagctgaccactcagaagtgaaaactgcactactcgaaacccttgaccagaagatccggacagcggtcaaggaatggcttcacctacctccgtgcacctgcgatgccatcctgtactcgagcacgagagacggcggtttgggcatcaccaaattggcaggactgatccccagcgtgcaggcccgtagactgcatcggatcgcacagtcatctgacgatacgatgaaatgcttcatggaaaaagagaaaatggaacagctgcataagaaattgtggattcaagctggaggggacagagagaacataccctcgatttgggaagcaccaccgtcgagtgaaccaccaaacaacgtgagcacaaattcggaatgggaagcaccgacccagaaagataaatttccaaagccttgcaattggaggaaaaacgaattcaaaaaatggaccaaattggcatcccaaggccgcggaattgtaaattttgaaagagacaaaattagtaaccattggatccaatactacagacgcatacctcacaggaaactcctcactgcactacaactcagggccaacgtttaccccacgagagaatttctagccaggggtagacaagaccaatacatcaaggcgtgtaggcactgcgatgcggacaacgaatcctgcgcccacatcatcggcaactgcccagtgacacaggacgcccgaatcaagaggcacaattacatctgcgaactgcttctcgaggaggcgaagaagaaggactgggtagtgttcaaggaaccgcacataagggattccaacaaggaactgtacaaacctgacctgatatttgtgaaggatgcccgtgcacttgtcgtggatgtgacagtacggtatgaagcagccaaatcatcgctggaggaagccgctgcagagaaagtgagaaagtacaaacacctggaaacggaagtaagacatctcacgaatgcaaaggacgttacttttgtgggctttcccctaggagcgcgggggaaatggcaccaagataactttaaacttttgactgagcttggcctctccaaatcgaggcaagtgaaaatggcagagactttttccacagtagcgctcttttcatctgtggacattgtacatatgtttgccagtagggccagaaaatctatggttatgtgataataggctgccttctgcggggcttgccttctggccatgcccttcttctctcccttgcacctgtacctcttggtctttgaataaagcctgagtaggaaggaccggtagacatgataagatacattgatgagtttggacaaaccacaactagaatgcagtgaaaaaaatgctttatttgtgaaatttgtgatgctattgctttatttgtaaccattataagctgcaataaacaagttaacaacaacaaaaaaaaaaaaaaaaaaaaaaaaaaaaaaacgttgactaaaaaaaaaaaaaaaaaaaaaaaaaaaaaaaaaaaaaaaaaaaaaaaaaaaaaaaaaaaaaaaaaaaaaa

SEQ ID NO: 11524 - DNA, 4703 bp, synthetic construct
  source 1..4703: mol_type = other DNA
ggtctagttacaactgggcatcgctgcagagatcgcacctcctcgtggtcccgctggtagcccttcgaagggtgactaagtcgatctctgccccaggtacggagccgttgggactcaccagtccaacgtaactcctgcctaaattcggtgaaacaaattcctcggtaaaaagccccatggcttcttgcccgaaacctggccccccggtttcagcaggggcaatgagtttggaaagtggactgaccacccactccgttctcgccatcgaacgtggtcccaattcgttggcaaattccggatcagactttgggggggggggtctggggctaccgttacgcctattgagggtatcggtcggcactcagacctcccgctccgactgggtagacctggtgtcctggagccacccaggacccacgtctaagtcccagcaggttgacctggtgtctttatttcctaaacaccgggttgacctgttatccaaaaacgaccaggtagacctggtggctcaatttttaccatctaaatttccccccaatttggcagaaaatgatttggctttgctggtgaacttagagttctacagatcggatttgcatgtgtatgagtgtgttcattttgctgcacattgggagggattaagtggtttgcctgaggtgtatgaacaacttgcaccacaaccgtgtgtgggagaaactttacattctagcctcccacgagacagtgaactgtttgtgcctgaagaggggagcagcgagaaggagagcgaggacgcgccaaaaacatctcctccgacgcctgggaaacatggtttggaacagactggggaggaaaaagtgatggtgactgttcctgacaaaaatccaccttgtccttgctgtggtacccgggtaaactctgtgttgaatctgattgaacatctgaaagtgtcacacgggaaaaggggggtttgttttcggtgtgcaaaatgtggaaaggaaaatagtaactatcacagtgttgtttgtcattttaagaaatgcaggggtccagagacggagaaagccccagctggggagtggatttgtgaggtatgcaacagagattttacaaccaaaattggcctgggacaacacaagagattggcacacccagcagtgagaaatcaggaaaggatcgttgcttcccaaccgaaagaaacatcaaatagaggtgctcacaaaaggtgctggacaaaggaggaggaagaattactaataagactggaggctcagttcgagggaaacaaaaatattaataagcttattgcagaacacataaccaccaaaacagctaagcagatcagtgacaaaaggcgattgctgtccagaaagccagcagaggagccacgtatggagcctggaacgtgtcatcacaccaggagagcagctgcgagcctgagaacggagcctgagatgagtcatcacgcccaggcagaggacagagataatggacctgggagacgccctctgccaggcagggcagctgccggagggagaacaatggacgagataagacgccaccctgataagggcaacggacagcagagacccaccaagcaaaaatcagaagaacagctgcaggcttactataaaaagacactagaggaacgactttcagctggggcacttaacaccttcccccgagcattcaagcaggtaatggaaggccgggatataaagctagtaatcaatcagacagcgcaggactacttcggatgcctggaatccataagccaaataagaacggcaacccgagataaaaaggacacggtgacccgggagaaacacccaaagaaaccttttcagaagtggatgaagaagagagcaatcaaaaaaggtaattatcttcggttccagcgtttattttatcttgatagagggaaactggctaaaatcattttagatgatattgaatgcttgtcttgtgacataccactcagtgaaatttattcggtttttaaaacaagatgggaaacaactggtagctttaaaagccttggggactttaaaacttacgggaaggctgacaacactgccttcagagaattaattacggctaaagaaattgagaaaaatgtgcaggaaatgagcaaaggctcggctcccggtccagacgggattactcttggggacgtcgtaaagatggatcccgagttttcccggaccatggagattttcaatttatggttaacaactggtaaaatcccggacatggtgagggggtgcagaaccgttttgattccaaaatcatcagacccggatcgtttgaaagacattaataactggagacctatcacgatcggttccatcttgctgagactgttctccaggattgtaacagctaggctgagcaaagcgtgccccctgaacccaaggcaaagaggctttatcagagcggcgggatgctctgaaaacttaaaactcctgcaaactataatttggtcggccaaaagagaacacagaccactgggtgttgtattcgtggacatcgccaaggcttttgacaccgtaagccaccagcacatcattcatgctttgcagcaaagagaggtggatccccacatcgtcggtctggtgagcaatatgtacgagaacatcagtacgtatatcaccacaaagaggaacacacacacagacaaaatccagatccgggttggagtaaagcagggtgacccgatgtcgccccttttatttaacctggcaatggaccctctattatgcaagctggaagagagtggcaaaggataccaccgaggacagagcagcatcacagcgatggcatttgcagacgatctggttttgctgagcgactcctgggaaaatatgaatacaaatattagcatactggagaccttctgcaatctgaccggactcaaaacacaggggcaaaagtgccacggcttttacatcaagccgacaaagaagtcttacaccatcaatgactgcgctgcctggactatcaacggcacacccctgaacatgatcgaccccggcgaatctgagaaatacctcggcctgcagtttgacccgtggattggaatagcaaggtccggtctctccacaaaactagatttttggcttcagcggatcgatcaagcaccacttaaacctctgcagaaaactgatattctcaaaacatacaccatccctcggctgatctacatagctgaccactcagaagtgaaaactgcactactcgaaacccttgaccagaagatccggacagcggtcaaggaatggcttcacctacctccgtgcacctgcgatgccatcctgtactcgagcacgagagacggcggtttgggcatcaccaaattggcaggactgatccccagcgtgcaggcccgtagactgcatcggatcgcacagtcatctgacgatacgatgaaatgcttcatggaaaaagagaaaatggaacagctgcataagaaattgtggattcaagctggaggggacagagagaacataccctcgatttgggaagcaccaccgtcgagtgaaccaccaaacaacgtgagcacaaattcggaatgggaagcaccgacccagaaagataaatttccaaagccttgcaattggaggaaaaacgaattcaaaaaatggaccaaattggcatcccaaggccgcggaattgtaaattttgaaagagacaaaattagtaaccattggatccaatactacagacgcatacctcacaggaaactcctcactgcactacaactcagggccaacgtttaccccacgagagaatttctagccaggggtagacaagaccaatacatcaaggcgtgtaggcactgcgatgcggacattgaatcctgcgcccacatcatcggcaactgcccagtgacacaggacgcccgaatcaagaggcacaattacatctgcgaactgcttctcgaggaggcgaagaagaaggactgggtagtgttcaaggaaccgcacataagggattccaacaaggaactgtacaaacctgacctgatatttgtgaaggatgcccgtgcacttgtcgtggatgtgacagtacggtatgaagcagccaaatcatcgctggaggaagccgctgcagagaaagtgagaaagtacaaacacctggaaacggaagtaagacatctcacgaatgcaaaggacgttacttttgtgggctttcccctaggagcgcgggggaaatggcaccaagataactttaaacttttgactgagcttggcctctccaaatcgaggcaagtgaaaatggcagagactttttccacagtagcgctcttttcatctgtggacattgtacatatgtttgccagtagggccagaaaatctatggttatgtgataataggctgccttctgcggggcttgccttctggccatgcccttcttctctcccttgcacctgtacctcttggtctttgaataaagcctgagtaggaaggaccggtagacatgataagatacattgatgagtttggacaaaccacaactagaatgcagtgaaaaaaatgctttatttgtgaaatttgtgatgctattgctttatttgtaaccattataagctgcaataaacaagttaacaacaacaaaaaaaaaaaaaaaaaaaaaaaaaaaaaaacgttgactaaaaaaaaaaaaaaaaaaaaaaaaaaaaaaaaaaaaaaaaaaaaaaaaaaaaaaaaaaaaaaaaaaaaaa

SEQ ID NO: 11525 - DNA, 4703 bp, synthetic construct
  source 1..4703: mol_type = other DNA
ggtctagttacaactgggcatcgctgcagagatcgcacctcctcgtggtcccgctggtagcccttcgaagggtgactaagtcgatctctgccccaggtacggagccgttgggactcaccagtccaacgtaactcctgcctaaattcggtgaaacaaattcctcggtaaaaagccccatggcttcttgcccgaaacctggccccccggtttcagcaggggcaatgagtttggaaagtggactgaccacccactccgttctcgccatcgaacgtggtcccaattcgttggcaaattccggatcagactttgggggggggggtctggggctaccgttacgcctattgagggtatcggtcggcactcagacctcccgctccgactgggtagacctggtgtcctggagccacccaggacccacgtctaagtcccagcaggttgacctggtgtctttatttcctaaacaccgggttgacctgttatccaaaaacgaccaggtagacctggtggctcaatttttaccatctaaatttccccccaatttggcagaaaatgatttggctttgctggtgaacttagagttctacagatcggatttgcatgtgtatgagtgtgttcattttgctgcacattgggagggattaagtggtttgcctgaggtgtatgaacaacttgcaccacaaccgtgtgtgggagaaactttacattctagcctcccacgagacagtgaactgtttgtgcctgaagaggggagcagcgagaaggagagcgaggacgcgccaaaaacatctcctccgacgcctgggaaacatggtaggaagcagactggggaggaaaaagtgatggtgactgttcctgacaaaaatccaccttgtccttgctgtggtacccgggtaaactctgtgttgaatctgattgaacatctgaaagtgtcacacgggaaaaggggggtttgttttcggtgtgcaaaatgtggaaaggaaaatagtaactatcacagtgttgtttgtcattttaagaaatgcaggggtccagagacggagaaagccccagctggggagtggatttgtgaggtatgcaacagagattttacaaccaaaattggcctgggacaacacaagagattggcacacccagcagtgagaaatcaggaaaggatcgttgcttcccaaccgaaagaaacatcaaatagaggtgctcacaaaaggtgctggacaaaggaggaggaagaattactaataagactggaggctcagttcgagggaaacaaaaatattaataagcttattgcagaacacataaccaccaaaacagctaagcagatcagtgacaaaaggcgattgctgtccagaaagccagcagaggagccacgtgaggagcctggaacgtgtcatcacaccaggagagcagctgcgagcctgagaacggagcctgagatgagtcatcacgcccaggcagaggacagagataatggacctgggagacgccctctgccaggcagggcagctgccggagggagaacaatggacgagataagacgccaccctgataagggcaacggacagcagagacccaccaagcaaaaatcagaagaacagctgcaggcttactataaaaagacactagaggaacgactttcagctggggcacttaacaccttcccccgagcattcaagcaggtaatggaaggccgggatataaagctagtaatcaatcagacagcgcaggactacttcggatgcctggaatccataagccaaataagaacggcaacccgagataaaaaggacacggtgacccgggagaaacacccaaagaaaccttttcagaagtggatgaagaagagagcaatcaaaaaaggtaattatcttcggttccagcgtttattttatcttgatagagggaaactggctaaaatcattttagatgatattgaatgcttgtcttgtgacataccactcagtgaaatttattcggtttttaaaacaagatgggaaacaactggtagctttaaaagccttggggactttaaaacttacgggaaggctgacaacactgccttcagagaattaattacggctaaagaaattgagaaaaatgtgcaggaaatgagcaaaggctcggctcccggtccagacgggattactcttggggacgtcgtaaagatggatcccgagttttcccggaccatggagattttcaatttatggttaacaactggtaaaatcccggacatggtgagggggtgcagaaccgttttgattccaaaatcatcagacccggatcgtttgaaagacattaataactggagacctatcacgatcggttccatcttgctgagactgttctccaggattgtaacagctaggctgagcaaagcgtgccccctgaacccaaggcaaagaggctttatcagagcggcgggatgctctgaaaacttaaaactcctgcaaactataatttggtcggccaaaagagaacacagaccactgggtgttgtattcgtggacatcgccaaggcttttgacaccgtaagccaccagcacatcattcatgctttgcagcaaagagaggtggatccccacatcgtcggtctggtgagcaatatgtacgagaacatcagtacgtatatcaccacaaagaggaacacacacacagacaaaatccagatccgggttggagtaaagcagggtgacccgatgtcgccccttttatttaacctggcaatggaccctctattatgcaagctggaagagagtggcaaaggataccaccgaggacagagcagcatcacagcgatggcatttgcagacgatctggttttgctgagcgactcctgggaaaatatgaatacaaatattagcatactggagaccttctgcaatctgaccggactcaaaacacaggggcaaaagtgccacggcttttacatcaagccgacaaaggactcttacaccatcaatgactgcgctgcctggactatcaacggcacacccctgaacatgatcgaccccggcgaatctgagaaatacctcggcctgcagtttgacccgtggattggaatagcaaggtccggtctctccacaaaactagatttttggcttcagcggatcgatcaagcaccacttaaacctctgcagaaaactgatattctcaaaacatacaccatccctcggctgatctacatagctgaccactcagaagtgaaaactgcactactcgaaacccttgaccagaagatccggacagcggtcaaggaatggcttcacctacctccgtgcacctgcgatgccatcctgtactcgagcacgagagacggcggtttgggcatcaccaaattggcaggactgatccccagcgtgcaggcccgtagactgcatcggatcgcacagtcatctgacgatacgatgaaatgcttcatggaaaaagagaaaatggaacagctgcataagaaattgtggattcaagctggaggggacagagagaacataccctcgatttgggaagcaccaccgtcgagtgaaccaccaaacaacgtgagcacaaattcggaatgggaagcaccgacccagaaagataaatttccaaagccttgcaattggaggaaaaacgaattcaaaaaatggaccaaattggcatcccaaggccgcggaattgtaaattttgaaagagacaaaattagtaaccattggatccaatactacagacgcatacctcacaggaaactcctcactgcactacaactcagggccaacgtttaccccacgagagaatttctagccaggggtagacaagaccaatacatcaaggcgtgtaggcactgcgatgcggacattgaatcctgcgcccacatcatcggcaactgcccagtgacacaggacgcccgaatcaagaggcacaattacatctgcgaactgcttctcgaggaggcgaagaagaaggactgggtagtgttcaaggaaccgcacataagggattccaacaaggaactgtacaaacctgacctgatatttgtgaaggatgcccgtgcacttgtcgtggatgtgacagtacggtatgaagcagccaaatcatcgctggaggaagccgctgcagagaaagtgagaaagtacaaacacctggaaacggaagtaagacatctcacgaatgcaaaggacgttacttttgtgggctttcccctaggagcgcgggggaaatggcaccaagataactttaaacttttgactgagcttggcctctccaaatcgaggcaagtgaaaatggcagagactttttccacagtagcgctcttttcatctgtggacattgtacatatgtttgccagtagggccagaaaatctatggttatgtgataataggctgccttctgcggggcttgccttctggccatgcccttcttctctcccttgcacctgtacctcttggtctttgaataaagcctgagtaggaaggaccggtagacatgataagatacattgatgagtttggacaaaccacaactagaatgcagtgaaaaaaatgctttatttgtgaaatttgtgatgctattgctttatttgtaaccattataagctgcaataaacaagttaacaacaacaaaaaaaaaaaaaaaaaaaaaaaaaaaaaaacgttgactaaaaaaaaaaaaaaaaaaaaaaaaaaaaaaaaaaaaaaaaaaaaaaaaaaaaaaaaaaaaaaaaaaaaaa

SEQ ID NO: 11526 - DNA, 4703 bp, synthetic construct
  source 1..4703: mol_type = other DNA
ggtctagttacaactgggcatcgctgcagagatcgcacctcctcgtggtcccgctggtagcccttcgaagggtgactaagtcgatctctgccccaggtacggagccgttgggactcaccagtccaacgtaactcctgcctaaattcggtgaaacaaattcctcggtaaaaagccccatggcttcttgcccgaaacctggccccccggtttcagcaggggcaatgagtttggaaagtggactgaccacccactccgttctcgccatcgaacgtggtcccaattcgttggcaaattccggatcagactttgggggggggggtctggggctaccgttacgcctattgagggtatcggtcggcactcagacctcccgctccgactgggtagacctggtgtcctggagccacccaggacccacgtctaagtcccagcaggttgacctggtgtctttatttcctaaacaccgggttgacctgttatccaaaaacgaccaggtagacctggtggctcaatttttaccatctaaatttccccccaatttggcagaaaatgatttggctttgctggtgaacttagagttctacagatcggatttgcatgtgtatgagtgtgttcattttgctgcacattgggagggattaagtggtttgcctgaggtgtatgaacaacttgcaccacaaccgtgtgtgggagaaactttacattctagcctcccacgagacagtgaactgtttgtgcctgaagaggggagcagcgagaaggagagcgaggacgcgccaaaaacatctcctccgacgcctgggaaacatggtttggaacagactggggaggaaaaagtgatggtgactgttcctgacaaaaatccaccttgtccttgctgtggtacccgggtaaactctgtgttgaatctgattgaacatctgaaagtgtcacacgggaaaaggggggtttgttttcggtgtgcaaaatgtggaaaggaaaatagtaactatcacagtgttgtttgtcattttaagaaatgcaggggtccagagacggagaaagccccagctggggagtggatttgtgaggtatgcaacagagattttacaaccaaaattggcctgggacaacacaagagattggcacacccagcagtgagaaatcaggaaaggatcgttgcttcccaaccgaaagaaacatcaaatagaggtgctcacaaaaggtgctggacaaaggaggaggaagaattactaataagactggaggctcagttcgagggaaacaaaaatattaataagcttattgcagaacacataaccaccaaaacagctaagcagatcagtgacaaaaggcgattgctgtccagaaagccagcagaggagccacgtgaggagcctggaacgtgtcatcacaccaggagagcagctgcgagcctgagaacggagcctgagatgagtcatcacgcccaggcagaggacagagataatggacctgggagacgccctctgccaggcagggcagctgccggagggagaacaatggacgagataagacgccaccctgataagggcaacggacagcagagacccaccaagcaaaaatcagaagaacagctgcaggcttactataaaaagacactagaggaacgactttcagctggggcacttaacaccttcccccgagcattcaagcaggtaatggaaggccgggatataaagctagtaatcaatcagacagcgcaggactgcttcggatgcctggaatccataagccaaataagaacggcaacccgagataaaaaggacacggtgacccgggagaaacacccaaagaaaccttttcagaagtggatgaaggacagagcaatcaaaaaaggtaattatcttcggttccagcgtttattttatcttgatagagggaaactggctaaaatcattttagatgatattgaatgcttgtcttgtgacataccactcagtgaaatttattcggtttttaaaacaagatgggaaacaactggtagctttaaaagccttggggactttaaaacttacgggaaggctgacaacactgccttcagagaattaattacggctaaagaaattgagaaaaatgtgcaggaaatgagcaaaggctcggctcccggtccagacgggattactcttggggacgtcgtaaagatggatcccgagttttcccggaccatggagattttcaatttatggttaacaactggtaaaatcccggacatggtgagggggtgcagaaccgttttgattccaaaatcatcaaagccggatcgtttgaaagacattaataactggagacctatcacgatcggttccatcttgctgagactgttctccaggattgtaacagctaggctgagcaaagcgtgccccctgaacccaaggcaaagaggctttatcagagcggcgggatgctctgaaaacttaaaactcctgcaaactataatttggtcggccaaaagagaacacagaccactgggtgttgtattcgtggacatcgccaaggcttttgacaccgtaagccaccagcacatcattcatgctttgcagcaaagagaggtggatccccacatcgtcggtctggtgagcaatatgtacgagaacatcagtacgtatatcaccacaaagaggaacacacacacagacaaaatccagatccgggttggagtaaagcagggtgacccgatgtcgccccttttatttaacctggcaatggaccctctattatgcaagctggaagagagtggcaaaggataccaccgaggacagagcagcatcacagcgatggcatttgcagacgatctggttttgctgagcgactcctgggaaggcatgaatacaaatattagcatactggagaccttctgcaatctgaccggactcaaaacacaggggcaaaagtgccacggcttttacatcaagccgacaaaggactcttacaccatcaatgactgcgctgcctggactatcaacggcacacccctgaacatgatcgaccccggcgaatctgagaaatacctcggcctgcagtttgacccgtggattggaatagcaaggtccggtctctccacaaaactagatttttggcttcagcggatcgatcaagcaccacttaaacctctgcagaaaactgatattctcaaaacatacaccatccctcggctgatctacatagctgaccactcagaagtgaaaactgcactactcgaaacccttgaccagaagatccggacagcggtcaaggaatggcttcacctacctccgtgcacctgcgatgccatcctgtactcgagcacgagagacggcggtttgggcatcaccaaattggcaggactgatccccagcgtgcaggcccgtagactgcatcggatcgcacagtcatctgacgatacgatgaaatgcttcatggaaaaagagaaaatggaacagctgcataagaaattgtggattcaagctggaggggacagagagaacataccctcgatttgggaagcaccaccgtcgagtgaaccaccaaacaacgtgagcacaaattcggaatgggaagcaccgacccagaaagataaatttccaaagccttgcaattggaggaaaaacgaattcaaaaaatggaccaaattggcatcccaaggccgcggaattgtaaattttgaaagagacaaaattagtaaccattggatccaatactacagacgcatacctcacaggaaactcctcactgcactacaactcagggccaacgtttaccccacgagagaatttctagccaggggtagacaagaccaatacatcaaggcgtgtaggcactgcgatgcggacattgaatcctgcgcccacatcatcggcaactgcccagtgacacaggacgcccgaatcaagaggcacaattacatctgcgaactgcttctcgaggaggcgaagaagaaggactgggtagtgttcaaggaaccgcacataagggattccaacaaggaactgtacaaacctgacctgatatttgtgaaggatgcccgtgcacttgtcgtggatgtgacagtacggtatgaagcagccaaatcatcgctggaggaagccgctgcagagaaagtgagaaagtacaaacacctggaaacggaagtaagacatctcacgaatgcaaaggacgttacttttgtgggctttcccctaggagcgcgggggaaatggcaccaagataactttaaacttttgactgagcttggcctctccaaatcgaggcaagtgaaaatggcagagactttttccacagtagcgctcttttcatctgtggacattgtacatatgtttgccagtagggccagaaaatctatggttatgtgataataggctgccttctgcggggcttgccttctggccatgcccttcttctctcccttgcacctgtacctcttggtctttgaataaagcctgagtaggaaggaccggtagacatgataagatacattgatgagtttggacaaaccacaactagaatgcagtgaaaaaaatgctttatttgtgaaatttgtgatgctattgctttatttgtaaccattataagctgcaataaacaagttaacaacaacaaaaaaaaaaaaaaaaaaaaaaaaaaaaaaacgttgactaaaaaaaaaaaaaaaaaaaaaaaaaaaaaaaaaaaaaaaaaaaaaaaaaaaaaaaaaaaaaaaaaaaaaa

SEQ ID NO: 11527 - DNA, 4703 bp, synthetic construct
  source 1..4703: mol_type = other DNA
ggtctagttacaactgggcatcgctgcagagatcgcacctcctcgtggtcccgctggtagcccttcgaagggtgactaagtcgatctctgccccaggtacggagccgttgggactcaccagtccaacgtaactcctgcctaaattcggtgaaacaaattcctcggtaaaaagccccatggcttcttgcccgaaacctggccccccggtttcagcaggggcaatgagtttggaaagtggactgaccacccactccgttctcgccatcgaacgtggtcccaattcgttggcaaattccggatcagactttgggggggggggtctggggctaccgttacgcctattgagggtatcggtcggcactcagacctcccgctccgactgggtagacctggtgtcctggagccacccaggacccacgtctaagtcccagcaggttgacctggtgtctttatttcctaaacaccgggttgacctgttatccaaaaacgaccaggtagacctggtggctcaatttttaccatctaaatttccccccaatttggcagaaaatgatttggctttgctggtgaacttagagttctacagatcggatttgcatgtgtatgagtgtgttcattttgctgcacattgggagggattaagtggtttgcctgaggtgtatgaacaacttgcaccacaaccgtgtgtgggagaaactttacattctagcctcccacgagacagtgaactgtttgtgcctgaagaggggagcagcgagaaggagagcgaggacgcgccaaaaacatctcctccgacgcctgggaaacatggtttggaacagactggggaggaaaaagtgatggtgactgttcctgacaaaaatccaccttgtccttgctgtggtacccgggtaaactctgtgttgaatctgattgaacatctgaaagtgtcacacgggaaaaggggggtttgttttcggtgtgcaaaatgtggaaaggaaaatagtaactatcacagtgttgtttgtcattttaagaaatgcaggggtccagagacggagaaagccccagctggggagtggatttgtgaggtatgcaacagagattttacaaccaaaattggcctgggacaacacaagagattggcacacccagcagtgagaaatcaggaaaggatcgttgcttcccaaccgaaagaaacatcaaatagaggtgctcacaaaaggtgctggacaaaggaggaggaagaattactaataagactggaggctcagttcgagggaaacaaaaatattaataagcttattgcagaacacataaccaccaaaacagctaagcagatcagtgacaaaaggcgattgctgtccagaaagccagcagaggagccacgtgaggagcctggaacgtgtcatcacaccaggagagcagctgcgagcctgagaacggagcctgagatgagtcatcacgcccaggcagaggacagagataatggacctgggagacgccctctgccaggcagggcagctgccggagggagaacaatggacgagataagacgccaccctgataagggcaacggacagcagagacccaccaagcaaaaatcagaagaacagctgcaggcttactataaaaagacactagaggaacgactttcagctggggcacttaacaccttcccccgagcattcaagcaggtaatggaaggccgggatataaagctagtaatcaatcagacagcgcaggactacttcggatgcctggaatccataagccaaataagaacggcaacccgagataaaaaggacacggtgacccgggagaaacacccaaagaaaccttttcagaagtggatgaaggacagagcaatcaaaaaaggtaattatcttcggttccagcgtttattttatcttgatagagggaaactggctaaaatcattttagatgatattgaatgcttgtcttgtgacataccactcagtgaaatttattcggtttttaaaacaagatgggaaacaactggtagctttaaaagccttggggactttaaaacttacgggaaggctgacaacactgccttcagagaattaattacggctaaagaaattgagaaaaatgtgcaggaaatgagcaaaggctcggctcccggtccagacgggattactcttggggacgtcgtaaagatggatcccgagttttcccggaccatggagattttcaatttatggttaacaactggtaaaatcccggacatggtgagggggtgcagaaccgttttgattccaaaatcatcagacccggatcgtttgaaagacattaataactggagacctatcacgatcggttccatcttgctgagactgttctccaggattgtaacagctaggctgagcaaagcgtgccccctgaacccaaggcaaagaggctttatcagagcggcgggatgctctgaaaacttaaaactcctgcaaactataatttggtcggccaaaagagaacacagaccactgggtgttgtattcgtggacatcgccaaggcttttgacaccgtaagccaccagcacatcattcatgctttgcagcaaagagaggtggatccccacatcgtcggtctggtgagcaatatgtacgagaacatcagtacgtatatcaccacaaagaggaacacacacacagacaaaatccagatccgggttggagtaaagcagggtgacccgatgtcgccccttttatttaacctggcaatggaccctctattatgcaagctggaagagagtggcaaaggataccaccgaggacagagcagcatcacagcgatggcatttgcagacgatctggttttgctgagcgactcctgggaaggcatgaatacaaatattagcatactggagaccttctgcaatctgaccggactcaaaacacaggggcaaaagtgccacggcttttacatcaagccgacaaaggactcttacaccatcaatgactgcgctgcctggactatcaacggcacacccctgaacatgatcgaccccggcgaatctgagaaatacctcggcctgcagtttgacccgtggattggaatagcaaggtccggtctctccacaaaactagatttttggcttcagcggatcgatcaagcaccacttaaacctctgcagaaactggatattctcaaaacatacaccatccctcggctgatctacatagctgaccactcagaagtgaaaactgcactactcgaaacccttgaccagaagatccggacagcggtcaaggaatggcttcacctacctccgtgcacctgcgatgccatcctgtactcgagcacgagagacggcggtttgggcatcaccaaattggcaggactgatccccagcgtgcaggcccgtagactgcatcggatcgcacagtcatctgacgatacgatgaaatgcttcatggaaaaagagaaaatggaacagctgcataagaaattgtggattcaagctggaggggacagagagaacataccctcgatttgggaagcaccaccgtcgagtgaaccaccaaacaacgtgagcacaaattcggaatgggaagcaccgacccagaaagataaatttccaaagccttgcaattggaggaaaaacgaattcaaaaaatggaccaaattggcatcccaaggccgcggaattgtaaattttgaaagagacaaaattagtaaccattggatccaatactacagacgcatacctcacaggaaactcctcactgcactacaactcagggccaacgtttaccccacgagagaatttctagccaggggtagacaagaccaatacatcaaggcgtgtaggcactgcgatgcggacattgaatcctgcgcccacatcatcggcaactgcccagtgacacaggacgcccgaatcaagaggcacaataagatctgcgaactgcttctcgaggaggcgaagaagaaggactgggtagtgttcaaggaaccgcacataagggattccaacaaggaactgtacaaacctgacctgatatttgtgaaggatgcccgtgcacttgtcgtggatgtgacagtacggtatgaagcagccaaatcatcgctggaggaagccgctgcagagaaagtgagaaagtacaaacacctggaaacggaagtaagacatctcacgaatgcaaaggacgttacttttgtgggctttcccctaggagcgcgggggaaatggcaccaagataactttaaacttttgactgagcttggcctctccaaatcgaggcaagtgaaaatggcagagactttttccacagtagcgctcttttcatctgtggacattgtacatatgtttgccagtagggccagaaaatctatggttatgtgataataggctgccttctgcggggcttgccttctggccatgcccttcttctctcccttgcacctgtacctcttggtctttgaataaagcctgagtaggaaggaccggtagacatgataagatacattgatgagtttggacaaaccacaactagaatgcagtgaaaaaaatgctttatttgtgaaatttgtgatgctattgctttatttgtaaccattataagctgcaataaacaagttaacaacaacaaaaaaaaaaaaaaaaaaaaaaaaaaaaaaacgttgactaaaaaaaaaaaaaaaaaaaaaaaaaaaaaaaaaaaaaaaaaaaaaaaaaaaaaaaaaaaaaaaaaaaaaa

SEQ ID NO: 11528 - DNA, 4703 bp, synthetic construct
  source 1..4703: mol_type = other DNA
ggtctagttacaactgggcatcgctgcagagatcgcacctcctcgtggtcccgctggtagcccttcgaagggtgactaagtcgatctctgccccaggtacggagccgttgggactcaccagtccaacgtaactcctgcctaaattcggtgaaacaaattcctcggtaaaaagccccatggcttcttgcccgaaacctggccccccggtttcagcaggggcaatgagtttggaaagtggactgaccacccactccgttctcgccatcgaacgtggtcccaattcgttggcaaattccggatcagactttgggggggggggtctggggctaccgttacgcctattgagggtatcggtcggcactcagacctcccgctccgactgggtagacctggtgtcctggagccacccaggacccacgtctaagtcccagcaggttgacctggtgtctttatttcctaaacaccgggttgacctgttatccaaaaacgaccaggtagacctggtggctcaatttttaccatctaaatttccccccaatttggcagaaaatgatttggctttgctggtgaacttagagttctacagatcggatttgcatgtgtatgagtgtgttcattttgctgcacattgggagggattaagtggtttgcctgaggtgtatgaacaacttgcaccacaaccgtgtgtgggagaaactttacattctagcctcccacgagacagtgaactgtttgtgcctgaagaggggagcagcgagaaggagagcgaggacgcgccaaaaacatctcctccgacgcctgggaaacatggtttggaacagactggggaggaaaaagtgatggtgactgttcctgacaaaaatccaccttgtccttgctgtggtacccgggtaaactctgtgttgaatctgattgaacatctgaaagtgtcacacgggaaaaggggggtttgttttcggtgtgcaaaatgtggaaaggaaaatagtaactatcacagtgttgtttgtcattttaagaaatgcaggggtccagagacggagaaagccccagctggggagtggatttgtgaggtatgcaacagagattttacaaccaaaattggcctgggacaacacaagagattgtggcacccagcagtgagaaatcaggaaaggatcgttgcttcccaaccgaaagaaacatcaaatagaggtgctcacaaaaggtgctggacaaaggaggaggaagaattactaataagactggaggctcagttcgagggaaacaaaaatattaataagcttattgcagaacacataaccaccaaaacagctaagcagatcagtgacaaaaggcgattgctgtccagaaagccagcagaggagccacgtgaggagcctggaacgtgtcatcacaccaggagagcagctgcgagcctgagaacggagcctgagatgagtcatcacgcccaggcagaggacagagataatggacctgggagacgccctctgccaggcagggcagctgccggagggagaacaatggacgagataagacgccaccctgataagggcaacggacagcagagacccaccaagcaaaaatcagaagaacagctgcaggcttactataaaaagacactagaggaacgactttcagctggggcacttaacaccttcccccgagcattcaagcaggtaatggaaggccgggatataaagctagtaatcaatcagacagcgcaggactgcttcggatgcctggaatccataagccaaataagaacggcaacccgagataaaaaggacacggtgacccgggagaaacacccaaagaaaccttttcagaagtggatgaagaagagagcaatcaaaaaaggtaattatcttcggttccagcgtttattttatcttgatagagggaaactggctaaaatcattttagatgatattgaatgcttgtcttgtgacataccactcagtgaaatttattcggtttttaaaacaagatgggaaacaactggtagctttaaaagccttggggactttaaaacttacgggaaggctgacaacactgccttcagagaattaattacggctaaagaaattgagaaaaatgtgcaggaaatgagcaaaggctcggctcccggtccagacgggattactcttggggacgtcgtaaagatggatcccgagttttcccggaccatggagattttcaatttatggttaacaactggtaaaatcccggacatggtgagggggtgcagaaccgttttgattccaaaatcatcaaagccggatcgtttgaaagacattaataactggagacctatcacgatcggttccatcttgctgagactgttctccaggattgtaacagctaggctgagcaaagcgtgccccctgaacccaaggcaaagaggctttatcagagcggcgggatgctctgaaaacttaaaactcctgcaaactataatttggtcggccaaaagagaacacagaccactgggtgttgtattcgtggacatcgccaaggcttttgacaccgtaagccaccagcacatcattcatgctttgcagcaaagagaggtggatccccacatcgtcggtctggtgagcaatatgtacgagaacatcagtacgtatatcaccacaaagaggaacacacacacagacaaaatccagatccgggttggagtaaagcagggtgacccgatgtcgccccttttatttaacctggcaatggaccctctattatgcaagctggaagagagtggcaaaggataccaccgaggacagagcagcatcacagcgatggcatttgcagacgatctggttttgctgagcgactcctgggaaaatatgaatacaaatattagcatactggagaccttctgcaatctgaccggactcaaaacacaggggcaaaagtgccacggcttttacatcaagccgacaaagaagtcttacaccatcaatgactgcgctgcctggactatcaacggcacacccctgaacatgatcgaccccggcgaatctgagaaatacctcggcctgcagtttgacccgtggattggaatagcaaggtccggtctctccacaaaactagatttttggcttcagcggatcgatcaagcaccacttaaacctctgcagaaaactgatattctcaaaacatacaccatccctcggctgatctacatagctgaccactcagaagtgaaaactgcactactcgaaacccttgaccagaagatccggacagcggtcaaggaatggcttcacctacctccgtgcacctgcgatgccatcctgtactcgagcacgagagacggcggtttgggcatcaccaaattggcaggactgatccccagcgtgcaggcccgtagactgcatcggatcgcacagtcatctgacgatacgatgaaatgcttcatggaaaaagagaaaatggaacagctgcataagaaattgtggattcaagctggaggggacagagagaacataccctcgatttgggaagcaccaccgtcgagtgaaccaccaaacaacgtgagcacaaattcggaatgggaagcaccgacccagaaagataaatttccaaagccttgcaattggaggaaaaacgaattcaaaaaatggaccaaattggcatcccaaggccgcggaattgtaaattttgaaagagacaaaattagtaaccattggatccaatactacagacgcatacctcacaggaaactcctcactgcactacaactcagggccaacgtttaccccacgagagaatttctagccaggggtagacaagaccaatacatcaaggcgtgtaggcactgcgatgcggacaacgaatcctgcgcccacatcatcggcaactgcccagtgacacaggacgcccgaatcaagaggcacaattacatctgcgaactgcttctcgaggaggcgaagaagaaggactgggtagtgttcaaggaaccgcacataagggattccaacaaggaactgtacaaacctgacctgatatttgtgaaggatgcccgtgcacttgtcgtggatgtgacagtacggtatgaagcagccaaatcatcgctggaggaagccgctgcagagaaagtgagaaagtacaaacacctggaaacggaagtaagacatctcacgaatgcaaaggacgttacttttgtgggctttcccctaggagcgcgggggaaatggcaccaagataactttaaacttttgactgagcttggcctctccaaatcgaggcaagtgaaaatggcagagactttttccacagtagcgctcttttcatctgtggacattgtacatatgtttgccagtagggccagaaaatctatggttatgtgataataggctgccttctgcggggcttgccttctggccatgcccttcttctctcccttgcacctgtacctcttggtctttgaataaagcctgagtaggaaggaccggtagacatgataagatacattgatgagtttggacaaaccacaactagaatgcagtgaaaaaaatgctttatttgtgaaatttgtgatgctattgctttatttgtaaccattataagctgcaataaacaagttaacaacaacaaaaaaaaaaaaaaaaaaaaaaaaaaaaaaacgttgactaaaaaaaaaaaaaaaaaaaaaaaaaaaaaaaaaaaaaaaaaaaaaaaaaaaaaaaaaaaaaaaaaaaaaa

SEQ ID NO: 11529 - DNA, 4703 bp, synthetic construct
  source 1..4703: mol_type = other DNA
ggtctagttacaactgggcatcgctgcagagatcgcacctcctcgtggtcccgctggtagcccttcgaagggtgactaagtcgatctctgccccaggtacggagccgttgggactcaccagtccaacgtaactcctgcctaaattcggtgaaacaaattcctcggtaaaaagccccatggcttcttgcccgaaacctggccccccggtttcagcaggggcaatgagtttggaaagtggactgaccacccactccgttctcgccatcgaacgtggtcccaattcgttggcaaattccggatcagactttgggggggggggtctggggggcccgttacgcctattgagggtatcggtcggcactcagacctcccgctccgactgggtagacctggtgtcctggagccacccaggacccacgtctaagtcccagcaggttgacctggtgtctttatttcctaaacaccgggttgacctgttatccaaaaacgaccaggtagacctggtggctcaatttttaccatctaaatttccccccaatttggcagaaaatgatttggctttgctggtgaacttagagttctacagatcggatttgcatgtgtatgagtgtgttcattttgctgcacattgggagggattaagtggtttgcctgaggtgtatgaacaacttgcaccacaaccgtgtgtgggagaaactttacattctagcctcccacgagacagtgaactgtttgtgcctgaagaggggagcagcgagaaggagagcgaggacgcgccaaaaacatctcctccgacgcctgggaaacatggtttggaacagactggggaggaaaaagtgatggtgactgttcctgacaaaaatccaccttgtccttgctgtggtacccgggtaaactctgtgttgaatctgattgaacatctgaaagtgtcacacgggaaaaggggggtttgttttcggtgtgcaaaatgtggaaaggaaaggagtaactatcacagtgttgtttgtcattttaagaaatgcaggggtccagagacggagaaagccccagctggggagtggatttgtgaggtatgcaacagagattttacaaccaaaattggcctgggacaacacaagagattggcacacccagcagtgagaaatcaggaaaggatcgttgcttcccaaccgaaagaaacatcaaatagaggtgctcacaaaaggtgctggacaaaggaggaggaagaattactaataagactggaggctcagttcgagggaaacaaaaatattaataagcttattgcagaacacataaccaccaaaacagctaagcagatcagtgacatgaggcgattgctgtccagaaagccagcagaggagccacgtgaggagcctggaacgtgtcatcacaccaggagagcagctgcgagcctgagaacggagcctgagatgagtcatcacgcccaggcagaggacagagataatggacctgggagacgccctctgccaggcagggcagctgccggagggagaacaatggacgagataagacgccaccctgataagggcaacggacagcagagacccaccaagcaaaaatcagaagaacagctgcaggcttactataaaaagacactagaggaacgactttcagctggggcacttaacaccttcccccgagcattcaagcaggtaatggaaggccgggatataaagctagtaatcaatcagacagcgcaggactacttcggatgcctggaatccataagccaaataagaacggcaacccgagataaaaaggacacgggcacccgggagaaacacccaaagaaaccttttcagaagtggatgaagaagagagcaatcaaaaaaggtaattatcttcggttccagcgtttattttatcttgatagagggaaactggctaaaatcattttagatgatattgaatgcttgtcttgtgacataccactcagtgaaatttattcggtttttaaaacaagatgggaaacaactggtagctttaaaagccttggggactttaaaacttacgggaaggctgacaacactgccttcagagaattaattacggctaaagaaattgagaaaaatgtgcaggaaatgagcaaaggctcggctcccggtccagacgggattactcttggggacatcgtaaagatggatcccgagttttcccggaccatggagattttcaatttatggttaacaactggtaaaatcccggacatggtgagggggtgcagaaccgttttgattccaaaatcatcaaagccggatcgtttgaaagacattaataactggagacctatcacgatcggttccatcttgctgagactgttctccaggattgtaacagctaggctgagcaaagcgtgccccctgaacccaaggcaaagaggctttatcagagcggcgggatgctctgaaaacttaaaactcctgcaaactataatttggtcggccaaaagagaacacagaccactgggtgttgtattcgtggacatcgccaaggcttttgacaccgtaagccaccagcacatcattcatgctttgcagcaaagagaggtggatccccacatcgtcggtctggtgagcaatatgtacgagaacatcagtacgtatatcaccacaaagaggaacacacacacagacaaaatccagatccgggttggagtaaagcagggtgacccgatgtcgccccttttatttaacctggcaatggaccctctattatgcaagctggaagagagtggcaaaggataccaccgaggacagagcagcatcacagcgatggcatttgcagacgatctggttttgctgagcgactcctgggaaaatatgaatacaaatattagcatactggagaccttctgcaatctgaccggactcaaaacacaggggcaaaagtgccacggcttttacatcaagccgacaaaggactcttacaccatcaatgactgcgctgcctggactatcaacggcacacccctgaacatgatcgaccccggcgaatctgagaaatacctcggcctgcagtttgacccgtggattggaatagcaaggtccggtctctccacaaaactagatttttggcttcagcggatcgatcaagcaccacttaaacctctgcagaaaactgatattctcaaaacatacaccatccctcggctgatctacatagctgaccactcagaagtgaaaactgcactactcgaaacccttgaccagaagatccggacagcggtcaaggaatggcttcacctacctccgtgcacctgcgatgccatcctgtactcgagcacgagagacggcggtttgggcatcaccaaattggcaggactgatccccagcgtgcaggcccgtagactgcatcggatcgcacagtcatctgacgatacgatgaaatgcttcatggaaaaagagaaaatggaacagctgcataagaaattgtggattcaagctggaggggacagagagaacataccctcgatttgggaagcaccaccgtcgagtgaaccaccaaacaacgtgagcacaaattcggaatgggaagcaccgacccagaaagataaatttccaaagccttgcaattggaggaaaaacgaattcaaaaaatggaccaaattggcatcccaaggccgcggaattgtaaattttgaaagagacaaaattagtaaccattggatccaatactacagacgcatacctcacaggaaactcctcactgcactacaactcagggccaacgtttaccccacgagagaatttctagccaggggtagacaagaccaatacatcaaggcgtgtaggcactgcgatgcggacattgaatcctgcgcccacatcatcggcaactgcccagtgacacaggacgcccgaatcaagaggcacaattacatctgcgaactgcttctcgaggaggcgaagaagaaggactgggtagtgttcaaggaaccgcacataagggattccaacaaggaactgtacaaacctgacctgatatttgtgaaggatgcccgtgcacttgtcgtggatgtgacagtacggtatgaagcagccaaatcatcgctggaggaagccgctgcagagaaagtgagaaagtacaaacacctggaaacggaagtaagacatctcacgaatgcaaaggacgttacttttgtgggctttcccctaggagcgcgggggaaatggcaccaagataactttaaacttttgactgagcttggcctctccaaatcgaggcaagtgaaaatggcagagactttttccacagtagcgctcttttcatctgtggacattgtacatatgtttgccagtagggccagaaaatctatggttatgtgataataggctgccttctgcggggcttgccttctggccatgcccttcttctctcccttgcacctgtacctcttggtctttgaataaagcctgagtaggaaggaccggtagacatgataagatacattgatgagtttggacaaaccacaactagaatgcagtgaaaaaaatgctttatttgtgaaatttgtgatgctattgctttatttgtaaccattataagctgcaataaacaagttaacaacaacaaaaaaaaaaaaaaaaaaaaaaaaaaaaaaacgttgactaaaaaaaaaaaaaaaaaaaaaaaaaaaaaaaaaaaaaaaaaaaaaaaaaaaaaaaaaaaaaaaaaaaaaa

SEQ ID NO: 11530 - DNA, 4703 bp, synthetic construct
  source 1..4703: mol_type = other DNA
ggtctagttacaactgggcatcgctgcagagatcgcacctcctcgtggtcccgctggtagcccttcgaagggtgactaagtcgatctctgccccaggtacggagccgttgggactcaccagtccaacgtaactcctgcctaaattcggtgaaacaaattcctcggtaaaaagccccatggcttcttgcccgaaacctggccccccggtttcagcaggggcaatgagtttggaaagtggactgaccacccactccgttctcgccatcgaacgtggtcccaattcgttggcaaattccggatcagactttgggggggggggtctggggctaccgttacgcctattgagggtatcggtcggcactcagacctcccgctccgactgggtagacctggtgtcctggagccacccaggacccacgtctaagtcccagcaggttgacctggtgtctttatttcctaaacaccgggttgacctgttatccaaaaacgaccaggtagacctggtggctcaatttttaccatctaaatttccccccaatttggcagaaaatgatttggctttgctggtgaacttagagttctacagatcggatttgcatgtgtatgagtgtgttcattttgctgcacattgggagggattaagtggtttgcctgaggtgtatgaacaacttgcaccacaaccgtgtgtgggagaaactttacattctagcctcccacgagacagtgaactgtttgtgcctgaagaggggagcagcgagaaggagagcgaggacgcgccaaaaacatctcctccgacgcctgggaaacatggtttggaacagactggggaggaaaaagtgatggtgactgttcctgacaaaaatccaccttgtccttgctgtggtacccgggtaaactctgtgttgaatctgattgaacatctgaaagtgtcacacgggaaaaggggggtttgttttcggtgtgcaaaatgtggaaaggaaaatagtaactatcacagtgttgtttgtcattttaagaaatgcaggggtccagagacggagaaagccccagctggggagtggatttgtgaggtatgcaacagagattttacaaccaaaattggcctgggacaacacaagagattggcacacccagcagtgagaaatcaggaaaggatcgttgcttcccaaccgaaagaaacatcaaatagaggtgctcacaaaaggtgctggacaaaggaggaggaagaattactaataagactggaggctcagttcgagggaaacaaaaatattaataagcttattgcagaacacataaccaccaaaacagctaagcagatcagtgacaaaaggcgattgctgtccagaaagccagcagaggagccacgtgaggagcctggaacgtgtcatcacaccaggagagcagctgcgagcctgagaacggagcctgagatgagtcatcacgcccaggcagaggacagagataatggacctgggagacgccctctgccaggcagggcagctgccggagggagaacaatggacgagataagacgccaccctgataagggcaacggacagcagagacccaccaagcaaaaatcagaagaacagctgcaggcttactataaaaagacactagaggaacgactttcagctggggcacttaacaccttcccccgagcattcaagcaggtaatggaaggccgggatataaagctagtaatcaatcagacagcgcaggactacttcggatgcctggaatccataagccaaataagaacggcaacccgagataaaaaggacacggtgacccgggagaaacacccaaagaaaccttttcagaagtggatgaagaagagagcaatcaaaaaaggtaattatcttcggttccagcgtttattttatcttgatagagggaaactggctaaaatcattttagatgatattgaatgcttgtcttgtgacataccactcagtgaaatttattcggtttttaaaacaagatgggaaacaactggtagctttaaaagccttggggactttaaaacttacgggaaggctgacaacactgccttcagagaattaattacggctaaagaaattgagaaaaatgtgcaggaaatgagcaaaggctcggctcccggtccagacgggattactcttggggacgtcgtaaagatggatcccgagggctcccggaccatggagattttcaatttatggttaacaactggtaaaatcccggacatggtgagggggtgcagaaccgttttgattccaaaatcatcagacccggatcgtttgaaagacattaataactggagacctatcacgatcggttccatcttgctgagactgttctccaggattgtaacagctaggctgagcaaagcgtgccccctgaacccaaggcaaagaggctttatcagagcggcgggatgctctgaaaacttaaaactcctgcaaactataatttggtcggccaaaagagaacacagaccactgggtgttgtattcgtggacatcgccaaggcttttgacaccgtaagccaccagcacatcattcatgctttgcagcaaagagaggtggatccccacatcgtcggtctggtgagcaatatgtacgagaacatcagtacgtatatcaccacaaagaggaacacacacacagacaaaatccagatccgggttggagtaaagcagggtgacccgatgtcgccccttttatttaacctggcaatggaccctctattatgcaagctggaagagagtggcaaaggataccaccgaggacagagcagcatcacagcgatggcatttgcagacgatctggttttgctgagcgactcctgggaaaatatgaatacaaatattagcatactggagaccttctgcaatctgaccggactcaaaacacaggggcaaaagtgccacggcttttacatcaagccgacaaaggactcttacaccatcaatgactgcgctgcctggactatcaacggcacacccctgaacatgatcgaccccggcgaatctgagaaatacctcggcctgcagtttgacccgtggattggaatagcaaggtccggtctctccacaaaactagatttttggcttcagcggatcgatcaagcaccacttaaacctctgcagaaaactgatattctcaaaacatacaccatccctcggctgatctacatagctgaccactcagaagtgaaaactgcactactcgaaacccttgaccagaagatccggacagcggtcaaggaatggcttcacctacctccgtgcacctgcgatgccatcctgtactcgagcacgagagacggcggtttgggcatcaccaaattggcaggactgatccccagcgtgcaggcccgtagactgcatcggatcgcacagtcatctgacgatacgatgaaatgcttcatggaaaaagagaaaatggaacagctgcataagaaattgtggattcaagctggaggggacagagagaacataccctcgatttgggaagcaccaccgtcgagtgaaccaccaaacaacgtgagcacaaattcggaatgggaagcaccgacccagaaagataaatttccaaagccttgcaattggaggaaaaacgaattcaaaaaatggaccaaattggcatcccaaggccgcggaattgtaaattttgaaagagacaaaattagtaaccattggatccaatactacagacgcatacctcacaggaaactcctcactgcactacaactcagggccaacgtttaccccacgagagaatttctagccaggggtagacaagaccaatacatcaaggcgtgtaggcactgcgatgcggacattgaatcctgcgcccacatcatcggcaactgcccagtgacacaggacgcccgaatcaagaggcacaattacatctgcgaactgcttctcgaggaggcgaagaagaaggactgggtagtgttcaaggaaccgcacataagggattccaacaaggaactgtacaaacctgacctgatatttgtgaaggatgcccgtgcacttgtcgtggatgtgacagtacggtatgaagcagccaaatcatcgctggaggaagccgctgcagagaaagtgagaaagtacaaacacctggaaacggaagtaagacatctcacgaatgcaaaggacgttacttttgtgggctttcccctaggagcgcgggggaaatggcaccaagataactttaaacttttgactgagcttggcctctccaaatcgaggcaagtgaaaatggcagagactttttccacagtagcgctcttttcatctgtggacattgtacatatgtttgccagtagggccagaaaatctatggttatgtgataataggctgccttctgcggggcttgccttctggccatgcccttcttctctcccttgcacctgtacctcttggtctttgaataaagcctgagtaggaaggaccggtagacatgataagatacattgatgagtttggacaaaccacaactagaatgcagtgaaaaaaatgctttatttgtgaaatttgtgatgctattgctttatttgtaaccattataagctgcaataaacaagttaacaacaacaaaaaaaaaaaaaaaaaaaaaaaaaaaaaaacgttgactaaaaaaaaaaaaaaaaaaaaaaaaaaaaaaaaaaaaaaaaaaaaaaaaaaaaaaaaaaaaaaaaaaaaaa

SEQ ID NO: 11531 - DNA, 4703 bp, synthetic construct
  source 1..4703: mol_type = other DNA
ggtctagttacaactgggcatcgctgcagagatcgcacctcctcgtggtcccgctggtagcccttcgaagggtgactaagtcgatctctgccccaggtacggagccgttgggactcaccagtccaacgtaactcctgcctaaattcggtgaaacaaattcctcggtaaaaagccccatggcttcttgcccgaaacctggccccccggtttcagcaggggcaatgagtttggaaagtggactgaccacccactccgttctcgccatcgaacgtggtcccaattcgttggcaaattccggatcagactttgggggggggggtctggggctaccgttacgcctattgagggtatcggtcggcactcagacctcccgctccgactgggtagacctggtgtcctggagccacccaggacccacgtctaagtcccagcaggttgacctggtgtctttatttcctaaacaccgggttgacctgttatccaaaaacgaccaggtagacctggtggctcaatttttaccatctaaatttccccccaatttggcagaaaatgatttggctttgctggtgaacttagagttctacagatcggatttgcatgtgtatgagtgtgttcattttgctgcacattgggagggattaagtggtttgcctgaggtgtatgaacaacttgcaccacaaccgtgtgtgggagaaactttacattctagcctcccacgagacagtgaactgtttgtgcctgaagaggggagcagcgagaaggagagcgaggacgcgccaaaaacatctcctccgacgcctgggaaacatggtttggaacagactggggaggaaaaagtgatggtgactgttcctgacaaaaatccaccttgtccttgctgtggtacccgggtaaactctgtgttgaatctgattgaacatctgaaagtgtcacacgggaaaaggggggtttgttttcggtgtgcaaaatgtggaaaggaaaatagtaactatcacagtgttgtttgtcattttaagaaatgcaggggtccagagacggagaaagccccagctggggagtggatttgtgaggtatgcaacagagattttacaaccaaaattggcctgggacaacacaagagattggcacacccagcagtgagaaatcaggaaaggatcgttgcttcccaaccgaaagaaacatcaaatagaggtgctcacaaaaggtgctggacaaaggaggaggaagaattactaataagactggaggctcagttcgagggaaacaaaaatattaataagcttattgcagaacacataaccaccaaaacagctaagcagatcagtgacaaaaggcgattgctgtccagaaagccagcagaggagccacgtgaggagcctggaacgtgtcatcacaccaggagagcagctgcgagcctgagaacggagcctgagatgagtcatcacgcccaggcagaggacagagataatggacctgggagacgccctctgccaggcagggcagctgccggagggagaacaatggacgagataagacgccaccctgataagggcaacggacagcagagacccaccaagcaaaaatcagaagaacagctgcaggcttactataaaaagacactagaggaacgactttcagctggggcacttaacaccttcccccgagcattcaagcaggtaatggaaggccgggatataaagctagtaatcaatcagacagcgcaggactacttcggatgcctggaatccataagccaaataagaacggcaacccgagataaaaaggacacggtgacccgggagaaacacccaaagaaaccttttcagaagtggatgaagaagagagcaatcaaaaaaggtaattatcttcggttccagcgtttattttatcttgatagagggaaactggctaaaatcattttagatgatattgaatgcttgtcttgtgacataccactcagtgaaatttattcggtttttaaaacaagatgggaaacaactggtagctttaaaagccttggggactttaaaacttacgggaaggctgacaacactgccttcagagaattaattacggctaaagaaattgagaaaaatgtgcaggaaatgagcaaaggctcggctcccggtccagacgggattactcttggggacgtcgtaaagatggatcccgagttttcccggaccatggagattttcaatttatggttaacaactggtaaaatcccggacatggtgagggggtgcagaaccgttttgattccaaaatcatcagacccggatcgtttgaaagacattaataactggagacctatcacgatcggttccatcttgctgagactgttctccaggattgtaacagctaggctgagcaaagcgtgccccctgaacccaaggcaaagaggctttatcagagcggcgggatgctctgaaaacttaaaactcctgcaaactataatttggtcggccaaaagagaacacagaccactgggtgttgtattcgtggacatcgccaaggcttttgacaccgtaagccaccagcacatcattcatgctttgcagcaaagagaggtggatccccacatcgtcggtctggtgagcaatatgtacgagaacatcagtacgtatatcaccacaaagaggaacacacacacagacaaaatccagatccgggttggagtaaagcagggtgacccgatgtcgccccttttatttaacctggcaatggaccctctattatgcaagctggaagagagtggcaaaggataccaccgaggacagagcagcatcacagcgatggcatttgcagacgatctggttttgctgagcgactcctgggaaaatatgaatacaaatattagcatactggagaccttctgcaatctgaccggactcaaaacacaggggcaaaagtgccacggcttttacatcaagccgacaaaggactcttacaccatcaatgactgcgctgcctggactatcaacggcacacccctgaacatgatcgaccccggcgaatctgagaaatacctcggcctgcagtttgacccgtggattggaatagcaaggtccggtctctccacaaaactagatttttggcttcagcggatcgatcaagcaccacttaaacctctgcagaaaactgatattctcaaaacatacaccatccctcggctgatctacatagctgaccactcagaagtgaaaagcgcactactcgaaacccttgaccagaagatccggacagcggtcaaggaatggcttcacctacctccgtgcacctgcgatgccatcctgtactcgagcacgagagacggcggtttgggcatcaccaaattggcaggactgatccccagcgtgcaggcccgtagactgcatcggatcgcacagtcatctgacgatacgatgaaatgcttcatggaaaaagagaaaatggaacagctgcataagaaattgtggattcaagctggaggggacagagagaacataccctcgatttgggaagcaccaccgtcgagtgaaccaccaaacaacgtgagcacaaattcggaatgggaagcaccgacccagaaagataaatttccaaagccttgcaattggaggaaaaacgaattcaaaaaatggaccaaattggcatcccaaggccgcggaattgtaaattttgaaagagacaaaattagtaaccattggatccaatactacagacgcatacctcacaggaaactcctcactgcactacaactcagggccaacgtttaccccacgagagaatttctagccaggggtagacaagaccaatacatcaaggcgtgtaggcactgcgatgcggacattgaatcctgcgcccacatcatcggcaactgcccagtgacacaggacgcccgaatcaagaggcacaattacatctgcgaactgcttctcgaggaggcgaagaagaaggactgggtagtgttcaaggaaccgcacataagggattccaacaaggaactgtacaaacctgacctgatatttgtgaaggatgcccgtgcacttgtcgtggatgtgacagtacggtatgaagcagccaaatcatcgctggaggaagccgctgcagagaaagtgagaaagtacaaacacctggaaacggaagtaagacatctcacgaatgcaaaggacgttacttttgtgggctttcccctaggagcgcgggggaaatggcaccaagataactttaaacttttgactgagcttggcctctccaaatcgaggcaagtgaaaatggcagagactttttccacagtagcgctcttttcatctgtggacattgtacatatgtttgccagtagggccagaaaatctatggttatgtgataataggctgccttctgcggggcttgccttctggccatgcccttcttctctcccttgcacctgtacctcttggtctttgaataaagcctgagtaggaaggaccggtagacatgataagatacattgatgagtttggacaaaccacaactagaatgcagtgaaaaaaatgctttatttgtgaaatttgtgatgctattgctttatttgtaaccattataagctgcaataaacaagttaacaacaacaaaaaaaaaaaaaaaaaaaaaaaaaaaaaaacgttgactaaaaaaaaaaaaaaaaaaaaaaaaaaaaaaaaaaaaaaaaaaaaaaaaaaaaaaaaaaaaaaaaaaaaaa

SEQ ID NO: 11532 - DNA, 4703 bp, synthetic construct
  source 1..4703: mol_type = other DNA
ggtctagttacaactgggcatcgctgcagagatcgcacctcctcgtggtcccgctggtagcccttcgaagggtgactaagtcgatctctgccccaggtacggagccgttgggactcaccagtccaacgtaactcctgcctaaattcggtgaaacaaattcctcggtaaaaagccccatggcttcttgcccgaaacctggccccccggtttcagcaggggcaatgagtttggaaagtggactgaccacccactccgttctcgccatcgaacgtggtcccaattcgttggcaaattccggatcagactttgggggggggggtctggggctaccgttacgcctattgagggtatcggtcggcactcagacctcccgctccgactgggtagacctggtgtcctggagccacccaggacccacgtctaagtcccagcaggttgacctggtgtctttatttcctaaacaccgggttgacctgttatccaaaaacgaccaggtagacctggtggctcaatttttaccatctaaatttccccccaatttggcagaaaatgatttggctttgctggtgaacttagagttctacagatcggatttgcatgtgtatgagtgtgttcattttgctgcacattgggagggattaagtggtttgcctgaggtgtatgaacaacttgcaccacaaccgtgtgtgggagaaactttacattctagcctcccacgagacagtgaactgtttgtgcctgaagaggggagcagcgagaaggagagcgaggacgcgccaaaaacatctcctccgacgcctgggaaacatggtaggaagcagactggggaggaaaaagtgatggtgactgttcctgacaaaaatccaccttgtccttgctgtggtacccgggtaaactctgtgttgaatctgattgaacatctgaaagtgtcacacgggaaaaggggggtttgttttcggtgtgcaaaatgtggaaaggaaaatagtaactatcacagtgttgtttgtcattttaagaaatgcaggggtccagagacggagaaagccccagctggggagtggatttgtgaggtatgcaacagagattttacaaccaaaattggcctgggacaacacaagagattggcacacccagcagtgagaaatcaggaaaggatcgttgcttcccaaccgaaagaaacatcaaatagaggtgctcacaaaaggtgctggacaaaggaggaggaagaattactaataagactggaggctcagttcgagggaaacaaaaatattaataagcttattgcagaacacataaccaccaaaacagctaagcagatcagtgacaaaaggcgattgctgtccagaaagccagcagaggagccacgtgaggagcctggaacgtgtcatcacaccaggagagcagctgcgagcctgagaacggagcctgagatgagtcatcacgcccaggcagaggacagagataatggacctgggagacgccctctgccaggcagggcagctgccggagggagaacaatggacgagataagacgccaccctgataagggcaacggacagcagagacccaccaagcaaaaatcagaagaacagctgcaggcttactataaaaagacactagaggaacgactttcagctggggcacttaacaccttcccccgagcattcaagcaggtaatggaaggccgggatataaagctagtaatcaatcagacagcgcaggactacttcggatgcctggaatccataagccaaataagaacggcaacccgagataaaaaggacacggtgacccgggagaaacacccaaagaaaccttttcagaagtggatgaagaagagagcaatcaaaaaaggtaattatcttcggttccagcgtttattttatcttgatagagggaaactggctaaaatcattttagatgatattgaatgcttgtcttgtgacataccactcagtgaaatttattcggtttttaaaacaagatgggaaacaactggtagctttaaaagccttggggactttaaaacttacgggaaggctgacaacactgccttcagagaattaattacggctaaagaaattgagaaaaatgtgcaggaaatgagcaaaggctcggctcccggtccagacgggattactcttggggacgtcgtaaagatggatcccgagttttcccggaccatggagattttcaatttatggttaacaactggtaaaatcccggacatggtgagggggtgcagaaccgttttgattccaaaatcatcagacccggatcgtttgaaagacattaataactggagacctatcacgatcggttccatcttgctgagactgttctccaggattgtaacagctaggctgagcaaagcgtgccccctgaacccaaggcaaagaggctttatcagagcggcgggatgctctgaaaacttaaaactcctgcaaactataatttggtcggccaaaagagaacacagaccactgggtgttgtattcgtggacatcgccaaggcttttgacaccgtaagccaccagcacatcattcatgctttgcagcaaagagaggtggatccccacatcgtcggtctggtgagcaatatgtacgagaacatcagtacgtatatcaccacaaagaggaacacacacacagacaaaatccagatccgggttggagtaaagcagggtgacccgatgtcgccccttttatttaacctggcaatggaccctctattatgcaagctggaagagagtggcaaaggataccaccgaggacagagcagcatcacagcgatggcatttgcagacgatctggttttgctgagcgactcctgggaaaatatgaatacaaatattagcatactggagaccttctgcaatctgaccggactcaaaacacaggggcaaaagtgccacggcttttacatcaagccgacaaaggactcttacaccatcaatgactgcgctgcctggactatcaacggcacacccctgaacatgatcgaccccggcgaatctgagaaatacctcggcctgcagtttgacccgtggattggaatagcaaggtccggtctctccacaaaactagatttttggcttcagcggatcgatcaagcaccacttaaacctctgcagaaaactgatattctcaaaacatacaccatccctcggctgatctacatagctgaccactcagaagtgaaaagcgcactactcgaaacccttgaccagaagatccggacagcggtcaaggaatggcttcacctacctccgtgcacctgcgatgccatcctgtactcgagcacgagagacggcggtttgggcatcaccaaattggcaggactgatccccagcgtgcaggcccgtagactgcatcggatcgcacagtcatctgacgatacgatgaaatgcttcatggaaaaagagaaaatggaacagctgcataagaaattgtggattcaagctggaggggacagagagaacataccctcgatttgggaagcaccaccgtcgagtgaaccaccaaacaacgtgagcacaaattcggaatgggaagcaccgacccagaaagataaatttccaaagccttgcaattggaggaaaaacgaattcaaaaaatggaccaaattggcatcccaaggccgcggaattgtaaattttgaaagagacaaaattagtaaccattggatccaatactacagacgcatacctcacaggaaactcctcactgcactacaactcagggccaacgtttaccccacgagagaatttctagccaggggtagacaagaccaatacatcaaggcgtgtaggcactgcgatgcggacattgaatcctgcgcccacatcatcggcaactgcccagtgacacaggacgcccgaatcaagaggcacaattacatctgcgaactgcttctcgaggaggcgaagaagaaggactgggtagtgttcaaggaaccgcacataagggattccaacaaggaactgtacaaacctgacctgatatttgtgaaggatgcccgtgcacttgtcgtggatgtgacagtacggtatgaagcagccaaatcatcgctggaggaagccgctgcagagaaagtgagaaagtacaaacacctggaaacggaagtaagacatctcacgaatgcaaaggacgttacttttgtgggctttcccctaggagcgcgggggaaatggcaccaagataactttaaacttttgactgagcttggcctctccaaatcgaggcaagtgaaaatggcagagactttttccacagtagcgctcttttcatctgtggacattgtacatatgtttgccagtagggccagaaaatctatggttatgtgataataggctgccttctgcggggcttgccttctggccatgcccttcttctctcccttgcacctgtacctcttggtctttgaataaagcctgagtaggaaggaccggtagacatgataagatacattgatgagtttggacaaaccacaactagaatgcagtgaaaaaaatgctttatttgtgaaatttgtgatgctattgctttatttgtaaccattataagctgcaataaacaagttaacaacaacaaaaaaaaaaaaaaaaaaaaaaaaaaaaaaacgttgactaaaaaaaaaaaaaaaaaaaaaaaaaaaaaaaaaaaaaaaaaaaaaaaaaaaaaaaaaaaaaaaaaaaaaa

SEQ ID NO: 11533 - DNA, 4703 bp, synthetic construct
  source 1..4703: mol_type = other DNA
ggtctagttacaactgggcatcgctgcagagatcgcacctcctcgtggtcccgctggtagcccttcgaagggtgactaagtcgatctctgccccaggtacggagccgttgggactcaccagtccaacgtaactcctgcctaaattcggtgaaacaaattcctcggtaaaaagccccatggcttcttgcccgaaacctggccccccggtttcagcaggggcaatgagtttggaaagtggactgaccacccactccgttctcgccatcgaacgtggtcccaattcgttggcaaattccggatcagactttgggggggggggtctggggctaccgttacgcctattgagggtatcggtcggcactcagacctcccgctccgactgggtagacctggtgtcctggagccacccaggacccacgtctaagtcccagcaggttgacctggtgtctttatttcctaaacaccgggttgacctgttatccaaaaacgaccaggtagacctggtggctcaatttttaccatctaaatttccccccaatttggcagaaaatgatttggctttgctggtgaacttagagttctacagatcggatttgcatgtgtatgagtgtgttcattttgctgcacattgggagggattaagtggtttgcctgaggtgtatgaacaacttgcaccacaaccgtgtgtgggagaaactttacattctagcctcccacgagacagtgaactgtttgtgcctgaagaggggagcagcgagaaggagagcgaggacgcgccaaaaacatctcctccgacgcctgggaaacatggtaggaagcagactggggaggaaaaagtgatggtgactgttcctgacaaaaatccaccttgtccttgctgtggtacccgggtaaactctgtgttgaatctgattgaacatctgaaagtgtcacacgggaaaaggggggtttgttttcggtgtgcaaaatgtggaaaggaaaatagtaactatcacagtgttgtttgtcattttaagaaatgcaggggtccagagacggagaaagccccagctggggagtggatttgtgaggtatgcaacagagattttacaaccaaaattggcctgggacaacacaagagattggcacacccagcagtgagaaatcaggaaaggatcgttgcttcccaaccgaaagaaacatcaaatagaggtgctcacaaaaggtgctggacaaaggaggaggaagaattactaataagactggaggctcagttcgagggaaacaaaaatattaataagcttattgcagaacacataaccaccaaaacagctaagcagatcagtgacaaaaggcgattgctgtccagaaagccagcagaggagccacgtgaggagcctggaacgtgtcatcacaccaggagagcagctgcgagcctgagaacggagcctgagatgagtcatcacgcccaggcagaggacagagataatggacctgggagacgccctctgccaggcagggcagctgccggagggagaacaatggacgagataagacgccaccctgataagggcaacggacagcagagacccaccaagcaaaaatcagaagaacagctgcaggcttactataaaaagacactagaggaacgactttcagctggggcacttaacaccttcccccgagcattcaagcaggtaatggaaggccgggatataaagctagtaatcaatcagacagcgcaggactacttcggatgcctggaatccataagccaaataagaacggcaacccgagataaaaaggacacggtgacccgggagaaacacccaaagaaaccttttcagaagtggatgaagaagagagcaatcaaaaaaggtaattatcttcggttccagcgtttattttatcttgatagagggaaactggctaaaatcattttagatgatattgaatgcttgtcttgtgacataccactcagtgaaatttattcggtttttaaaacaagatgggaaacaactggtagctttaaaagccttggggactttaaaacttacgggaaggctgacaacactgccttcagagaattaattacggctaaagaaattgagaaaaatgtgcaggaaatgagcaaaggctcggctcccggtccagacgggattactcttggggacgtcgtaaagatggatcccgagttttcccggaccatggagattttcaatttatggttaacaactggtaaaatcccggacatggtgagggggtgcagaaccgttttgattccaaaatcatcagacccggatcgtttgaaagacattaataactggagacctatcacgatcggttccatcttgctgagactgttctccaggattgtaacagctaggctgagcaaagcgtgccccctgaacccaaggcaaagaggctttatcagagcggcgggatgctctgaaaacttaaaactcctgcaaactataatttggtcggccaaaagagaacacagaccactgggtgttgtattcgtggacatcgccaaggcttttgacaccgtaagccaccagcacatcattcatgctttgcagcaaagagaggtggatccccacatcgtcggtctggtgagcaatatgtacgagaacatcagtacgtatatcaccacaaagaggaacacacacacagacaaaatccagatccgggttggagtaaagcagggtgacccgatgtcgccccttttatttaacctggcaatggaccctctattatgcaagctggaagagagtggcaaaggataccaccgaggacagagcagcatcacagcgatggcatttgcagacgatctggttttgctgagcgactcctgggaaaatatgaatacaaatattagcatactggagaccttctgcaatctgaccggactcaaaacacaggggcaaaagtgccacggcttttacatcaagccgacaaaggactcttacaccatcaatgactgcgctgcctggactatcaacggcacacccctgaacatgatcgaccccggcgaatctgagaaatacctcggcctgcagtttgacccgtggattggaatagcaaggtccggtctctccacaaaactagatttttggcttcagcggatcgatcaagcaccacttaaacctctgcagaaaactgatattctcaaaacatacaccatccctcggctgatctacatagctgaccactcagaagtgaaaactggcctactcgaaacccttgaccagaagatccggacagcggtcaaggaatggcttcacctacctccgtgcacctgcgatgccatcctgtactcgagcacgagagacggcggtttgggcatcaccaaattggcaggactgatccccagcgtgcaggcccgtagactgcatcggatcgcacagtcatctgacgatacgatgaaatgcttcatggaaaaagagaaaatggaacagctgcataagaaattgtggattcaagctggaggggacagagagaacataccctcgatttgggaagcaccaccgtcgagtgaaccaccaaacaacgtgagcacaaattcggaatgggaagcaccgacccagaaagataaatttccaaagccttgcaattggaggaaaaacgaattcaaaaaatggaccaaattggcatcccaaggccgcggaattgtaaattttgaaagagacaaaattagtaaccattggatccaatactacagacgcatacctcacaggaaactcctcactgcactacaactcagggccaacgtttaccccacgagagaatttctagccaggggtagacaagaccaatacatcaaggcgtgtaggcactgcgatgcggacattgaatcctgcgcccacatcatcggcaactgcccagtgacacaggacgcccgaatcaagaggcacaattacatctgcgaactgcttctcgaggaggcgaagaagaaggactgggtagtgttcaaggaaccgcacataagggattccaacaaggaactgtacaaacctgacctgatatttgtgaaggatgcccgtgcacttgtcgtggatgtgacagtacggtatgaagcagccaaatcatcgctggaggaagccgctgcagagaaagtgagaaagtacaaacacctggaaacggaagtaagacatctcacgaatgcaaaggacgttacttttgtgggctttcccctaggagcgcgggggaaatggcaccaagataactttaaacttttgactgagcttggcctctccaaatcgaggcaagtgaaaatggcagagactttttccacagtagcgctcttttcatctgtggacattgtacatatgtttgccagtagggccagaaaatctatggttatgtgataataggctgccttctgcggggcttgccttctggccatgcccttcttctctcccttgcacctgtacctcttggtctttgaataaagcctgagtaggaaggaccggtagacatgataagatacattgatgagtttggacaaaccacaactagaatgcagtgaaaaaaatgctttatttgtgaaatttgtgatgctattgctttatttgtaaccattataagctgcaataaacaagttaacaacaacaaaaaaaaaaaaaaaaaaaaaaaaaaaaaaacgttgactaaaaaaaaaaaaaaaaaaaaaaaaaaaaaaaaaaaaaaaaaaaaaaaaaaaaaaaaaaaaaaaaaaaaaa

SEQ ID NO: 11534 - skipped

SEQ ID NO: 11535 - DNA, 4703 bp, synthetic construct
  source 1..4703: mol_type = other DNA
ggtctagttacaactgggcatcgctgcagagatcgcacctcctcgtggtcccgctggtagcccttcgaagggtgactaagtcgatctctgccccaggtacggagccgttgggactcaccagtccaacgtaactcctgcctaaattcggtgaaacaaattcctcggtaaaaagccccatggcttcttgcccgaaacctggccccccggtttcagcaggggcaatgagtttggaaagtggactgaccacccactccgttctcgccatcgaacgtggtcccaattcgttggcaaattccggatcagactttgggggggggggtctggggctaccgttacgcctattgagggtatcggtcggcactcagacctcccgctccgactgggtagacctggtgtcctggagccacccaggacccacgtctaagtcccagcaggttgacctggtgtctttatttcctaaacaccgggttgacctgttatccaaaaacgaccaggtagacctggtggctcaatttttaccatctaaatttccccccaatttggcagaaaatgatttggctttgctggtgaacttagagttctacagatcggatttgcatgtgtatgagtgtgttcattttgctgcacattgggagggattaagtggtttgcctgaggtgtatgaacaacttgcaccacaaccgtgtgtgggagaaactttacattctagcctcccacgagacagtgaactgtttgtgcctgaagaggggagcagcgagaaggagagcgaggacgcgccaaaaacatctcctccgacgcctgggaaacatggtttggaacagactggggaggaaaaagtgatggtgactgttcctgacaaaaatccaccttgtccttgctgtggtacccgggtaaactctgtgttgaatctgattgaacatctgaaagtgtcacacgggaaaaggggggtttgttttcggtgtgcaaaatgtggaaaggaaaatagtaactatcacagtgttgtttgtcattttaagaaatgcaggggtccagagacggagaaagccccagctggggagtggatttgtgaggtatgcaacagagattttacaaccaaaattggcctgggacaacacaagagattggcacacccagcagtgagaaatcaggaaaggatcgttgcttcccaaccgaaagaaacatcaaatagaggtgctcacaaaaggtgctggacaaaggaggaggaagaattactaataagactggaggctcagttcgagggaaacaaaaatattaataagcttattgcagaacacataaccaccaaaacagctaagcagatcagtgacaaaaggcgattgctgtccagaaagccagcagaggagccacgtgaggagcctggaacgtgtcatcacaccaggagagcagctgcgagcctgagaacggagcctgagatgagtcatcacgcccaggcagaggacagagataatggacctgggagacgccctctgccaggcagggcagctgccggagggagaacaatggacgagataagacgccaccctgataagggcaacggacagcagagacccaccaagcaaaaatcagaagaacagctgcaggcttactataaaaagacactagaggaacgactttcagctggggcacttaacaccttcccccgagcattcaagcaggtaatggaaggccgggatataaagctagtaatcaatcagacagcgcaggactacttcggatgcctggaatccataagccaaataagaacggcaacccgagataaaaaggacacggtgacccgggagaaacacccaaagaaaccttttcagaagtggatgaagaagagagcaatcaaaaaaggtaattatcttcggttccagcgtttattttatcttgatagagggaaactggctaaaatcattttagatgatattgaatgcttgtcttgtgacataccactcagtgaaatttattcggtttttaaaacaagatgggaaacaactggtagctttaaaagccttggggactttaaaacttacgggaaggctgacaacactgccttcagagaattaattacggctaaagaaattgagaaaaatgtgcaggaaatgagcaaaggctcggctcccggtccagacgggattactcttggggacgtcgtaaagatggatcccgagttttcccggaccatggagattttcaatttatggttaacaactggtaaaatcccggacatggtgagggggtgcagaaccgttttgattccaaaatcatcagacccggatcgtttgaaagacattaataactggagacctatcacgatcggttccatcttgctgagactgttctccaggattgtaacagctaggctgagcaaagcgtgccccctgaacccaaggcaaagaggctttatcagagcggcgggatgctctgaaaacttaaaactcctgcaaactataatttggtcggccaaaagagaacacagaccactgggtgttgtattcgtggacatcgccaaggcttttgacaccgtaagccaccagcacatcattcatgctttgcagcaaagagaggtggatccccacatcgtcggtctggtgagcaatatgtacgagaacatcagtacgtatatcaccacaaagaggaacacacacacagacaaaatccagatccgggttggagtaaagcagggtgacccgatgtcgccccttttatttaacctggcaatggaccctctattatgcaagctggaagagagtggcaaaggataccaccgaggacagagcagcatcacagcgatggcatttgcagacgatctggttttgctgagcgactcctgggaaggcatgaatacaaatattagcatactggagaccttctgcaatctgaccggactcaaaacacaggggcaaaagtgccacggcttttacatcaagccgacaaaggactcttacaccatcaatgactgcgctgcctggactatcaacggcacacccctgaacatgatcgaccccggcgaatctgagaaatacctcggcctgcagtttgacccgtggattggaatagcaaggtccggtctctccacaaaactagatttttggcttcagcggatcgatcaagcaccacttaaacctctgcagaaactggatattctcaaaacatacaccatccctcggctgatctacatagctgaccactcagaagtgaaaactgcactactcgaaacccttgaccagaagatccggacagcggtcaaggaatggcttcacctacctccgtgcacctgcgatgccatcctgtactcgagcacgagagacggcggtttgggcatcaccaaattggcaggactgatccccagcgtgcaggcccgtagactgcatcggatcgcacagtcatctgacgatacgatgaaatgcttcatggaaaaagagaaaatggaacagctgcataagaaattgtggattcaagctggaggggacagagagaacataccctcgatttgggaagcaccaccgtcgagtgaaccaccaaacaacgtgagcacaaattcggaatgggaagcaccgacccagaaagataaatttccaaagccttgcaattggaggaaaaacgaattcaaaaaatggaccaaattggcatcccaaggccgcggaattgtaaattttgaaagagacaaaattagtaaccattggatccaatactacagacgcatacctcacaggaaactcctcactgcactacaactcagggccaacgtttaccccacgagagaatttctagccaggggtagacaagaccaatacatcaaggcgtgtaggcactgcgatgcggacattgaatcctgcgcccacatcatcggcaactgcccagtgacacaggacgcccgaatcaagaggcacaataagatctgcgaactgcttctcgaggaggcgaagaagaaggactgggtagtgttcaaggaaccgcacataagggattccaacaaggaactgtacaaacctgacctgatatttgtgaaggatgcccgtgcacttgtcgtggatgtgacagtacggtatgaagcagccaaatcatcgctggaggaagccgctgcagagaaagtgagaaagtacaaacacctggaaacggaagtaagacatctcacgaatgcaaaggacgttacttttgtgggctttcccctaggagcgcgggggaaatggcaccaagataactttaaacttttgactgagcttggcctctccaaatcgaggcaagtgaaaatggcagagactttttccacagtagcgctcttttcatctgtggacattgtacatatgtttgccagtagggccagaaaatctatggttatgtgataataggctgccttctgcggggcttgccttctggccatgcccttcttctctcccttgcacctgtacctcttggtctttgaataaagcctgagtaggaaggaccggtagacatgataagatacattgatgagtttggacaaaccacaactagaatgcagtgaaaaaaatgctttatttgtgaaatttgtgatgctattgctttatttgtaaccattataagctgcaataaacaagttaacaacaacaaaaaaaaaaaaaaaaaaaaaaaaaaaaaaacgttgactaaaaaaaaaaaaaaaaaaaaaaaaaaaaaaaaaaaaaaaaaaaaaaaaaaaaaaaaaaaaaaaaaaaaaa

SEQ ID NO: 11536 - DNA, 4703 bp, synthetic construct
  source 1..4703: mol_type = other DNA
ggtctagttacaactgggcatcgctgcagagatcgcacctcctcgtggtcccgctggtagcccttcgaagggtgactaagtcgatctctgccccaggtacggagccgttgggactcaccagtccaacgtaactcctgcctaaattcggtgaaacaaattcctcggtaaaaagccccatggcttcttgcccgaaacctggccccccggtttcagcaggggcaatgagtttggaaagtggactgaccacccactccgttctcgccatcgaacgtggtcccaattcgttggcaaattccggatcagactttgggggggggggtctggggctaccgttacgcctattgagggtatcggtcggcactcagacctcccgctccgactgggtagacctggtgtcctggagccacccaggacccacgtctaagtcccagcaggttgacctggtgtctttatttcctaaacaccgggttgacctgttatccaaaaacgaccaggtagacctggtggctcaatttttaccatctaaatttccccccaatttggcagaaaatgatttggctttgctggtgaacttagagttctacagatcggatttgcatgtgtatgagtgtgttcattttgctgcacattgggagggattaagtggtttgcctgaggtgtatgaacaacttgcaccacaaccgtgtgtgggagaaactttacattctagcctcccacgagacagtgaactgtttgtgcctgaagaggggagcagcgagaaggagagcgaggacgcgccaaaaacatctcctccgacgcctgggaaacatggtttggaacagactggggaggaaaaagtgatggtgactgttcctgacaaaaatccaccttgtccttgctgtggtacccgggtaaactctgtgttgaatctgattgaacatctgaaagtgtcacacgggaaaaggggggtttgttttcggtgtgcaaaatgtggaaaggaaaatagtaactatcacagtgttgtttgtcattttaagaaatgcaggggtccagagacggagaaagccccagctggggagtggatttgtgaggtatgcaacagagattttacaaccaaaattggcctgggacaacacaagagattggcacacccagcagtgagaaatcaggaaaggatcgttgcttcccaaccgaaagaaacatcaaatagaggtgctcacaaaaggtgctggacaaaggaggaggaagaattactaataagactggaggctcagttcgagggaaacaaaaatattaataagcttattgcagaacacataaccaccaaaacagctaagcagatcagtgacaaaaggcgattgctgtccagaaagccagcagaggagccacgtgaggagcctggaacgtgtcatcacaccaggagagcagctgcgagcctgagaacggagcctgagatgagtcatcacgcccaggcagaggacagagataatggacctgggagacgccctctgccaggcagggcagctgccggagggagaacaatggacgagataagacgccaccctgataagggcaacggacagcagagacccaccaagcaaaaatcagaagaacagctgcaggcttactataaaaagacactagaggaacgactttcagctggggcacttaacaccttcccccgagcattcaagcaggtaatggaaggccgggatataaagctagtaatcaatcagacagcgcaggactacttcggatgcctggaatccataagccaaataagaacggcaacccgagataaaaaggacacggtgacccggaagaaacacccaaagaaaccttttcagaagtggatgaagaagagagcaatcaaaaaaggtaattatcttcggttccagcgtttattttatcttgatagagggaaactggctaaaatcattttagatgatattgaatgcttgtcttgtgacataccactcagtgaaatttattcggtttttaaaacaagatgggaaacaactggtagctttaaaagccttggggactttaaaacttacgggaaggctgacaacactgccttcagagaattaattacggctaaagaaattgagaaaaatgtgcaggaaatgagcaaaggctcggctcccggtccagacgggattactcttggggacgtcgtaaagatggatcccgagttttcccggaccatggagattttcaatttatggttaacaactggtaaaatcccggacatggtgagggggtgcagaaccgttttgattccaaaatcatcagacccggatcgtttgaaagacattaataactggagacctatcacgatcggttccatcttgctgagactgttctccaggattgtaacagctaggctgagcaaagcgtgccccctgaacccaaggcaaagaggctttatcagagcggcgggatgctctgaaaacttaaaactcctgcaaactataatttggtcggccaaaagagaacacagaccactgggtgttgtattcgtggacatcgccaaggcttttgacaccgtaagccaccagcacatcattcatgctttgcagcaaagagaggtggatccccacatcgtcggtctggtgagcaatatgtacgagaacatcagtacgtatatcaccacaaagaggaacacacacacagacaaaatccagatccgggttggagtaaagcagggtgacccgatgtcgccccttttatttaacctggcaatggaccctctattatgcaagctggaagagagtggcaaaggataccaccgaggacagagcagcatcacagcgatggcatttgcagacgatctggttttgctgagcgactcctgggaaggcatgaatacaaatattagcatactggagaccttctgcaatctgaccggactcaaaacacaggggcaaaagtgccacggcttttacatcaagccgacaaaggactcttacaccatcaatgactgcgctgcctggactatcaacggcacacccctgaacatgatcgaccccggcgaatctgagaaatacctcggcctgcagtttgacccgtggattggaatagcaaggtccggtctctccacaaaactagatttttggcttcagcggatcgatcaagcaccacttaaacctctgcagaaaactgatattctcaaaacatacaccatccctcggctgatctacatagctgaccactcagaagtgaaaactgcactactcgaaacccttgaccagaagatccggacagcggtcaaggaatggcttcacctacctccgtgcacctgcgatgccatcctgtactcgagcacgagagacggcggtttgggcatcaccaaattggcaggactgatccccagcgtgcaggcccgtagactgcatcggatcgcacagtcatctgacgatacgatgaaatgcttcatggaaaaagagaaaatggaacagctgcataagaaattgtggattcaagctggaggggacagagagaacataccctcgatttgggaagcaccaccgtcgagtgaaccaccaaacaacgtgagcacaaattcggaatgggaagcaccgacccagaaagataaatttccaaagccttgcaattggaggaaaaacgaattcaaaaaatggaccaaattggcatcccaaggccgcggaattgtaaattttgaaagagacaaaattagtaaccattggatccaatactacagacgcatacctcacaggaaactcctcactgcactacaactcagggccaacgtttaccccacgagagaatttctagccaggggtagacaagaccaatacatcaaggcgtgtaggcactgcgatgcggacattgaatcctgcgcccacatcatcggcaactgcccagtgacacaggacgcccgaatcaagaggcacaataagatctgcgaactgcttctcgaggaggcgaagaagaaggactgggtagtgttcaaggaaccgcacataagggattccaacaaggaactgtacaaacctgacctgatatttgtgaaggatgcccgtgcacttgtcgtggatgtgacagtacggtatgaagcagccaaatcatcgctggaggaagccgctgcagagaaagtgagaaagtacaaacacctggaaacggaagtaagacatctcacgaatgcaaaggacgttacttttgtgggctttcccctaggagcgcgggggaaatggcaccaagataactttaaacttttgactgagcttggcctctccaaatcgaggcaagtgaaaatggcagagactttttccacagtagcgctcttttcatctgtggacattgtacatatgtttgccagtagggccagaaaatctatggttatgtgataataggctgccttctgcggggcttgccttctggccatgcccttcttctctcccttgcacctgtacctcttggtctttgaataaagcctgagtaggaaggaccggtagacatgataagatacattgatgagtttggacaaaccacaactagaatgcagtgaaaaaaatgctttatttgtgaaatttgtgatgctattgctttatttgtaaccattataagctgcaataaacaagttaacaacaacaaaaaaaaaaaaaaaaaaaaaaaaaaaaaaacgttgactaaaaaaaaaaaaaaaaaaaaaaaaaaaaaaaaaaaaaaaaaaaaaaaaaaaaaaaaaaaaaaaaaaaaaa

SEQ ID NO: 11537 - DNA, 4703 bp, synthetic construct
  source 1..4703: mol_type = other DNA
ggtctagttacaactgggcatcgctgcagagatcgcacctcctcgtggtcccgctggtagcccttcgaagggtgactaagtcgatctctgccccaggtacggagccgttgggactcaccagtccaacgtaactcctgcctaaattcggtgaaacaaattcctcggtaaaaagccccatggcttcttgcccgaaacctggccccccggtttcagcaggggcaatgagtttggaaagtggactgaccacccactccgttctcgccatcgaacgtggtcccaattcgttggcaaattccggatcagactttgggggggggggtctggggctaccgttacgcctattgagggtatcggtcggcactcagacctcccgctccgactgggtagacctggtgtcctggagccacccaggacccacgtctaagtcccagcaggttgacctggtgtctttatttcctaaacaccgggttgacctgttatccaaaaacgaccaggtagacctggtggctcaatttttaccatctaaatttccccccaatttggcagaaaatgatttggctttgctggtgaacttagagttctacagatcggatttgcatgtgtatgagtgtgttcattttgctgcacattgggagggattaagtggtttgcctgaggtgtatgaacaacttgcaccacaaccgtgtgtgggagaaactttacattctagcctcccacgagacagtgaactgtttgtgcctgaagaggggagcagcgagaaggagagcgaggacgcgccaaaaacatctcctccgacgcctgggaaacatggtttggaacagactggggaggaaaaagtgatggtgactgttcctgacaaaaatccaccttgtccttgctgtggtacccgggtaaactctgtgttgaatctgattgaacatctgaaagtgtcacacgggaaaaggggggtttgttttcggtgtgcaaaatgtggaaaggaaaatagtaactatcacagtgttgtttgtcattttaagaaatgcaggggtccagagacggagaaagccccagctggggagtggatttgtgaggtatgcaacagagattttacaaccaaaattggcctgggacaacacaagagattggcacacccagcagtgagaaatcaggaaaggatcgttgcttcccaaccgaaagaaacatcaaatagaggtgctcacaaaaggtgctggacaaaggaggaggaagaattactaataagactggaggctcagttcgagggaaacaaaaatattaataagcttattgcagaacacataaccaccaaaacagctaagcagatcagtgacaaaaggcgattgctgtccagaaagccagcagaggagccacgtgaggagcctggaacgtgtcatcacaccaggagagcagctgcgagcctgagaacggagcctgagatgagtcatcacgcccaggcagaggacagagataatggacctgggagacgccctctgccaggcagggcagctgccggagggagaacaatggacgagataagacgccaccctgataagggcaacggacagcagagacccaccaagcaaaaatcagaagaacagctgcaggcttactataaaaagacactagaggaacgactttcagctggggcacttaacaccttcccccgagcattcaagcaggtaatggaaggccgggatataaagctagtaatcaatcagacagcgcaggactacttcggatgcctggaatccataagccaaataagaacggcaacccgagataaaaaggacacggtgacccgggagaaacacccaaagaaaccttttcagaagtggatgaagaagagagcaatcaaaaaaggtaattatcttcggttccagcgtttattttatcttgatagagggaaactggctaaaatcattttagatgatattgaatgcttgtcttgtgacataccactcagtgaaatttattcggtttttaaaacaagatgggaaacaactggtagctttaaaagccttggggactttaaaacttacgggaaggctgacaacactgccttcagagaattaattacggctaaagaaattgagaaaaatgtgcaggaaatgagcaaaggctcggctcccggtccagacgggattactcttggggacgtcgtaaagatggatcccgagttttcccggaccatggagattttcaatttatggttaacaactggtaaaatcccggacatggtgagggggtgcagaaccgttttgattccaaaatcatcagacccggatcgtttgaaagacattaataactggagacctatcacgatcggttccatcttgctgagactgttctccaggattgtaacagctaggctgagcaaagcgtgccccctgaacccaaggcaaagaggctttatcagagcggcgggatgctctgaaaacttaaaactcctgcaaactataatttggtcggccaaaagagaacacagaccactgggtgttgtattcgtggacatcgccaaggcttttgacaccgtaagccaccagcacatcattcatgctttgcagcaaagagaggtggatccccacatcgtcggtctggtgagcaatatgtacgagaacatcagtacgtatatcaccacaaagaggaacacacacacagacaaaatccagatccgggttggagtaaagcagggtgacccgatgtcgccccttttatttaacctggcaatggaccctctattatgcaagctggaagagagtggcaaaggataccaccgaggacagagcagcatcacagcgatggcatttgcagacgatctggttttgctgagcgactcctgggaaaatatgaatacaaatattagcatactggagaccttctgcaatctgaccggactcaaaacacaggggcaaaagtgccacggcttttacatcaagccgacaaaggactcttacaccatcaatgactgcgctgcctggactatcaacggcacacccctgaacatgatcgaccccggcgaatctgagaaatacctcggcctgcagtttgacccgtggattggaatagcaaggtccggtctctccacaaaactagatttttggcttcagcggatcgatcaagcaccacttaaacctctgcagaaactggatattctcaaaacatacaccatccctcggctgatctacatagctgaccactcagaagtgaaaactgcactactcgaaacccttgaccagaagatccggacagcggtcaaggaatggcttcacctacctccgtgcacctgcgatgccatcctgtactcgagcacgagagacggcggtttgggcatcaccaaattggcaggactgatccccagcgtgcaggcccgtagactgcatcggatcgcacagtcatctgacgatacgatgaaatgcttcatggaaaaagagaaaatggaacagctgcataagaaattgtggattcaagctggaggggacagagagaacataccctcgatttgggaagcaccaccgtcgagtgaaccaccaaacaacgtgagcacaaattcggaatgggaagcaccgacccagaaagataaatttccaaagccttgcaattggaggaaaaacgaattcaaaaaatggaccaaattggcatcccaaggccgcggaattgtaaattttgaaagagacaaaattagtaaccattggatccaatactacagacgcatacctcacaggaaactcctcactgcactacaactcagggccaacgtttaccccacgagagaatttctagccaggggtagacaagaccaatacatcaaggcgtgtaggcactgcgatgcggacattgaatcctgcgcccacatcatcggcaactgcccagtgacacaggacgcccgaatcaagaggcacaataagatctgcgaactgcttctcgaggaggcgaagaagaaggactgggtagtgttcaaggaaccgcacataagggattccaacaaggaactgtacaaacctgacctgatatttgtgaaggatgcccgtgcacttgtcgtggatgtgacagtacggtatgaagcagccaaatcatcgctggaggaagccgctgcagagaaagtgagaaagtacaaacacctggaaacggaagtaagacatctcacgaatgcaaaggacgttacttttgtgggctttcccctaggagcgcgggggaaatggcaccaagataactttaaacttttgactgagcttggcctctccaaatcgaggcaagtgaaaatggcagagactttttccacagtagcgctcttttcatctgtggacattgtacatatgtttgccagtagggccagaaaatctatggttatgtgataataggctgccttctgcggggcttgccttctggccatgcccttcttctctcccttgcacctgtacctcttggtctttgaataaagcctgagtaggaaggaccggtagacatgataagatacattgatgagtttggacaaaccacaactagaatgcagtgaaaaaaatgctttatttgtgaaatttgtgatgctattgctttatttgtaaccattataagctgcaataaacaagttaacaacaacaaaaaaaaaaaaaaaaaaaaaaaaaaaaaaacgttgactaaaaaaaaaaaaaaaaaaaaaaaaaaaaaaaaaaaaaaaaaaaaaaaaaaaaaaaaaaaaaaaaaaaaaa

SEQ ID NO: 11538 - DNA, 4703 bp, synthetic construct
  source 1..4703: mol_type = other DNA
ggtctagttacaactgggcatcgctgcagagatcgcacctcctcgtggtcccgctggtagcccttcgaagggtgactaagtcgatctctgccccaggtacggagccgttgggactcaccagtccaacgtaactcctgcctaaattcggtgaaacaaattcctcggtaaaaagccccatggcttcttgcccgaaacctggccccccggtttcagcaggggcaatgagtttggaaagtggactgaccacccactccgttctcgccatcgaacgtggtcccaattcgttggcaaattccggatcagactttgggggggggggtctggggctaccgttacgcctattgagggtatcggtcggcactcagacctcccgctccgactgggtagacctggtgtcctggagccacccaggacccacgtctaagtcccagcaggttgacctggtgtctttatttcctaaacaccgggttgacctgttatccaaaaacgaccaggtagacctggtggctcaatttttaccatctaaatttccccccaatttggcagaaaatgatttggctttgctggtgaacttagagttctacagatcggatttgcatgtgtatgagtgtgttcattttgctgcacattgggagggattaagtggtttgcctgaggtgtatgaacaacttgcaccacaaccgtgtgtgggagaaactttacattctagcctcccacgagacagtgaactgtttgtgcctgaagaggggagcagcgagaaggagagcgaggacgcgccaaaaacatctcctccgacgcctgggaaacatggtttggaacagactggggaggaaaaagtgatggtgactgttcctgacaaaaatccaccttgtccttgctgtggtacccgggtaaactctgtgttgaatctgattgaacatctgaaagtgtcacacgggaaaaggggggtttgttttcggtgtgcaaaatgtggaaaggaaaatagtaactatcacagtgttgtttgtcattttaagaaatgcaggggtccagagacggagaaagccccagctggggagtggatttgtgaggtatgcaacagagattttacaaccaaaattggcctgggacaacacaagagattggcacacccagcagtgagaaatcaggaaaggatcgttgcttcccaaccgaaagaaacatcaaatagaggtgctcacaaaaggtgctggacaaaggaggaggaagaattactaataagactggaggctcagttcgagggaaacaaaaatattaataagcttattgcagaacacataaccaccaaaacagctaagcagatcagtgacaaaaggcgattgctgtccagaaagccagcagaggagccacgtgaggagcctggaacgtgtcatcacaccaggagagcagctgcgagcctgagaacggagcctgagatgagtcatcacgcccaggcagaggacagagataatggacctgggagacgccctctgccaggcagggcagctgccggagggagaacaatggacgagataagacgccaccctgataagggcaacggacagcagagacccaccaagcaaaaatcagaagaacagctgcaggcttactataaaaagacactagaggaacgactttcagctggggcacttaacaccttcccccgagcattcaagcaggtaatggaaggccgggatataaagctagtaatcaatcagacagcgcaggactacttcggatgcctggaatccataagccaaataagaacggcaacccgagataaaaaggacacggtgacccggaagaaacacccaaagaaaccttttcagaagtggatgaagaagagagcaatcaaaaaaggtaattatcttcggttccagcgtttattttatcttgatagagggaaactggctaaaatcattttagatgatattgaatgcttgtcttgtgacataccactcagtgaaatttattcggtttttaaaacaagatgggaaacaactggtagctttaaaagccttggggactttaaaacttacgggaaggctgacaacactgccttcagagaattaattacggctaaagaaattgagaaaaatgtgcaggaaatgagcaaaggctcggctcccggtccagacgggattactcttggggacgtcgtaaagatggatcccgagttttcccggaccatggagattttcaatttatggttaacaactggtaaaatcccggacatggtgagggggtgcagaaccgttttgattccaaaatcatcagacccggatcgtttgaaagacattaataactggagacctatcacgatcggttccatcttgctgagactgttctccaggattgtaacagctaggctgagcaaagcgtgccccctgaacccaaggcaaagaggctttatcagagcggcgggatgctctgaaaacttaaaactcctgcaaactataatttggtcggccaaaagagaacacagaccactgggtgttgtattcgtggacatcgccaaggcttttgacaccgtaagccaccagcacatcattcatgctttgcagcaaagagaggtggatccccacatcgtcggtctggtgagcaatatgtacgagaacatcagtacgtatatcaccacaaagaggaacacacacacagacaaaatccagatccgggttggagtaaagcagggtgacccgatgtcgccccttttatttaacctggcaatggaccctctattatgcaagctggaagagagtggcaaaggataccaccgaggacagagcagcatcacagcgatggcatttgcagacgatctggttttgctgagcgactcctgggaaaatatgaatacaaatattagcatactggagaccttctgcaatctgaccggactcaaaacacaggggcaaaagtgccacggcttttacatcaagccgacaaaggactcttacaccatcaatgactgcgctgcctggactatcaacggcacacccctgaacatgatcgaccccggcgaatctgagaaatacctcggcctgcagtttgacccgtggattggaatagcaaggtccggtctctccacaaaactagatttttggcttcagcggatcgatcaagcaccacttaaacctctgcagaaaactgatattctcaaaacatacaccatccctcggctgatctacatagctgaccactcagaagtgaaaactgcactactcgaaacccttgaccagaagatccggacagcggtcaaggaatggcttcacctacctccgtgcacctgcgatgccatcctgtactcgagcacgagagacggcggtttgggcatcaccaaattggcaggactgatccccagcgtgcaggcccgtagactgcatcggatcgcacagtcatctgacgatacgatgaaatgcttcatggaaaaagagaaaatggaacagctgcataagaaattgtggattcaagctggaggggacagagagaacataccctcgatttgggaagcaccaccgtcgagtgaaccaccaaacaacgtgagcacaaattcggaatgggaagcaccgacccagaaagataaatttccaaagccttgcaattggaggaaaaacgaattcaaaaaatggaccaaattggcatcccaaggccgcggaattgtaaattttgaaagagacaaaattagtaaccattggatccaatactacagacgcatacctcacaggaaactcctcactgcactacaactcagggccaacgtttaccccacgagagaatttctagccaggggtagacaagaccaatacatcaaggcgtgtaggcactgcgatgcggacattgaatcctgcgcccacatcatcggcaactgcccagtgacacaggacgcccgaatcaagaggcacaataagatctgcgaactgcttctcgaggaggcgaagaagaaggactgggtagtgttcaaggaaccgcacataagggattccaacaaggaactgtacaaacctgacctgatatttgtgaaggatgcccgtgcacttgtcgtggatgtgacagtacggtatgaagcagccaaatcatcgctggaggaagccgctgcagagaaagtgagaaagtacaaacacctggaaacggaagtaagacatctcacgaatgcaaaggacgttacttttgtgggctttcccctaggagcgcgggggaaatggcaccaagataactttaaacttttgactgagcttggcctctccaaatcgaggcaagtgaaaatggcagagactttttccacagtagcgctcttttcatctgtggacattgtacatatgtttgccagtagggccagaaaatctatggttatgtgataataggctgccttctgcggggcttgccttctggccatgcccttcttctctcccttgcacctgtacctcttggtctttgaataaagcctgagtaggaaggaccggtagacatgataagatacattgatgagtttggacaaaccacaactagaatgcagtgaaaaaaatgctttatttgtgaaatttgtgatgctattgctttatttgtaaccattataagctgcaataaacaagttaacaacaacaaaaaaaaaaaaaaaaaaaaaaaaaaaaaaacgttgactaaaaaaaaaaaaaaaaaaaaaaaaaaaaaaaaaaaaaaaaaaaaaaaaaaaaaaaaaaaaaaaaaaaaaa

SEQ ID NO: 11539 - DNA, 4703 bp, synthetic construct
  source 1..4703: mol_type = other DNA
ggtctagttacaactgggcatcgctgcagagatcgcacctcctcgtggtcccgctggtagcccttcgaagggtgactaagtcgatctctgccccaggtacggagccgttgggactcaccagtccaacgtaactcctgcctaaattcggtgaaacaaattcctcggtaaaaagccccatggcttcttgcccgaaacctggccccccggtttcagcaggggcaatgagtttggaaagtggactgaccacccactccgttctcgccatcgaacgtggtcccaattcgttggcaaattccggatcagactttgggggggggggtctggggctaccgttacgcctattgagggtatcggtcggcactcagacctcccgctccgactgggtagacctggtgtcctggagccacccaggacccacgtctaagtcccagcaggttgacctggtgtctttatttcctaaacaccgggttgacctgttatccaaaaacgaccaggtagacctggtggctcaatttttaccatctaaatttccccccaatttggcagaaaatgatttggctttgctggtgaacttagagttctacagatcggatttgcatgtgtatgagtgtgttcattttgctgcacattgggagggattaagtggtttgcctgaggtgtatgaacaacttgcaccacaaccgtgtgtgggagaaactttacattctagcctcccacgagacagtgaactgtttgtgcctgaagaggggagcagcgagaaggagagcgaggacgcgccaaaaacatctcctccgacgcctgggaaacatggtttggaacagactggggaggaaaaagtgatggtgactgttcctgacaaaaatccaccttgtccttgctgtggtacccgggtaaactctgtgttgaatctgattgaacatctgaaagtgtcacacgggaaaaggggggtttgttttcggtgtgcaaaatgtggaaaggaaaatagtaactatcacagtgttgtttgtcattttccaaaatgcaggggtccagagacggagaaagccccagctggggagtggatttgtgaggtatgcaacagagattttacaaccaaaattggcctgggacaacacaagagattggcacacccagcagtgagaaatcaggaaaggatcgttgcttcccaaccgaaagaaacatcaaatagaggtgctcacaaaaggtgctggacaaaggaggaggaagaattactaataagactggaggctcagttcgagggaaacaaaaatattaataagcttattgcagaacacataaccaccaaaacagctaagcagatcagtgacaaaaggcgattgctgtccagaaagccagcagaggagccacgtgaggagcctggaacgtgtcatcacaccaggagagcagctgcgagcctgagaacggagcctgagatgagtcatcacgcccaggcagaggacagagataatggacctgggagacgccctctgccaggcagggcagctgccggagggagaacaatggacgagataagacgccaccctgataagggcaacggacagcagagacccaccaagcaaaaatcagaagaacagctgcaggcttactataaaaagacactagaggaacgactttcagctggggcacttaacaccttcccccgagcattcaagcaggtaatggaaggccgggatataaagctagtaatcaatcagacagcgcaggactgcttcggatgcctggaatccataagccaaataagaacggcaacccgagataaaaaggacacggtgacccgggagaaacacccaaagaaaccttttcagaagtggatgaagaagagagcaatcaaaaaaggtaattatcttcggttccagcgtttattttatcttgatagagggaaactggctaaaatcattttagatgatattgaatgcttgtcttgtgacataccactcagtgaaatttattcggtttttaaaacaagatgggaaacaactggtagctttaaaagccttggggactttaaaacttacgggaaggctgacaacactgccttcagagaattaattacggctaaagaaattgagaaaaatgtgcaggaaatgagcaaaggctcggctcccggtccagacgggattactcttggggacgtcgtaaagatggatcccgagttttcccggaccatggagattttcaatttatggttaacaactggtaaaatcccggacatggtgagggggtgcagaaccgttttgattccaaaatcatcaaagccggatcgtttgaaagacattaataactggagacctatcacgatcggttccatcttgctgagactgttctccaggattgtaacagctaggctgagcaaagcgtgccccctgaacccaaggcaaagaggctttatcagagcggcgggatgctctgaaaacttaaaactcctgcaaactataatttggtcggccaaaagagaacacagaccactgggtgttgtattcgtggacatcgccaaggcttttgacaccgtaagccaccagcacatcattcatgctttgcagcaaagagaggtggatccccacatcgtcggtctggtgagcaatatgtacgagaacatcagtacgtatatcaccacaaagaggaacacacacacagacaaaatccagatccgggttggagtaaagcagggtgacccgatgtcgccccttttatttaacctggcaatggaccctctattatgcaagctggaagagagtggcaaaggataccaccgaggacagagcagcatcacagcgatggcatttgcagacgatctggttttgctgagcgactcctgggaaggcatgaatacaaatattagcatactggagaccttctgcaatctgaccggactcaaaacacaggggcaaaagtgccacggcttttacatcaagccgacaaaggactcttacaccatcaatgactgcgctgcctggactatcaacggcacacccctgaacatgatcgaccccggcgaatctgagaaatacctcggcctgcagtttgacccgtggattggaatagcaaggtccggtctctccacaaaactagatttttggcttcagcggatcgatcaagcaccacttaaacctctgcagaaaactgatattctcaaaacatacaccatccctcggctgatctacatagctgaccactcagaagtgaaaactgcactactcgaaacccttgaccagaagatccggacagcggtcaaggaatggcttcacctacctccgtgcacctgcgatgccatcctgtactcgagcacgagagacggcggtttgggcatcaccaaattggcaggactgatccccagcgtgcaggcccgtagactgcatcggatcgcacagtcatctgacgatacgatgaaatgcttcatggaaaaagagaaaatggaacagctgcataagaaattgtggattcaagctggaggggacagagagaacataccctcgatttgggaagcaccaccgtcgagtgaaccaccaaacaacgtgagcacaaattcggaatgggaagcaccgacccagaaagataaatttccaaagccttgcaattggaggaaaaacgaattcaaaaaatggaccaaattggcatcccaaggccgcggaattgtaaattttgaaagagacaaaattagtaaccattggatccaatactacagacgcatacctcacaggaaactcctcactgcactacaactcagggccaacgtttaccccacgagagaatttctagccaggggtagacaagaccaatacatcaaggcgtgtaggcactgcgatgcggacattgaatcctgcgcccacatcatcggcaactgcccagtgacacaggacgcccgaatcaagaggcacaattacatctgcgaactgcttctcgaggaggcgaagaagaaggactgggtagtgttcaaggaaccgcacataagggattccaacaaggaactgtacaaacctgacctgatatttgtgaaggatgcccgtgcacttgtcgtggatgtgacagtacggtatgaagcagccaaatcatcgctggaggaagccgctgcagagaaagtgagaaagtacaaacacctggaaacggaagtaagacatctcacgaatgcaaaggacgttacttttgtgggctttcccctaggagcgcgggggaaatggcaccaagataactttaaacttttgactgagcttggcctctccaaatcgaggcaagtgaaaatggcagagactttttccacagtagcgctcttttcatctgtggacattgtacatatgtttgccagtagggccagaaaatctatggttatgtgataataggctgccttctgcggggcttgccttctggccatgcccttcttctctcccttgcacctgtacctcttggtctttgaataaagcctgagtaggaaggaccggtagacatgataagatacattgatgagtttggacaaaccacaactagaatgcagtgaaaaaaatgctttatttgtgaaatttgtgatgctattgctttatttgtaaccattataagctgcaataaacaagttaacaacaacaaaaaaaaaaaaaaaaaaaaaaaaaaaaaaacgttgactaaaaaaaaaaaaaaaaaaaaaaaaaaaaaaaaaaaaaaaaaaaaaaaaaaaaaaaaaaaaaaaaaaaaaa

SEQ ID NO: 11540 - DNA, 4703 bp, synthetic construct
  source 1..4703: mol_type = other DNA
ggtctagttacaactgggcatcgctgcagagatcgcacctcctcgtggtcccgctggtagcccttcgaagggtgactaagtcgatctctgccccaggtacggagccgttgggactcaccagtccaacgtaactcctgcctaaattcggtgaaacaaattcctcggtaaaaagccccatggcttcttgcccgaaacctggccccccggtttcagcaggggcaatgagtttggaaagtggactgaccacccactccgttctcgccatcgaacgtggtcccaattcgttggcaaattccggatcagactttgggggggggggtctggggctaccgttacgcctattgagggtatcggtcggcactcagacctcccgctccgactgggtagacctggtgtcctggagccacccaggacccacgtctaagtcccagcaggttgacctggtgtctttatttcctaaacaccgggttgacctgttatccaaaaacgaccaggtagacctggtggctcaatttttaccatctaaatttccccccaatttggcagaaaatgatttggctttgctggtgaacttagagttctacagatcggatttgcatgtgtatgagtgtgttcattttgctgcacattgggagggattaagtggtttgcctgaggtgtatgaacaacttgcaccacaaccgtgtgtgggagaaactttacattctagcctcccacgagacagtgaactgtttgtgcctgaagaggggagcagcgagaaggagagcgaggacgcgccaaaaacatctcctccgacgcctgggaaacatggtttggaacagactggggaggaaaaagtgatggtgactgttcctgacaaaaatccaccttgtccttgctgtggtacccgggtaaactctgtgttgaatctgattgaacatctgaaagtgtcacacgggaaaaggggggtttgttttcggtgtgcaaaatgtggaaaggaaaatagtaactatcacagtgttgtttgtcattttccaaaatgcaggggtccagagacggagaaagccccagctggggagtggatttgtgaggtatgcaacagagattttacaaccaaaattggcctgggacaacacaagagattggcacacccagcagtgagaaatcaggaaaggatcgttgcttcccaaccgaaagaaacatcaaatagaggtgctcacaaaaggtgctggacaaaggaggaggaagaattactaataagactggaggctcagttcgagggaaacaaaaatattaataagcttattgcagaacacataaccaccaaaacagctaagcagatcagtgacaaaaggcgattgctgtccagaaagccagcagaggagccacgtgaggagcctggaacgtgtcatcacaccaggagagcagctgcgagcctgagaacggagcctgagatgagtcatcacgcccaggcagaggacagagataatggacctgggagacgccctctgccaggcagggcagctgccggagggagaacaatggacgagataagacgccaccctgataagggcaacggacagcagagacccaccaagcaaaaatcagaagaacagctgcaggcttactataaaaagacactagaggaacgactttcagctggggcacttaacaccttcccccgagcattcaagcaggtaatggaaggccgggatataaagctagtaatcaatcagacagcgcaggactacttcggatgcctggaatccataagccaaataagaacggcaacccgagataaaaaggacacggtgacccgggagaaacacccaaagaaaccttttcagaagtggatgaaggacagagcaatcaaaaaaggtaattatcttcggttccagcgtttattttatcttgatagagggaaactggctaaaatcattttagatgatattgaatgcttgtcttgtgacataccactcagtgaaatttattcggtttttaaaacaagatgggaaacaactggtagctttaaaagccttggggactttaaaacttacgggaaggctgacaacactgccttcagagaattaattacggctaaagaaattgagaaaaatgtgcaggaaatgagcaaaggctcggctcccggtccagacgggattactcttggggacgtcgtaaagatggatcccgagttttcccggaccatggagattttcaatttatggttaacaactggtaaaatcccggacatggtgagggggtgcagaaccgttttgattccaaaatcatcaaagccggatcgtttgaaagacattaataactggagacctatcacgatcggttccatcttgctgagactgttctccaggattgtaacagctaggctgagcaaagcgtgccccctgaacccaaggcaaagaggctttatcagagcggcgggatgctctgaaaacttaaaactcctgcaaactataatttggtcggccaaaagagaacacagaccactgggtgttgtattcgtggacatcgccaaggcttttgacaccgtaagccaccagcacatcattcatgctttgcagcaaagagaggtggatccccacatcgtcggtctggtgagcaatatgtacgagaacatcagtacgtatatcaccacaaagaggaacacacacacagacaaaatccagatccgggttggagtaaagcagggtgacccgatgtcgccccttttatttaacctggcaatggaccctctattatgcaagctggaagagagtggcaaaggataccaccgaggacagagcagcatcacagcgatggcatttgcagacgatctggttttgctgagcgactcctgggaaaatatgaatacaaatattagcatactggagaccttctgcaatctgaccggactcaaaacacaggggcaaaagtgccacggcttttacatcaagccgacaaagaagtcttacaccatcaatgactgcgctgcctggactatcaacggcacacccctgaacatgatcgaccccggcgaatctgagaaatacctcggcctgcagtttgacccgtggattggaatagcaaggtccggtctctccacaaaactagatttttggcttcagcggatcgatcaagcaccacttaaacctctgcagaaaactgatattctcaaaacatacaccatccctcggctgatctacatagctgaccactcagaagtgaaaactgcactactcgaaacccttgaccagaagatccggacagcggtcaaggaatggcttcacctacctccgtgcacctgcgatgccatcctgtactcgagcacgagagacggcggtttgggcatcaccaaattggcaggactgatccccagcgtgcaggcccgtagactgcatcggatcgcacagtcatctgacgatacgatgaaatgcttcatggaaaaagagaaaatggaacagctgcataagaaattgtggattcaagctggaggggacagagagaacataccctcgatttgggaagcaccaccgtcgagtgaaccaccaaacaacgtgagcacaaattcggaatgggaagcaccgacccagaaagataaatttccaaagccttgcaattggaggaaaaacgaattcaaaaaatggaccaaattggcatcccaaggccgcggaattgtaaattttgaaagagacaaaattagtaaccattggatccaatactacagacgcatacctcacaggaaactcctcactgcactacaactcagggccaacgtttaccccacgagagaatttctagccaggggtagacaagaccaatacatcaaggcgtgtaggcactgcgatgcggacattgaatcctgcgcccacatcatcggcaactgcccagtgacacaggacgcccgaatcaagaggcacaattacatctgcgaactgcttctcgaggaggcgaagaagaaggactgggtagtgttcaaggaaccgcacataagggattccaacaaggaactgtacaaacctgacctgatatttgtgaaggatgcccgtgcacttgtcgtggatgtgacagtacggtatgaagcagccaaatcatcgctggaggaagccgctgcagagaaagtgagaaagtacaaacacctggaaacggaagtaagacatctcacgaatgcaaaggacgttacttttgtgggctttcccctaggagcgcgggggaaatggcaccaagataactttaaacttttgactgagcttggcctctccaaatcgaggcaagtgaaaatggcagagactttttccacagtagcgctcttttcatctgtggacattgtacatatgtttgccagtagggccagaaaatctatggttatgtgataataggctgccttctgcggggcttgccttctggccatgcccttcttctctcccttgcacctgtacctcttggtctttgaataaagcctgagtaggaaggaccggtagacatgataagatacattgatgagtttggacaaaccacaactagaatgcagtgaaaaaaatgctttatttgtgaaatttgtgatgctattgctttatttgtaaccattataagctgcaataaacaagttaacaacaacaaaaaaaaaaaaaaaaaaaaaaaaaaaaaaacgttgactaaaaaaaaaaaaaaaaaaaaaaaaaaaaaaaaaaaaaaaaaaaaaaaaaaaaaaaaaaaaaaaaaaaaaa

SEQ ID NO: 11541 - DNA, 4703 bp, synthetic construct
  source 1..4703: mol_type = other DNA
ggtctagttacaactgggcatcgctgcagagatcgcacctcctcgtggtcccgctggtagcccttcgaagggtgactaagtcgatctctgccccaggtacggagccgttgggactcaccagtccaacgtaactcctgcctaaattcggtgaaacaaattcctcggtaaaaagccccatggcttcttgcccgaaacctggccccccggtttcagcaggggcaatgagtttggaaagtggactgaccacccactccgttctcgccatcgaacgtggtcccaattcgttggcaaattccggatcagactttgggggggggggtctggggctaccgttacgcctattgagggtatcggtcggcactcagacctcccgctccgactgggtagacctggtgtcctggagccacccaggacccacgtctaagtcccagcaggttgacctggtgtctttatttcctaaacaccgggttgacctgttatccaaaaacgaccaggtagacctggtggctcaatttttaccatctaaatttccccccaatttggcagaaaatgatttggctttgctggtgaacttagagttctacagatcggatttgcatgtgtatgagtgtgttcattttgctgcacattgggagggattaagtggtttgcctgaggtgtatgaacaacttgcaccacaaccgtgtgtgggagaaactttacattctagcctcccacgagacagtgaactgtttgtgcctgaagaggggagcagcgagaaggagagcgaggacgcgccaaaaacatctcctccgacgcctgggaaacatggtttggaacagactggggaggaaaaagtgatggtgactgttcctgacaaaaatccaccttgtccttgctgtggtacccgggtaaactctgtgttgaatctgattgaacatctgaaagtgtcacacgggaaaaggggggtttgttttcggtgtgcaaaatgtggaaaggaaaatagtaactatcacagtgttgtttgtcattttaagaaatgcaggggtccagagacggagaaagccccagctggggagtggatttgtgaggtatgcaacagagattttacaaccaaaattggcctgggacaacacaagagattggcacacccagcagtgagaaatcaggaaaggatcgttgcttcccaaccgaaagaaacatcaaatagaggtgctcacaaaaggtgctggacaaaggaggaggaagaattactaataagactggaggctcagttcgagggaaacaaaaatattaataagcttattgcagaacacataaccaccaaaacagctaagcagatcagtgacaaaaggcgattgctgtccagaaagccagcagaggagccacgtgaggagcctggaacgtgtcatcacaccaggagagcagctgcgagcctgagaacggagcctgagatgagtcatcacgcccaggcagaggacagagataatggacctgggagacgccctctgccaggcagggcagctgccggagggagaacaatggacgagataagacgccaccctgataagggcaacggacagcagagacccaccaagcaaaaatcagaagaacagctgcaggcttactataaaaagacactagaggaacgactttcagctggggcacttaacaccttcccccgagcattcaagcaggtaatggaaggccgggatataaagctagtaatcaatcagacagcgcaggactacttcggatgcctggaatccataagccaaataagaacggcaacccgagataaaaaggacacggtgacccgggagaaacacccaaagaaaccttttcagaagtggatgaagaagagagcaatcaaaaaaggtaattatcttcggttccagcgtttattttatcttgatagagggaaactggctaaaatcattttagatgatattgaatgcttgtcttgtgacataccactcagtgaaatttattcggtttttaaaacaagatgggaaacaactggtagctttaaaagccttggggactttaaaacttacgggaaggctgacaacactgccttcagagaattaattacggctaaagaaattgagaaaaatgtgcaggaaatgagcaaaggctcggctcccggtccagacgggattactcttggggacgtcgtaaagatggatcccgagttttcccggaccatggagattttcaatttatggttaacaactggtaaaatcccggacatggtgagggggtgcagaaccgttttgattccaaaatcatcagacccggatcgtttgaaagacattaataactggagacctatcacgatcggttccatcttgctgagactgttctccaggattgtaacagctaggctgagcaaagcgtgccccctgaacccaaggcaaagaggctttatcagagcggcgggatgctctgaaaacttaaaactcctgcaaactataatttggtcggccaaaagagaacacagaccactgggtgttgtattcgtggacatcgccaaggcttttgacaccgtaagccaccagcacatcattcatgctttgcagcaaagagaggtggatccccacatcgtcggtctggtgagcaatatgtacgagaacatcagtacgtatatcaccacaaagaggaacacacacacagacaaaatccagatccgggttggagtaaagcagggtgacccgatgtcgccccttttatttaacctggcaatggaccctctattatgcaagctggaagagagtggcaaaggataccaccgaggacagagcagcatcacagcgatggcatttgcagacgatctggttttgctgagcgactcctgggaaaatatgaatacaaatattagcatactggagaccttctgcaatctgaccggactcaaaacacaggggcaaaagtgccacggcttttacatcaagccgacaaagaagtcttacaccatcaatgactgcgctgcctggactatcaacggcacacccctgaacatgatcgaccccggcgaatctgagaaatacctcggcctgcagtttgacccgtggattggaatagcaaggtccggtctctccacaaaactagatttttggcttcagcggatcgatcaagcaccacttaaacctctgcagaaaactgatattctcaaaacatacaccatccctcggctgatctacatagctgaccactcagaagtgaaaactggcctactcgaaacccttgaccagaagatccggacagcggtcaaggaatggcttcacctacctccgtgcacctgcgatgccatcctgtactcgagcacgagagacggcggtttgggcatcaccaaattggcaggactgatccccagcgtgcaggcccgtagactgcatcggatcgcacagtcatctgacgatacgatgaaatgcttcatggaaaaagagaaaatggaacagctgcataagaaattgtggattcaagctggaggggacagagagaacataccctcgatttgggaagcaccaccgtcgagtgaaccaccaaacaacgtgagcacaaattcggaatgggaagcaccgacccagaaagataaatttccaaagccttgcaattggaggaaaaacgaattcaaaaaatggaccaaattggcatcccaaggccgcggaattgtaaattttgaaagagacaaaattagtaaccattggatccaatactacagacgcatacctcacaggaaactcctcactgcactacaactcagggccaacgtttaccccacgagagaatttctagccaggggtagacaagaccaatacatcaaggcgtgtaggcactgcgatgcggacattgaatcctgcgcccacatcatcggcaactgcccagtgacacaggacgcccgaatcaagaggcacaattacatctgcgaactgcttctcgaggaggcgaagaagaaggactgggtagtgttcaaggaaccgcacataagggattccaacaaggaactgtacaaacctgacctgatatttgtgaaggatgcccgtgcacttgtcgtggatgtgacagtacggtatgaagcagccaaatcatcgctggaggaagccgctgcagagaaagtgagaaagtacaaacacctggaaacggaagtaagacatctcacgaatgcaaaggacgttacttttgtgggctttcccctaggagcgcgggggaaatggcaccaagataactttaaacttttgactgagcttggcctctccaaatcgaggcaagtgaaaatggcagagactttttccacagtagcgctcttttcatctgtggacattgtacatatgtttgccagtagggccagaaaatctatggttatgtgataataggctgccttctgcggggcttgccttctggccatgcccttcttctctcccttgcacctgtacctcttggtctttgaataaagcctgagtaggaaggaccggtagacatgataagatacattgatgagtttggacaaaccacaactagaatgcagtgaaaaaaatgctttatttgtgaaatttgtgatgctattgctttatttgtaaccattataagctgcaataaacaagttaacaacaacaaaaaaaaaaaaaaaaaaaaaaaaaaaaaaacgttgactaaaaaaaaaaaaaaaaaaaaaaaaaaaaaaaaaaaaaaaaaaaaaaaaaaaaaaaaaaaaaaaaaaaaaa

SEQ ID NO: 11542 - DNA, 4703 bp, synthetic construct
  source 1..4703: mol_type = other DNA
ggtctagttacaactgggcatcgctgcagagatcgcacctcctcgtggtcccgctggtagcccttcgaagggtgactaagtcgatctctgccccaggtacggagccgttgggactcaccagtccaacgtaactcctgcctaaattcggtgaaacaaattcctcggtaaaaagccccatggcttcttgcccgaaacctggccccccggtttcagcaggggcaatgagtttggaaagtggactgaccacccactccgttctcgccatcgaacgtggtcccaattcgttggcaaattccggatcagactttgggggggggggtctggggctaccgttacgcctattgagggtatcggtcggcactcagacctcccgctccgactgggtagacctggtgtcctggagccacccaggacccacgtctaagtcccagcaggttgacctggtgtctttatttcctaaacaccgggttgacctgttatccaaaaacgaccaggtagacctggtggctcaatttttaccatctaaatttccccccaatttggcagaaaatgatttggctttgctggtgaacttagagttctacagatcggatttgcatgtgtatgagtgtgttcattttgctgcacattgggagggattaagtggtttgcctgaggtgtatgaacaacttgcaccacaaccgtgtgtgggagaaactttacattctagcctcccacgagacagtgaactgtttgtgcctgaagaggggagcagcgagaaggagagcgaggacgcgccaaaaacatctcctccgacgcctgggaaacatggtttggaacagactggggaggaaaaagtgatggtgactgttcctgacaaaaatccaccttgtccttgctgtggtacccgggtaaactctgtgttgaatctgattgaacatctgaaagtgtcacacgggaaaaggggggtttgttttcggtgtgcaaaatgtggaaaggaaaatagtaactatcacagtgttgtttgtcattttaagaaatgcaggggtccagagacggagaaagccccagctggggagtggatttgtgaggtatgcaacagagattttacaaccaaaattggcctgggacaacacaagagattggcacacccagcagtgagaaatcaggaaaggatcgttgcttcccaaccgaaagaaacatcaaatagaggtgctcacaaaaggtgctggacaaaggaggaggaagaattactaataagactggaggctcagttcgagggaaacaaaaatattaataagcttattgcagaacacataaccaccaaaacagctaagcagatcagtgacaaaaggcgattgctgtccagaaagccagcagaggagccacgtatggagcctggaacgtgtcatcacaccaggagagcagctgcgagcctgagaacggagcctgagatgagtcatcacgcccaggcagaggacagagataatggacctgggagacgccctctgccaggcagggcagctgccggagggagaacaatggacgagataagacgccaccctgataagggcaacggacagcagagacccaccaagcaaaaatcagaagaacagctgcaggcttactataaaaagacactagaggaacgactttcagctggggcacttaacaccttcccccgagcattcaagcaggtaatggaaggccgggatataaagctagtaatcaatcagacagcgcaggactacttcggatgcctggaatccataagccaaataagaacggcaacccgagataaaaaggacacggtgacccgggagaaacacccaaagaaaccttttcagaagtggatgaagaagagagcaatcaaaaaaggtaattatcttcggttccagcgtttattttatcttgatagagggaaactggctaaaatcattttagatgatattgaatgcttgtcttgtgacataccactcagtgaaatttattcggtttttaaaacaagatgggaaacaactggtagctttaaaagccttggggactttaaaacttacgggaaggctgacaacactgccttcagagaattaattacggctaaagaaattgagaaaaatgtgcaggaaatgagcaaaggctcggctcccggtccagacgggattactcttggggacgtcgtaaagatggatcccgagttttcccggaccatggagattttcaatttatggttaacaactggtaaaatcccggacatggtgagggggtgcagaaccgttttgattccaaaatcatcagacccggatcgtttgaaagacattaataactggagacctatcacgatcggttccatcttgctgagactgttctccaggattgtaacagctaggctgagcaaagcgtgccccctgaacccaaggcaaagaggctttatcagagcggcgggatgctctgaaaacttaaaactcctgcaaactataatttggtcggccaaaagagaacacagaccactgggtgttgtattcgtggacatcgccaaggcttttgacaccgtaagccaccagcacatcattcatgctttgcagcaaagagaggtggatccccacatcgtcggtctggtgagcaatatgtacgagaacatcagtacgtatatcaccacaaagaggaacacacacacagacaaaatccagatccgggttggagtaaagcagggtgacccgatgtcgccccttttatttaacctggcaatggaccctctattatgcaagctggaagagagtggcaaaggataccaccgaggacagagcagcatcacagcgatggcatttgcagacgatctggttttgctgagcgactcctgggaaaatatgaatacaaatattagcatactggagaccttctgcaatctgaccggactcaaaacacaggggcaaaagtgccacggcttttacatcaagccgacaaagaagtcttacaccatcaatgactgcgctgcctggactatcaacggcacacccctgaacatgatcgaccccggcgaatctgagaaatacctcggcctgcagtttgacccgtggattggaatagcaaggtccggtctctccacaaaactagatttttggcttcagcggatcgatcaagcaccacttaaacctctgcagaaaactgatattctcaaaacatacaccatccctcggctgatctacatagctgaccactcagaagtgaaaactgcactactcgaaacccttgaccagaagatccggacagcggtcaaggaatggcttcacctacctccgtgcacctgcgatgccatcctgtactcgagcacgagagacggcggtttgggcatcaccaaattggcaggactgatccccagcgtgcaggcccgtagactgcatcggatcgcacagtcatctgacgatacgatgaaatgcttcatggaaaaagagaaaatggaacagctgcataagaaattgtggattcaagctggaggggacagagagaacataccctcgatttgggaagcaccaccgtcgagtgaaccaccaaacaacgtgagcacaaattcggaatgggaagcaccgacccagaaagataaatttccaaagccttgcaattggaggaaaaacgaattcaaaaaatggaccaaattggcatcccaaggccgcggaattgtaaattttgaaagagacaaaattagtaaccattggatccaatactacagacgcatacctcacaggaaactcctcactgcactacaactcagggccaacgtttaccccacgagagaatttctagccaggggtagacaagaccaatacatcaaggcgtgtaggcactgcgatgcggacaacgaatcctgcgcccacatcatcggcaactgcccagtgacacaggacgcccgaatcaagaggcacaattacatctgcgaactgcttctcgaggaggcgaagaagaaggactgggtagtgttcaaggaaccgcacataagggattccaacaaggaactgtacaaacctgacctgatatttgtgaaggatgcccgtgcacttgtcgtggatgtgacagtacggtatgaagcagccaaatcatcgctggaggaagccgctgcagagaaagtgagaaagtacaaacacctggaaacggaagtaagacatctcacgaatgcaaaggacgttacttttgtgggctttcccctaggagcgcgggggaaatggcaccaagataactttaaacttttgactgagcttggcctctccaaatcgaggcaagtgaaaatggcagagactttttccacagtagcgctcttttcatctgtggacattgtacatatgtttgccagtagggccagaaaatctatggttatgtgataataggctgccttctgcggggcttgccttctggccatgcccttcttctctcccttgcacctgtacctcttggtctttgaataaagcctgagtaggaaggaccggtagacatgataagatacattgatgagtttggacaaaccacaactagaatgcagtgaaaaaaatgctttatttgtgaaatttgtgatgctattgctttatttgtaaccattataagctgcaataaacaagttaacaacaacaaaaaaaaaaaaaaaaaaaaaaaaaaaaaaacgttgactaaaaaaaaaaaaaaaaaaaaaaaaaaaaaaaaaaaaaaaaaaaaaaaaaaaaaaaaaaaaaaaaaaaaaa

SEQ ID NO: 11543 - DNA, 4703 bp, synthetic construct
  source 1..4703: mol_type = other DNA
ggtctagttacaactgggcatcgctgcagagatcgcacctcctcgtggtcccgctggtagcccttcgaagggtgactaagtcgatctctgccccaggtacggagccgttgggactcaccagtccaacgtaactcctgcctaaattcggtgaaacaaattcctcggtaaaaagccccatggcttcttgcccgaaacctggccccccggtttcagcaggggcaatgagtttggaaagtggactgaccacccactccgttctcgccatcgaacgtggtcccaattcgttggcaaattccggatcagactttgggggggggggtctggggctaccgttacgcctattgagggtatcggtcggcactcagacctcccgctccgactgggtagacctggtgtcctggagccacccaggacccacgtctaagtcccagcaggttgacctggtgtctttatttcctaaacaccgggttgacctgttatccaaaaacgaccaggtagacctggtggctcaatttttaccatctaaatttccccccaatttggcagaaaatgatttggctttgctggtgaacttagagttctacagatcggatttgcatgtgtatgagtgtgttcattttgctgcacattgggagggattaagtggtttgcctgaggtgtatgaacaacttgcaccacaaccgtgtgtgggagaaactttacattctagcctcccacgagacagtgaactgtttgtgcctgaagaggggagcagcgagaaggagagcgaggacgcgccaaaaacatctcctccgacgcctgggaaacatggtttggaacagactggggaggaaaaagtgatggtgactgttcctgacaaaaatccaccttgtccttgctgtggtacccgggtaaactctgtgttgaatctgattgaacatctgaaagtgtcacacgggaaaaggggggtttgttttcggtgtgcaaaatgtggaaaggaaaatagtaactatcacagtgttgtttgtcattttaagaaatgcaggggtccagagacggagaaagccccagctggggagtggatttgtgaggtatgcaacagagattttacaaccaaaattggcctgggacaacacaagagattgtggcacccagcagtgagaaatcaggaaaggatcgttgcttcccaaccgaaagaaacatcaaatagaggtgctcacaaaaggtgctggacaaaggaggagagggaattactaataagactggaggctcagttcgagggaaacaaaaatattaataagcttattgcagaacacataaccaccaaaacagctaagcagatcagtgacaaaaggcgattgctgtccagaaagccagcagaggagccacgtatggagcctggaacgtgtcatcacaccaggagagcagctgcgagcctgagaacggagcctgagatgagtcatcacgcccaggcagaggacagagataatggacctgggagacgccctctgccaggcagggcagctgccggagggagaacaatggacgagataagacgccaccctgataagggcaacggacagcagagacccaccaagcaaaaatcagaagaacagctgcaggcttactataaaaagacactagaggaacgactttcagctggggcacttaacaccttcccccgagcattcaagcaggtaatggaaggccgggatataaagctagtaatcaatcagacagcgcaggactgcttcggatgcctggaatccataagccaaataagaacggcaacccgagataaaaaggacacggtgacccgggagaaacacccaaagaaaccttttcagaagtggatgaagaagagagcaatcaaaaaaggtaattatcttcggttccagcgtttattttatcttgatagagggaaactggctaaaatcattttagatgatattgaatgcttgtcttgtgacataccactcagtgaaatttattcggtttttaaaacaagatgggaaacaactggtagctttaaaagccttggggactttaaaacttacgggaaggctgacaacactgccttcagagaattaattacggctaaagaaattgagaaaaatgtgcaggaaatgagcaaaggctcggctcccggtccagacgggattactcttggggacgtcgtaaagatggatcccgagttttcccggaccatggagattttcaatttatggttaacaactggtaaaatcccggacatggtgagggggtgcagaaccgttttgattccaaaatcatcaaagccggatcgtttgaaagacattaataactggagacctatcacgatcggttccatcttgctgagactgttctccaggattgtaacagctaggctgagcaaagcgtgccccctgaacccaaggcaaagaggctttatcagagcggcgggatgctctgaaaacttaaaactcctgcaaactataatttggtcggccaaaagagaacacagaccactgggtgttgtattcgtggacatcgccaaggcttttgacaccgtaagccaccagcacatcattcatgctttgcagcaaagagaggtggatccccacatcgtcggtctggtgagcaatatgtacgagaacatcagtacgtatatcaccacaaagaggaacacacacacagacaaaatccagatccgggttggagtaaagcagggtgacccgatgtcgccccttttatttaacctggcaatggaccctctattatgcaagctggaagagagtggcaaaggataccaccgaggacagagcagcatcacagcgatggcatttgcagacgatctggttttgctgagcgactcctgggaaaatatgaatacaaatattagcatactggagaccttctgcaatctgaccggactcaaaacacaggggcaaaagtgccacggcttttacatcaagccgacaaagaagtcttacaccatcaatgactgcgctgcctggactatcaacggcacacccctgaacatgatcgaccccggcgaatctgagaaatacctcggcctgcagtttgacccgtggattggaatagcaaggtccggtctctccacaaaactagatttttggcttcagcggatcgatcaagcaccacttaaacctctgcagaaaactgatattctcaaaacatacaccatccctcggctgatctacatagctgaccactcagaagtgaaaactgcactactcgaaacccttgaccagaagatccggacagcggtcaaggaatggcttcacctacctccgtgcacctgcgatgccatcctgtactcgagcacgagagacggcggtttgggcatcaccaaattggcaggactgatccccagcgtgcaggcccgtagactgcatcggatcgcacagtcatctgacgatacgatgaaatgcttcatggaaaaagagaaaatggaacagctgcataagaaattgtggattcaagctggaggggacagagagaacataccctcgatttgggaagcaccaccgtcgagtgaaccaccaaacaacgtgagcacaaattcggaatgggaagcaccgacccagaaagataaatttccaaagccttgcaattggaggaaaaacgaattcaaaaaatggaccaaattggcatcccaaggccgcggaattgtaaattttgaaagagacaaaattagtaaccattggatccaatactacagacgcatacctcacaggaaactcctcactgcactacaactcagggccaacgtttaccccacgagagaatttctagccaggggtagacaagaccaatacatcaaggcgtgtaggcactgcgatgcggacaacgaatcctgcgcccacatcatcggcaactgcccagtgacacaggacgcccgaatcaagaggcacaattacatctgcgaactgcttctcgaggaggcgaagaagaaggactgggtagtgttcaaggaaccgcacataagggattccaacaaggaactgtacaaacctgacctgatatttgtgaaggatgcccgtgcacttgtcgtggatgtgacagtacggtatgaagcagccaaatcatcgctggaggaagccgctgcagagaaagtgagaaagtacaaacacctggaaacggaagtaagacatctcacgaatgcaaaggacgttacttttgtgggctttcccctaggagcgcgggggaaatggcaccaagataactttaaacttttgactgagcttggcctctccaaatcgaggcaagtgaaaatggcagagactttttccacagtagcgctcttttcatctgtggacattgtacatatgtttgccagtagggccagaaaatctatggttatgtgataataggctgccttctgcggggcttgccttctggccatgcccttcttctctcccttgcacctgtacctcttggtctttgaataaagcctgagtaggaaggaccggtagacatgataagatacattgatgagtttggacaaaccacaactagaatgcagtgaaaaaaatgctttatttgtgaaatttgtgatgctattgctttatttgtaaccattataagctgcaataaacaagttaacaacaacaaaaaaaaaaaaaaaaaaaaaaaaaaaaaaacgttgactaaaaaaaaaaaaaaaaaaaaaaaaaaaaaaaaaaaaaaaaaaaaaaaaaaaaaaaaaaaaaaaaaaaaaa

SEQ ID NO: 11544 - DNA, 4703 bp, synthetic construct
  source 1..4703: mol_type = other DNA
ggtctagttacaactgggcatcgctgcagagatcgcacctcctcgtggtcccgctggtagcccttcgaagggtgactaagtcgatctctgccccaggtacggagccgttgggactcaccagtccaacgtaactcctgcctaaattcggtgaaacaaattcctcggtaaaaagccccatggcttcttgcccgaaacctggccccccggtttcagcaggggcaatgagtttggaaagtggactgaccacccactccgttctcgccatcgaacgtggtcccaattcgttggcaaattccggatcagactttgggggggggggtctggggctaccgttacgcctattgagggtatcggtcggcactcagacctcccgctccgactgggtagacctggtgtcctggagccacccaggacccacgtctaagtcccagcaggttgacctggtgtctttatttcctaaacaccgggttgacctgttatccaaaaacgaccaggtagacctggtggctcaatttttaccatctaaatttccccccaatttggcagaaaatgatttggctttgctggtgaacttagagttctacagatcggatttgcatgtgtatgagtgtgttcattttgctgcacattgggagggattaagtggtttgcctgaggtgtatgaacaacttgcaccacaaccgtgtgtgggagaaactttacattctagcctcccacgagacagtgaactgtttgtgcctgaagaggggagcagcgagaaggagagcgaggacgcgccaaaaacatctcctccgacgcctgggaaacatggtttggaacagactggggaggaaaaagtgatggtgactgttcctgacaaaaatccaccttgtccttgctgtggtacccgggtaaactctgtgttgaatctgattgaacatctgaaagtgtcacacgggaaaaggggggtttgttttcggtgtgcaaaatgtggaaaggaaaatagtaactatcacagtgttgtttgtcattttaagaaatgcaggggtccagagacggagaaagccccagctggggagtggatttgtgaggtatgcaacagagattttacaaccaaaattggcctgggacaacacaagagattgtggcacccagcagtgagaaatcaggaaaggatcgttgcttcccaaccgaaagaaacatcaaatagaggtgctcacaaaaggtgctggacaaaggaggagagggaattactaataagactggaggctcagttcgagggaaacaaaaatattaataagcttattgcagaacacataaccaccaaaacagctaagcagatcagtgacaaaaggcgattgctgtccagaaagccagcagaggagccacgtatgatgcctggaacgtgtcatcacaccaggagagcagctgcgagcctgagaacggagcctgagatgagtcatcacgcccaggcagaggacagagataatggacctgggagacgccctctgccaggcagggcagctgccggagggagaacaatggacgagataagacgccaccctgataagggcaacggacagcagagacccaccaagcaaaaatcagaagaacagctgcaggcttactataaaaagacactagaggaacgactttcagctggggcacttaacaccttcccccgagcattcaagcaggtaatggaaggccgggatataaagctagtaatcaatcagacagcgcaggactgcttcggatgcctggaatccataagccaaataagaacggcaacccgagataaaaaggacacggtgacccgggagaaacacccaaagaaaccttttcagaagtggatgaagaagagagcaatcaaaaaaggtaattatcttcggttccagcgtttattttatcttgatagagggaaactggctaaaatcattttagatgatattgaatgcttgtcttgtgacataccactcagtgaaatttattcggtttttaaaacaagatgggaaacaactggtagctttaaaagccttggggactttaaaacttacgggaaggctgacaacactgccttcagagaattaattacggctaaagaaattgagaaaaatgtgcaggaaatgagcaaaggctcggctcccggtccagacgggattactcttggggacgtcgtaaagatggatcccgagttttcccggaccatggagattttcaatttatggttaacaactggtaaaatcccggacatggtgagggggtgcagaaccgttttgattccaaaatcatcaaagccggatcgtttgaaagacattaataactggagacctatcacgatcggttccatcttgctgagactgttctccaggattgtaacagctaggctgagcaaagcgtgccccctgaacccaaggcaaagaggctttatcagagcggcgggatgctctgaaaacttaaaactcctgcaaactataatttggtcggccaaaagagaacacagaccactgggtgttgtattcgtggacatcgccaaggcttttgacaccgtaagccaccagcacatcattcatgctttgcagcaaagagaggtggatccccacatcgtcggtctggtgagcaatatgtacgagaacatcagtacgtatatcaccacaaagaggaacacacacacagacaaaatccagatccgggttggagtaaagcagggtgacccgatgtcgccccttttatttaacctggcaatggaccctctattatgcaagctggaagagagtggcaaaggataccaccgaggacagagcagcatcacagcgatggcatttgcagacgatctggttttgctgagcgactcctgggaaaatatgaatacaaatattagcatactggagaccttctgcaatctgaccggactcaaaacacaggggcaaaagtgccacggcttttacatcaagccgacaaagaagtcttacaccatcaatgactgcgctgcctggactatcaacggcacacccctgaacatgatcgaccccggcgaatctgagaaatacctcggcctgcagtttgacccgtggattggaatagcaaggtccggtctctccacaaaactagatttttggcttcagcggatcgatcaagcaccacttaaacctctgcagaaaactgatattctcaaaacatacaccatccctcggctgatctacatagctgaccactcagaagtgaaaactgcactactcgaaacccttgaccagaagatccggacagcggtcaaggaatggcttcacctacctccgtgcacctgcgatgccatcctgtactcgagcacgagagacggcggtttgggcatcaccaaattggcaggactgatccccagcgtgcaggcccgtagactgcatcggatcgcacagtcatctgacgatacgatgaaatgcttcatggaaaaagagaaaatggaacagctgcataagaaattgtggattcaagctggaggggacagagagaacataccctcgatttgggaagcaccaccgtcgagtgaaccaccaaacaacgtgagcacaaattcggaatgggaagcaccgacccagaaagataaatttccaaagccttgcaattggaggaaaaacgaattcaaaaaatggaccaaattggcatcccaaggccgcggaattgtaaattttgaaagagacaaaattagtaaccattggatccaatactacagacgcatacctcacaggaaactcctcactgcactacaactcagggccaacgtttaccccacgagagaatttctagccaggggtagacaagaccaatacatcaaggcgtgtaggcactgcgatgcggacaacgaatcctgcgcccacatcatcggcaactgcccagtgacacaggacgcccgaatcaagaggcacaattacatctgcgaactgcttctcgaggaggcgaagaagaaggactgggtagtgttcaaggaaccgcacataagggattccaacaaggaactgtacaaacctgacctgatatttgtgaaggatgcccgtgcacttgtcgtggatgtgacagtacggtatgaagcagccaaatcatcgctggaggaagccgctgcagagaaagtgagaaagtacaaacacctggaaacggaagtaagacatctcacgaatgcaaaggacgttacttttgtgggctttcccctaggagcgcgggggaaatggcaccaagataactttaaacttttgactgagcttggcctctccaaatcgaggcaagtgaaaatggcagagactttttccacagtagcgctcttttcatctgtggacattgtacatatgtttgccagtagggccagaaaatctatggttatgtgataataggctgccttctgcggggcttgccttctggccatgcccttcttctctcccttgcacctgtacctcttggtctttgaataaagcctgagtaggaaggaccggtagacatgataagatacattgatgagtttggacaaaccacaactagaatgcagtgaaaaaaatgctttatttgtgaaatttgtgatgctattgctttatttgtaaccattataagctgcaataaacaagttaacaacaacaaaaaaaaaaaaaaaaaaaaaaaaaaaaaaacgttgactaaaaaaaaaaaaaaaaaaaaaaaaaaaaaaaaaaaaaaaaaaaaaaaaaaaaaaaaaaaaaaaaaaaaaa

SEQ ID NO: 11545 - DNA, 4703 bp, synthetic construct
  source 1..4703: mol_type = other DNA
ggtctagttacaactgggcatcgctgcagagatcgcacctcctcgtggtcccgctggtagcccttcgaagggtgactaagtcgatctctgccccaggtacggagccgttgggactcaccagtccaacgtaactcctgcctaaattcggtgaaacaaattcctcggtaaaaagccccatggcttcttgcccgaaacctggccccccggtttcagcaggggcaatgagtttggaaagtggactgaccacccactccgttctcgccatcgaacgtggtcccaattcgttggcaaattccggatcagactttgggggggggggtctggggctaccgttacgcctattgagggtatcggtcggcactcagacctcccgctccgactgggtagacctggtgtcctggagccacccaggacccacgtctaagtcccagcaggttgacctggtgtctttatttcctaaacaccgggttgacctgttatccaaaaacgaccaggtagacctggtggctcaatttttaccatctaaatttccccccaatttggcagaaaatgatttggctttgctggtgaacttagagttctacagatcggatttgcatgtgtatgagtgtgttcattttgctgcacattgggagggattaagtggtttgcctgaggtgtatgaacaacttgcaccacaaccgtgtgtgggagaaactttacattctagcctcccacgagacagtgaactgtttgtgcctgaagaggggagcagcgagaaggagagcgaggacgcgccaaaaacatctcctccgacgcctgggaaacatggtttggaacagactggggaggaaaaagtgatggtgactgttcctgacaaaaatccaccttgtccttgctgtggtacccgggtaaactctgtgttgaatctgattgaacatctgaaagtgtcacacgggaaaaggggggtttgttttcggtgtgcaaaatgtggaaaggaaaatagtaactatcacagtgttgtttgtcattttaagaaatgcaggggtccagagacggagaaagccccagctggggagtggatttgtgaggtatgcaacagagattttacaaccaaaattggcctgggacaacacaagagattgtggcacccagcagtgagaaatcaggaaaggatcgttgcttcccaaccgaaagaaacatcaaatagaggtgctcacaaaaggtgctggacaaaggaggagagggaattactaataagactggaggctcagttcgagggaaacaaaaatattaataagcttattgcagaacacataaccaccaaaacagctaagcagatcagtgacaaaaggcgattgctgtccagaaagccagcagaggagccacgtatgatgcctggaacgtgtcatcacaccaggagagcagctgcgagcctgagaacggagcctgagatgagtcatcacgcccaggcagaggacagagataatggacctgggagacgccctctgccaggcagggcagctgccggagggagaacaatggacgagataagacgccaccctgataagggcaacggacagcagagacccaccaagcaaaaatcagaagaacagctgcaggcttactataaaaagacactagaggaacgactttcagctggggcacttaacaccttcccccgagcattcaagcaggtaatggaaggccgggatataaagctagtaatcaatcagacagcgcaggactgcttcggatgcctggaatccataagccaaataagaacggcaacccgagataaaaaggacacggtgacccgggagaaacacccaaagaaaccttttcagaagtggatgaagaagagagcaatcaaaaaaggtaattatcttcggttccagcgtttattttatcttgatagagggaaactggctaaaatcattttagatgatattgaatgcttgtcttgtgacataccactcagtgaaatttattcggtttttaaaacaagatgggaaacaactggtagctttaaaagccttggggactttaaaacttacgggaaggctgacaacactgccttcagagaattaattacggctaaagaaattgagaaaaatgtgcaggaaatgagcaaaggctcggctcccggtccagacgggattactcttggggacgtcgtaaagatggatcccgagggctcccggaccatggagattttcaatttatggttaacaactggtaaaatcccggacatggtgagggggtgcagaaccgttttgattccaaaatcatcaaagccggatcgtttgaaagacattaataactggagacctatcacgatcggttccatcttgctgagactgttctccaggattgtaacagctaggctgagcaaagcgtgccccctgaacccaaggcaaagaggctttatcagagcggcgggatgctctgaaaacttaaaactcctgcaaactataatttggtcggccaaaagagaacacagaccactgggtgttgtattcgtggacatcgccaaggcttttgacaccgtaagccaccagcacatcattcatgctttgcagcaaagagaggtggatccccacatcgtcggtctggtgagcaatatgtacgagaacatcagtacgtatatcaccacaaagaggaacacacacacagacaaaatccagatccgggttggagtaaagcagggtgacccgatgtcgccccttttatttaacctggcaatggaccctctattatgcaagctggaagagagtggcaaaggataccaccgaggacagagcagcatcacagcgatggcatttgcagacgatctggttttgctgagcgactcctgggaaaatatgaatacaaatattagcatactggagaccttctgcaatctgaccggactcaaaacacaggggcaaaagtgccacggcttttacatcaagccgacaaagaagtcttacaccatcaatgactgcgctgcctggactatcaacggcacacccctgaacatgatcgaccccggcgaatctgagaaatacctcggcctgcagtttgacccgtggattggaatagcaaggtccggtctctccacaaaactagatttttggcttcagcggatcgatcaagcaccacttaaacctctgcagaaaactgatattctcaaaacatacaccatccctcggctgatctacatagctgaccactcagaagtgaaaactgcactactcgaaacccttgaccagaagatccggacagcggtcaaggaatggcttcacctacctccgtgcacctgcgatgccatcctgtactcgagcacgagagacggcggtttgggcatcaccaaattggcaggactgatccccagcgtgcaggcccgtagactgcatcggatcgcacagtcatctgacgatacgatgaaatgcttcatggaaaaagagaaaatggaacagctgcataagaaattgtggattcaagctggaggggacagagagaacataccctcgatttgggaagcaccaccgtcgagtgaaccaccaaacaacgtgagcacaaattcggaatgggaagcaccgacccagaaagataaatttccaaagccttgcaattggaggaaaaacgaattcaaaaaatggaccaaattggcatcccaaggccgcggaattgtaaattttgaaagagacaaaattagtaaccattggatccaatactacagacgcatacctcacaggaaactcctcactgcactacaactcagggccaacgtttaccccacgagagaatttctagccaggggtagacaagaccaatacatcaaggcgtgtaggcactgcgatgcggacaacgaatcctgcgcccacatcatcggcaactgcccagtgacacaggacgcccgaatcaagaggcacaattacatctgcgaactgcttctcgaggaggcgaagaagaaggactgggtagtgttcaaggaaccgcacataagggattccaacaaggaactgtacaaacctgacctgatatttgtgaaggatgcccgtgcacttgtcgtggatgtgacagtacggtatgaagcagccaaatcatcgctggaggaagccgctgcagagaaagtgagaaagtacaaacacctggaaacggaagtaagacatctcacgaatgcaaaggacgttacttttgtgggctttcccctaggagcgcgggggaaatggcaccaagataactttaaacttttgactgagcttggcctctccaaatcgaggcaagtgaaaatggcagagactttttccacagtagcgctcttttcatctgtggacattgtacatatgtttgccagtagggccagaaaatctatggttatgtgataataggctgccttctgcggggcttgccttctggccatgcccttcttctctcccttgcacctgtacctcttggtctttgaataaagcctgagtaggaaggaccggtagacatgataagatacattgatgagtttggacaaaccacaactagaatgcagtgaaaaaaatgctttatttgtgaaatttgtgatgctattgctttatttgtaaccattataagctgcaataaacaagttaacaacaacaaaaaaaaaaaaaaaaaaaaaaaaaaaaaaacgttgactaaaaaaaaaaaaaaaaaaaaaaaaaaaaaaaaaaaaaaaaaaaaaaaaaaaaaaaaaaaaaaaaaaaaaa

SEQ ID NO: 11546 - DNA, 4703 bp, synthetic construct
  source 1..4703: mol_type = other DNA
ggtctagttacaactgggcatcgctgcagagatcgcacctcctcgtggtcccgctggtagcccttcgaagggtgactaagtcgatctctgccccaggtacggagccgttgggactcaccagtccaacgtaactcctgcctaaattcggtgaaacaaattcctcggtaaaaagccccatggcttcttgcccgaaacctggccccccggtttcagcaggggcaatgagtttggaaagtggactgaccacccactccgttctcgccatcgaacgtggtcccaattcgttggcaaattccggatcagactttgggggggggggtctggggctaccgttacgcctattgagggtatcggtcggcactcagacctcccgctccgactgggtagacctggtgtcctggagccacccaggacccacgtctaagtcccagcaggttgacctggtgtctttatttcctaaacaccgggttgacctgttatccaaaaacgaccaggtagacctggtggctcaatttttaccatctaaatttccccccaatttggcagaaaatgatttggctttgctggtgaacttagagttctacagatcggatttgcatgtgtatgagtgtgttcattttgctgcacattgggagggattaagtggtttgcctgaggtgtatgaacaacttgcaccacaaccgtgtgtgggagaaactttacattctagcctcccacgagacagtgaactgtttgtgcctgaagaggggagcagcgagaaggagagcgaggacgcgccaaaaacatctcctccgacgcctgggaaacatggtttggaacagactggggaggaaaaagtgatggtgactgttcctgacaaaaatccaccttgtccttgctgtggtacccgggtaaactctgtgttgaatctgattgaacatctgaaagtgtcacacgggaaaaggggggtttgttttcggtgtgcaaaatgtggaaaggaaaatagtaactatcacagtgttgtttgtcattttaagaaatgcaggggtccagagacggagaaagccccagctggggagtggatttgtgaggtatgcaacagagattttacaaccaaaattggcctgggacaacacaagagattgtggcacccagcagtgagaaatcaggaaaggatcgttgcttcccaaccgaaagaaacatcaaatagaggtgctcacaaaaggtgctggacaaaggaggagagggaattactaataagactggaggctcagttcgagggaaacaaaaatattaataagcttattgcagaacacataaccaccaaaacagctaagcagatcagtgacaaaaggcgattgctgtccagaaagccagcagaggagccacgtatgatgcctggaacgtgtcatcacaccaggagagcagctgcgagcctgagaacggagcctgagatgagtcatcacgcccaggcagaggacagagataatggacctgggagacgccctctgccaggcagggcagctgccggagggagaacaatggacgagataagacgccaccctgataagggcaacggacagcagagacccaccaagcaaaaatcagaagaacagctgcaggcttactataaaaagacactagaggaacgactttcagctggggcacttaacaccttcccccgagcattcaagcaggtaatggaaggccgggatataaagctagtaatcaatcagacagcgcaggactgcttcggatgcctggaatccataagccaaataagaacggcaacccgagataaaaaggacacggtgacccgggagaaacacccaaagaaaccttttcagaagtggatgaagaagagagcaatcaaaaaaggtaattatcttcggttccagcgtttattttatcttgatagagggaaactggctaaaatcattttagatgatattgaatgcttgtcttgtgacataccactcagtgaaatttattcggtttttaaaacaagatgggaaacaactggtagctttaaaagccttggggactttaaaacttacgggaaggctgacaacactgccttcagagaattaattacggctaaagaaattgagaaaaatgtgcaggaaatgagcaaaggctcggctcccggtccagacgggattactcttggggacgtcgtaaagatggatcccgagttttcccggaccatggagattttcaatttatggttaacaactggtaaaatcccggacatggtgagggggtgcagaaccgttttgattccaaaatcatcagacccggatcgtttgaaagacattaataactggagacctatcacgatcggttccatcttgctgagactgttctccaggattgtaacagctaggctgagcaaagcgtgccccctgaacccaaggcaaagaggctttatcagagcggcgggatgctctgaaaacttaaaactcctgcaaactataatttggtcggccaaaagagaacacagaccactgggtgttgtattcgtggacatcgccaaggcttttgacaccgtaagccaccagcacatcattcatgctttgcagcaaagagaggtggatccccacatcgtcggtctggtgagcaatatgtacgagaacatcagtacgtatatcaccacaaagaggaacacacacacagacaaaatccagatccgggttggagtaaagcagggtgacccgatgtcgccccttttatttaacctggcaatggaccctctattatgcaagctggaagagagtggcaaaggataccaccgaggacagagcagcatcacagcgatggcatttgcagacgatctggttttgctgagcgactcctgggaaaatatgaatacaaatattagcatactggagaccttctgcaatctgaccggactcaaaacacaggggcaaaagtgccacggcttttacatcaagccgacaaagaagtcttacaccatcaatgactgcgctgcctggactatcaacggcacacccctgaacatgatcgaccccggcgaatctgagaaatacctcggcctgcagtttgacccgtggattggaatagcaaggtccggtctctccacaaaactagatttttggcttcagcggatcgatcaagcaccacttaaacctctgcagaaaactgatattctcaaaacatacaccatccctcggctgatctacatagctgaccactcagaagtgaaaactgcactactcgaaacccttgaccagaagatccggacagcggtcaaggaatggcttcacctacctccgtgcacctgcgatgccatcctgtactcgagcacgagagacggcggtttgggcatcaccaaattggcaggactgatccccagcgtgcaggcccgtagactgcatcggatcgcacagtcatctgacgatacgatgaaatgcttcatggaaaaagagaaaatggaacagctgcataagaaattgtggattcaagctggaggggacagagagaacataccctcgatttgggaagcaccaccgtcgagtgaaccaccaaacaacgtgagcacaaattcggaatgggaagcaccgacccagaaagataaatttccaaagccttgcaattggaggaaaaacgaattcaaaaaatggaccaaattggcatcccaaggccgcggaattgtaaattttgaaagagacaaaattagtaaccattggatccaatactacagacgcatacctcacaggaaactcctcactgcactacaactcagggccaacgtttaccccacgagagaatttctagccaggggtagacaagaccaatacatcaaggcgtgtaggcactgcgatgcggacaacgaatcctgcgcccacatcatcggcaactgcccagtgacacaggacgcccgaatcaagaggcacaattacatctgcgaactgcttctcgaggaggcgaagaagaaggactgggtagtgttcaaggaaccgcacataagggattccaacaaggaactgtacaaacctgacctgatatttgtgaaggatgcccgtgcacttgtcgtggatgtgacagtacggtatgaagcagccaaatcatcgctggaggaagccgctgcagagaaagtgagaaagtacaaacacctggaaacggaagtaagacatctcacgaatgcaaaggacgttacttttgtgggctttcccctaggagcgcgggggaaatggcaccaagataactttaaacttttgactgagcttggcctctccaaatcgaggcaagtgaaaatggcagagactttttccacagtagcgctcttttcatctgtggacattgtacatatgtttgccagtagggccagaaaatctatggttatgtgataataggctgccttctgcggggcttgccttctggccatgcccttcttctctcccttgcacctgtacctcttggtctttgaataaagcctgagtaggaaggaccggtagacatgataagatacattgatgagtttggacaaaccacaactagaatgcagtgaaaaaaatgctttatttgtgaaatttgtgatgctattgctttatttgtaaccattataagctgcaataaacaagttaacaacaacaaaaaaaaaaaaaaaaaaaaaaaaaaaaaaacgttgactaaaaaaaaaaaaaaaaaaaaaaaaaaaaaaaaaaaaaaaaaaaaaaaaaaaaaaaaaaaaaaaaaaaaaa

SEQ ID NO: 11547 - skipped

SEQ ID NO: 11548 - DNA, 4564 bp, synthetic construct
  source 1..4564: mol_type = other DNA
ggtctagttacaactgggcatcgctgcagagatcgcacctcctcgtggtcccgctggtagcccttcgaagggtgactaagtcgatctctgccccaggtacggagccgttgggactcaccagtccaacgtaactcctgcctaaattcggtgaaacaaattcctcggtaaaaagccccatggcttcttgcccgaaacctggccccccggtttcagcaggggcaatgagtttggaaagtggactgaccacccactccgttctcgccatcgaacgtggtcccaattcgttggcaaattccggatcagactttgggggggggggtctggggctaccgttacgcctattgagggtatcggtcggcactcagacctcccgctccgactgggtagacctggtgtcctggagccacccaggacccacgtctaagtcccagcaggttgacctggtgtctttatttcctaaacaccgggttgacctgttatccaaaaacgaccaggtagacctggtggctcaatttttaccatctaaatttccccccaatttggcagaaaatgatttggctttgctggtgaacttagagttctacagatcggatttgcatgtgtatgagtgtgttcattttgctgcacattgggagggattaagtggtttgcctgaggtgtatgaacaacttgcaccacaaccgtgtgtgggagaaactttacattctagcctcccacgagacagtgaactgtttgtgcctgaagaggggagcagcgagaaggagagcgaggacgcgccaaaaacatctcctccgacgcctgggaaacatggtttggaacagactggggaggaaaaagtgatggtgactgttcctgacaaaaatccaccttgtccttgctgtggtacccgggtaaactctgtgttgaatctgattgaacatctgaaagtgtcacacgggaaaaggggggtttgttttcggtgtgcaaaatgtggaaaggaaaatagtaactatcacagtgttgtttgtcattttccaaaatgcaggggtccagagacggagaaagccccagctggggagtggatttgtgaggtatgcaacagagattttacaaccaaaattggcctgggacaacacaagagattggcacacccagcagtgagaaatcaggaaaggatcgttgcttcccaaccgaaagaaacatcaaatagaggtgctcacaaaaggtgctggacaaaggaggaggaagaattactaataagactggaggctcagttcgagggaaacaaaaatattaataagcttattgcagaacacataaccaccaaaacagctaagcagatcagtgacaaaaggcgattgctgtccagaaagccagcagaggagccacgtgaggagcctggaacgtgtcatcacaccaggagagcagctgcgagcctgagaacggagcctgagatgagtcatcacgcccaggcagaggacagagataatggacctgggagacgccctctgccaggcagggcagctgccggagggagaacaatggacgagataagacgccaccctgataagggcaacggacagcagagacccaccaagcaaaaatcagaagaacagctgcaggcttactataaaaagacactagaggaacgactttcagctggggcacttaacaccttcccccgagcattcaagcaggtaatggaaggccgggatataaagctagtaatcaatcagacagcgcaggactgcttcggatgcctggaatccataagccaaataagaacggcaacccgagataaaaaggacacggtgacccggaagaaacacccaaagaaaccttttcagaagtggatgaagaagagagcaatcaaaaaaggtaattatcttcggttccagcgtttattttatcttgatagagggaaactggctaaaatcattttagatgatattgaatgcttgtcttgtgacataccactcagtgaaatttattcggtttttaaaacaagatgggaaacaactggtagctttaaaagccttggggactttaaaacttacgggaaggctgacaacactgccttcagagaattaattacggctaaagaaattgagaaaaatgtgcaggaaatgagcaaaggctcggctcccggtccagacgggattactcttggggacgtcgtaaagatggatcccgagttttcccggaccatggagattttcaatttatggttaacaactggtaaaatcccggacatggtgagggggtgcagaaccgttttgattccaaaatcatcaaagccggatcgtttgaaagacattaataactggagacctatcacgatcggttccatcttgctgagactgttctccaggattgtaacagctaggctgagcaaagcgtgccccctgaacccaaggcaaagaggctttatcagagcggcgggatgctctgaaaacttaaaactcctgcaaactataatttggtcggccaaaagagaacacagaccactgggtgttgtattcgtggacatcgccaaggcttttgacaccgtaagccaccagcacatcattcatgctttgcagcaaagagaggtggatccccacatcgtcggtctggtgagcaatatgtacgagaacatcagtacgtatatcaccacaaagaggaacacacacacagacaaaatccagatccgggttggagtaaagcagggtgacccgatgtcgccccttttatttaacctggcaatggaccctctattatgcaagctggaagagagtggcaaaggataccaccgaggacagagcagcatcacagcgatggcatttgcagacgatctggttttgctgagcgactcctgggaaggcatgaatacaaatattagcatactggagaccttctgcaatctgaccggactcaaaacacaggggcaaaagtgccacggcttttacatcaagccgacaaagaagtcttacaccatcaatgactgcgctgcctggactatcaacggcacacccctgaacatgatcgaccccggcgaatctgagaaatacctcggcctgcagtttgacccgtggattggaatagcaaggtccggtctctccacaaaactagatttttggcttcagcggatcgatcaagcaccacttaaacctctgcagaaaactgatattctcaaaacatacaccatccctcggctgatctacatagctgaccactcagaagtgaaaactgcactactcgaaacccttgaccagaagatccggacagcggtcaaggaatggcttcacctacctccgtgcacctgcgatgccatcctgtactcgagcacgagagacggcggtttgggcatcaccaaattggcaggactgatccccagcgtgcaggcccgtagactgcatcggatcgcacagtcatctgacgatacgatgaaatgcttcatggaaaaagagaaaatggaacagctgcataagaaattgtggattcaagctggaggggacagagagaacataccctcgatttgggaagcaccaccgtcgagtgaaccaccaaacaacgtgagcacaaattcggaatgggaagcaccgacccagaaagataaatttccaaagccttgcaattggaggaaaaacgaattcaaaaaatggaccaaattggcatcccaaggccgcggaattgtaaattttgaaagagacaaaattagtaaccattggatccaatactacagacgcatacctcacaggaaactcctcactgcactacaactcagggccaacgtttaccccacgagagaatttctagccaggggtagacaagaccaatacatcaaggcgtgtaggcactgcgatgcggacattgaatcctgcgcccacatcatcggcaactgcccagtgacacaggacgcccgaatcaagaggcacaattacatctgcgaactgcttctcgaggaggcgaagaagaaggactgggtagtgttcaaggaaccgcacataagggattccaacaaggaactgtacaaacctgacctgatatttgtgaaggatgcccgtgcacttgtcgtggatgtgacagtacggtatgaagcagccaaatcatcgctggaggaagccgctgcagagaaagtgagaaagtacaaacacctggaaacggaagtaagacatctcacgaatgcaaaggacgttacttttgtgggctttcccctaggagcgcgggggaaatggcaccaagataactttaaacttttgactgagcttggcctctccaaatcgaggcaagtgaaaatggcagagactttttccacagtagcgctcttttcatctgtggacattgtacatatgtttgccagtagggccagaaaatctatggttatgtgataataggctgccttctgcggggcttgccttctggccatgcccttcttctctcccttgcacctgtacctcttggtctttgaataaagcctgagtaggaaggaccggtaaaaaaaaaaaaaaaaaaaaaaaaaaaaaaacgttgactaaaaaaaaaaaaaaaaaaaaaaaaaaaaaaaaaaaaaaaaaaaaaaaaaaaaaaaaaaaaaaaaaaaaaa

SEQ ID NO: 11549 - DNA, 4564 bp, synthetic construct
  source 1..4564: mol_type = other DNA
ggtctagttacaactgggcatcgctgcagagatcgcacctcctcgtggtcccgctggtagcccttcgaagggtgactaagtcgatctctgccccaggtacggagccgttgggactcaccagtccaacgtaactcctgcctaaattcggtgaaacaaattcctcggtaaaaagccccatggcttcttgcccgaaacctggccccccggtttcagcaggggcaatgagtttggaaagtggactgaccacccactccgttctcgccatcgaacgtggtcccaattcgttggcaaattccggatcagactttgggggggggggtctggggctaccgttacgcctattgagggtatcggtcggcactcagacctcccgctccgactgggtagacctggtgtcctggagccacccaggacccacgtctaagtcccagcaggttgacctggtgtctttatttcctaaacaccgggttgacctgttatccaaaaacgaccaggtagacctggtggctcaatttttaccatctaaatttccccccaatttggcagaaaatgatttggctttgctggtgaacttagagttctacagatcggatttgcatgtgtatgagtgtgttcattttgctgcacattgggagggattaagtggtttgcctgaggtgtatgaacaacttgcaccacaaccgtgtgtgggagaaactttacattctagcctcccacgagacagtgaactgtttgtgcctgaagaggggagcagcgagaaggagagcgaggacgcgccaaaaacatctcctccgacgcctgggaaacatggtttggaacagactggggaggaaaaagtgatggtgactgttcctgacaaaaatccaccttgtccttgctgtggtacccgggtaaactctgtgttgaatctgattgaacatctgaaagtgtcacacgggaaaaggggggtttgttttcggtgtgcaaaatgtggaaaggaaaatagtaactatcacagtgttgtttgtcattttccaaaatgcaggggtccagagacggagaaagccccagctggggagtggatttgtgaggtatgcaacagagattttacaaccaaaattggcctgggacaacacaagagattggcacacccagcagtgagaaatcaggaaaggatcgttgcttcccaaccgaaagaaacatcaaatagaggtgctcacaaaaggtgctggacaaaggaggaggaagaattactaataagactggaggctcagttcgagggaaacaaaaatattaataagcttattgcagaacacataaccaccaaaacagctaagcagatcagtgacaaaaggcgattgctgtccagaaagccagcagaggagccacgtgaggagcctggaacgtgtcatcacaccaggagagcagctgcgagcctgagaacggagcctgagatgagtcatcacgcccaggcagaggacagagataatggacctgggagacgccctctgccaggcagggcagctgccggagggagaacaatggacgagataagacgccaccctgataagggcaacggacagcagagacccaccaagcaaaaatcagaagaacagctgcaggcttactataaaaagacactagaggaacgactttcagctggggcacttaacaccttcccccgagcattcaagcaggtaatggaaggccgggatataaagctagtaatcaatcagacagcgcaggactgcttcggatgcctggaatccataagccaaataagaacggcaacccgagataaaaaggacacggtgacccggaagaaacacccaaagaaaccttttcagaagtggatgaagaagagagcaatcaaaaaaggtaattatcttcggttccagcgtttattttatcttgatagagggaaactggctaaaatcattttagatgatattgaatgcttgtcttgtgacataccactcagtgaaatttattcggtttttaaaacaagatgggaaacaactggtagctttaaaagccttggggactttaaaacttacgggaaggctgacaacactgccttcagagaattaattacggctaaagaaattgagaaaaatgtgcaggaaatgagcaaaggctcggctcccggtccagacgggattactcttggggacgtcgtaaagatggatcccgagggctcccggaccatggagattttcaatttatggttaacaactggtaaaatcccggacatggtgagggggtgcagaaccgttttgattccaaaatcatcaaagccggatcgtttgaaagacattaataactggagacctatcacgatcggttccatcttgctgagactgttctccaggattgtaacagctaggctgagcaaagcgtgccccctgaacccaaggcaaagaggctttatcagagcggcgggatgctctgaaaacttaaaactcctgcaaactataatttggtcggccaaaagagaacacagaccactgggtgttgtattcgtggacatcgccaaggcttttgacaccgtaagccaccagcacatcattcatgctttgcagcaaagagaggtggatccccacatcgtcggtctggtgagcaatatgtacgagaacatcagtacgtatatcaccacaaagaggaacacacacacagacaaaatccagatccgggttggagtaaagcagggtgacccgatgtcgccccttttatttaacctggcaatggaccctctattatgcaagctggaagagagtggcaaaggataccaccgaggacagagcagcatcacagcgatggcatttgcagacgatctggttttgctgagcgactcctgggaaaatatgaatacaaatattagcatactggagaccttctgcaatctgaccggactcaaaacacaggggcaaaagtgccacggcttttacatcaagccgacaaagaagtcttacaccatcaatgactgcgctgcctggactatcaacggcacacccctgaacatgatcgaccccggcgaatctgagaaatacctcggcctgcagtttgacccgtggattggaatagcaaggtccggtctctccacaaaactagatttttggcttcagcggatcgatcaagcaccacttaaacctctgcagaaaactgatattctcaaaacatacaccatccctcggctgatctacatagctgaccactcagaagtgaaaactgcactactcgaaacccttgaccagaagatccggacagcggtcaaggaatggcttcacctacctccgtgcacctgcgatgccatcctgtactcgagcacgagagacggcggtttgggcatcaccaaattggcaggactgatccccagcgtgcaggcccgtagactgcatcggatcgcacagtcatctgacgatacgatgaaatgcttcatggaaaaagagaaaatggaacagctgcataagaaattgtggattcaagctggaggggacagagagaacataccctcgatttgggaagcaccaccgtcgagtgaaccaccaaacaacgtgagcacaaattcggaatgggaagcaccgacccagaaagataaatttccaaagccttgcaattggaggaaaaacgaattcaaaaaatggaccaaattggcatcccaaggccgcggaattgtaaattttgaaagagacaaaattagtaaccattggatccaatactacagacgcatacctcacaggaaactcctcactgcactacaactcagggccaacgtttaccccacgagagaatttctagccaggggtagacaagaccaatacatcaaggcgtgtaggcactgcgatgcggacattgaatcctgcgcccacatcatcggcaactgcccagtgacacaggacgcccgaatcaagaggcacaattacatctgcgaactgcttctcgaggaggcgaagaagaaggactgggtagtgttcaaggaaccgcacataagggattccaacaaggaactgtacaaacctgacctgatatttgtgaaggatgcccgtgcacttgtcgtggatgtgacagtacggtatgaagcagccaaatcatcgctggaggaagccgctgcagagaaagtgagaaagtacaaacacctggaaacggaagtaagacatctcacgaatgcaaaggacgttacttttgtgggctttcccctaggagcgcgggggaaatggcaccaagataactttaaacttttgactgagcttggcctctccaaatcgaggcaagtgaaaatggcagagactttttccacagtagcgctcttttcatctgtggacattgtacatatgtttgccagtagggccagaaaatctatggttatgtgataataggctgccttctgcggggcttgccttctggccatgcccttcttctctcccttgcacctgtacctcttggtctttgaataaagcctgagtaggaaggaccggtaaaaaaaaaaaaaaaaaaaaaaaaaaaaaaacgttgactaaaaaaaaaaaaaaaaaaaaaaaaaaaaaaaaaaaaaaaaaaaaaaaaaaaaaaaaaaaaaaaaaaaaaa

SEQ ID NO: 11550 - DNA, 4564 bp, synthetic construct
  source 1..4564: mol_type = other DNA
ggtctagttacaactgggcatcgctgcagagatcgcacctcctcgtggtcccgctggtagcccttcgaagggtgactaagtcgatctctgccccaggtacggagccgttgggactcaccagtccaacgtaactcctgcctaaattcggtgaaacaaattcctcggtaaaaagccccatggcttcttgcccgaaacctggccccccggtttcagcaggggcaatgagtttggaaagtggactgaccacccactccgttctcgccatcgaacgtggtcccaattcgttggcaaattccggatcagactttgggggggggggtctggggctaccgttacgcctattgagggtatcggtcggcactcagacctcccgctccgactgggtagacctggtgtcctggagccacccaggacccacgtctaagtcccagcaggttgacctggtgtctttatttcctaaacaccgggttgacctgttatccaaaaacgaccaggtagacctggtggctcaatttttaccatctaaatttccccccaatttggcagaaaatgatttggctttgctggtgaacttagagttctacagatcggatttgcatgtgtatgagtgtgttcattttgctgcacattgggagggattaagtggtttgcctgaggtgtatgaacaacttgcaccacaaccgtgtgtgggagaaactttacattctagcctcccacgagacagtgaactgtttgtgcctgaagaggggagcagcgagaaggagagcgaggacgcgccaaaaacatctcctccgacgcctgggaaacatggtttggaacagactggggaggaaaaagtgatggtgactgttcctgacaaaaatccaccttgtccttgctgtggtacccgggtaaactctgtgttgaatctgattgaacatctgaaagtgtcacacgggaaaaggggggtttgttttcggtgtgcaaaatgtggaaaggaaaatagtaactatcacagtgttgtttgtcattttccaaaatgcaggggtccagagacggagaaagccccagctggggagtggatttgtgaggtatgcaacagagattttacaaccaaaattggcctgggacaacacaagagattggcacacccagcagtgagaaatcaggaaaggatcgttgcttcccaaccgaaagaaacatcaaatagaggtgctcacaaaaggtgctggacaaaggaggaggaagaattactaataagactggaggctcagttcgagggaaacaaaaatattaataagcttattgcagaacacataaccaccaaaacagctaagcagatcagtgacaaaaggcgattgctgtccagaaagccagcagaggagccacgtgaggagcctggaacgtgtcatcacaccaggagagcagctgcgagcctgagaacggagcctgagatgagtcatcacgcccaggcagaggacagagataatggacctgggagacgccctctgccaggcagggcagctgccggagggagaacaatggacgagataagacgccaccctgataagggcaacggacagcagagacccaccaagcaaaaatcagaagaacagctgcaggcttactataaaaagacactagaggaacgactttcagctggggcacttaacaccttcccccgagcattcaagcaggtaatggaaggccgggatataaagctagtaatcaatcagacagcgcaggactgcttcggatgcctggaatccataagccaaataagaacggcaacccgagataaaaaggacacggtgacccggaagaaacacccaaagaaaccttttcagaagtggatgaagaagagagcaatcaaaaaaggtaattatcttcggttccagcgtttattttatcttgatagagggaaactggctaaaatcattttagatgatattgaatgcttgtcttgtgacataccactcagtgaaatttattcggtttttaaaacaagatgggaaacaactggtagctttaaaagccttggggactttaaaacttacgggaaggctgacaacactgccttcagagaattaattacggctaaagaaattgagaaaaatgtgcaggaaatgagcaaaggctcggctcccggtccagacgggattactcttggggacgtcgtaaagatggatcccgagttttcccggaccatggagattttcaatttatggttaacaactggtaaaatcccggacatggtgagggggtgcagaaccgttttgattccaaaatcatcaaagccggatcgtttgaaagacattaataactggagacctatcacgatcggttccatcttgctgagactgttctccaggattgtaacagctaggctgagcaaagcgtgccccctgaacccaaggcaaagaggctttatcagagcggcgggatgctctgaaaacttaaaactcctgcaaactataatttggtcggccaaaagagaacacagaccactgggtgttgtattcgtggacatcgccaaggcttttgacaccgtaagccaccagcacatcattcatgctttgcagcaaagagaggtggatccccacatcgtcggtctggtgagcaatatgtacgagaacatcagtacgtatatcaccacaaagaggaacacacacacagacaaaatccagatccgggttggagtaaagcagggtgacccgatgtcgccccttttatttaacctggcaatggaccctctattatgcaagctggaagagagtggcaaaggataccaccgaggacagagcagcatcacagcgatggcatttgcagacgatctggttttgctgagcgactcctgggaaggcatgaatacaaatattagcatactggagaccttctgcaatctgaccggactcaaaacacaggggcaaaagtgccacggcttttacatcaagccgacaaagaagtcttacaccatcaatgactgcgctgcctggactatcaacggcacacccctgaacatgatcgaccccggcgaatctgagaaatacctcggcctgcagtttgacccgtggattggaatagcaaggtccggtctctccacaaaactagatttttggcttcagcggatcgatcaagcaccacttaaacctctgcagaaactggatattctcaaaacatacaccatccctcggctgatctacatagctgaccactcagaagtgaaaactgcactactcgaaacccttgaccagaagatccggacagcggtcaaggaatggcttcacctacctccgtgcacctgcgatgccatcctgtactcgagcacgagagacggcggtttgggcatcaccaaattggcaggactgatccccagcgtgcaggcccgtagactgcatcggatcgcacagtcatctgacgatacgatgaaatgcttcatggaaaaagagaaaatggaacagctgcataagaaattgtggattcaagctggaggggacagagagaacataccctcgatttgggaagcaccaccgtcgagtgaaccaccaaacaacgtgagcacaaattcggaatgggaagcaccgacccagaaagataaatttccaaagccttgcaattggaggaaaaacgaattcaaaaaatggaccaaattggcatcccaaggccgcggaattgtaaattttgaaagagacaaaattagtaaccattggatccaatactacagacgcatacctcacaggaaactcctcactgcactacaactcagggccaacgtttaccccacgagagaatttctagccaggggtagacaagaccaatacatcaaggcgtgtaggcactgcgatgcggacattgaatcctgcgcccacatcatcggcaactgcccagtgacacaggacgcccgaatcaagaggcacaattacatctgcgaactgcttctcgaggaggcgaagaagaaggactgggtagtgttcaaggaaccgcacataagggattccaacaaggaactgtacaaacctgacctgatatttgtgaaggatgcccgtgcacttgtcgtggatgtgacagtacggtatgaagcagccaaatcatcgctggaggaagccgctgcagagaaagtgagaaagtacaaacacctggaaacggaagtaagacatctcacgaatgcaaaggacgttacttttgtgggctttcccctaggagcgcgggggaaatggcaccaagataactttaaacttttgactgagcttggcctctccaaatcgaggcaagtgaaaatggcagagactttttccacagtagcgctcttttcatctgtggacattgtacatatgtttgccagtagggccagaaaatctatggttatgtgataataggctgccttctgcggggcttgccttctggccatgcccttcttctctcccttgcacctgtacctcttggtctttgaataaagcctgagtaggaaggaccggtaaaaaaaaaaaaaaaaaaaaaaaaaaaaaaacgttgactaaaaaaaaaaaaaaaaaaaaaaaaaaaaaaaaaaaaaaaaaaaaaaaaaaaaaaaaaaaaaaaaaaaaaa

SEQ ID NO: 11551 - DNA, 4564 bp, synthetic construct
  source 1..4564: mol_type = other DNA
ggtctagttacaactgggcatcgctgcagagatcgcacctcctcgtggtcccgctggtagcccttcgaagggtgactaagtcgatctctgccccaggtacggagccgttgggactcaccagtccaacgtaactcctgcctaaattcggtgaaacaaattcctcggtaaaaagccccatggcttcttgcccgaaacctggccccccggtttcagcaggggcaatgagtttggaaagtggactgaccacccactccgttctcgccatcgaacgtggtcccaattcgttggcaaattccggatcagactttgggggggggggtctggggctaccgttacgcctattgagggtatcggtcggcactcagacctcccgctccgactgggtagacctggtgtcctggagccacccaggacccacgtctaagtcccagcaggttgacctggtgtctttatttcctaaacaccgggttgacctgttatccaaaaacgaccaggtagacctggtggctcaatttttaccatctaaatttccccccaatttggcagaaaatgatttggctttgctggtgaacttagagttctacagatcggatttgcatgtgtatgagtgtgttcattttgctgcacattgggagggattaagtggtttgcctgaggtgtatgaacaacttgcaccacaaccgtgtgtgggagaaactttacattctagcctcccacgagacagtgaactgtttgtgcctgaagaggggagcagcgagaaggagagcgaggacgcgccaaaaacatctcctccgacgcctgggaaacatggtttggaacagactggggaggaaaaagtgatggtgactgttcctgacaaaaatccaccttgtccttgctgtggtacccgggtaaactctgtgttgaatctgattgaacatctgaaagtgtcacacgggaaaaggggggtttgttttcggtgtgcaaaatgtggaaaggaaaatagtaactatcacagtgttgtttgtcattttccaaaatgcaggggtccagagacggagaaagccccagctggggagtggatttgtgaggtatgcaacagagattttacaaccaaaattggcctgggacaacacaagagattggcacacccagcagtgagaaatcaggaaaggatcgttgcttcccaaccgaaagaaacatcaaatagaggtgctcacaaaaggtgctggacaaaggaggaggaagaattactaataagactggaggctcagttcgagggaaacaaaaatattaataagcttattgcagaacacataaccaccaaaacagctaagcagatcagtgacaaaaggcgattgctgtccagaaagccagcagaggagccacgtgaggagcctggaacgtgtcatcacaccaggagagcagctgcgagcctgagaacggagcctgagatgagtcatcacgcccaggcagaggacagagataatggacctgggagacgccctctgccaggcagggcagctgccggagggagaacaatggacgagataagacgccaccctgataagggcaacggacagcagagacccaccaagcaaaaatcagaagaacagctgcaggcttactataaaaagacactagaggaacgactttcagctggggcacttaacaccttcccccgagcattcaagcaggtaatggaaggccgggatataaagctagtaatcaatcagacagcgcaggactgcttcggatgcctggaatccataagccaaataagaacggcaacccgagataaaaaggacacggtgacccggaagaaacacccaaagaaaccttttcagaagtggatgaagaagagagcaatcaaaaaaggtaattatcttcggttccagcgtttattttatcttgatagagggaaactggctaaaatcattttagatgatattgaatgcttgtcttgtgacataccactcagtgaaatttattcggtttttaaaacaagatgggaaacaactggtagctttaaaagccttggggactttaaaacttacgggaaggctgacaacactgccttcagagaattaattacggctaaagaaattgagaaaaatgtgcaggaaatgagcaaaggctcggctcccggtccagacgggattactcttggggacgtcgtaaagatggatcccgagggctcccggaccatggagattttcaatttatggttaacaactggtaaaatcccggacatggtgagggggtgcagaaccgttttgattccaaaatcatcaaagccggatcgtttgaaagacattaataactggagacctatcacgatcggttccatcttgctgagactgttctccaggattgtaacagctaggctgagcaaagcgtgccccctgaacccaaggcaaagaggctttatcagagcggcgggatgctctgaaaacttaaaactcctgcaaactataatttggtcggccaaaagagaacacagaccactgggtgttgtattcgtggacatcgccaaggcttttgacaccgtaagccaccagcacatcattcatgctttgcagcaaagagaggtggatccccacatcgtcggtctggtgagcaatatgtacgagaacatcagtacgtatatcaccacaaagaggaacacacacacagacaaaatccagatccgggttggagtaaagcagggtgacccgatgtcgccccttttatttaacctggcaatggaccctctattatgcaagctggaagagagtggcaaaggataccaccgaggacagagcagcatcacagcgatggcatttgcagacgatctggttttgctgagcgactcctgggaaaatatgaatacaaatattagcatactggagaccttctgcaatctgaccggactcaaaacacaggggcaaaagtgccacggcttttacatcaagccgacaaagaagtcttacaccatcaatgactgcgctgcctggactatcaacggcacacccctgaacatgatcgaccccggcgaatctgagaaatacctcggcctgcagtttgacccgtggattggaatagcaaggtccggtctctccacaaaactagatttttggcttcagcggatcgatcaagcaccacttaaacctctgcagaaactggatattctcaaaacatacaccatccctcggctgatctacatagctgaccactcagaagtgaaaactgcactactcgaaacccttgaccagaagatccggacagcggtcaaggaatggcttcacctacctccgtgcacctgcgatgccatcctgtactcgagcacgagagacggcggtttgggcatcaccaaattggcaggactgatccccagcgtgcaggcccgtagactgcatcggatcgcacagtcatctgacgatacgatgaaatgcttcatggaaaaagagaaaatggaacagctgcataagaaattgtggattcaagctggaggggacagagagaacataccctcgatttgggaagcaccaccgtcgagtgaaccaccaaacaacgtgagcacaaattcggaatgggaagcaccgacccagaaagataaatttccaaagccttgcaattggaggaaaaacgaattcaaaaaatggaccaaattggcatcccaaggccgcggaattgtaaattttgaaagagacaaaattagtaaccattggatccaatactacagacgcatacctcacaggaaactcctcactgcactacaactcagggccaacgtttaccccacgagagaatttctagccaggggtagacaagaccaatacatcaaggcgtgtaggcactgcgatgcggacattgaatcctgcgcccacatcatcggcaactgcccagtgacacaggacgcccgaatcaagaggcacaattacatctgcgaactgcttctcgaggaggcgaagaagaaggactgggtagtgttcaaggaaccgcacataagggattccaacaaggaactgtacaaacctgacctgatatttgtgaaggatgcccgtgcacttgtcgtggatgtgacagtacggtatgaagcagccaaatcatcgctggaggaagccgctgcagagaaagtgagaaagtacaaacacctggaaacggaagtaagacatctcacgaatgcaaaggacgttacttttgtgggctttcccctaggagcgcgggggaaatggcaccaagataactttaaacttttgactgagcttggcctctccaaatcgaggcaagtgaaaatggcagagactttttccacagtagcgctcttttcatctgtggacattgtacatatgtttgccagtagggccagaaaatctatggttatgtgataataggctgccttctgcggggcttgccttctggccatgcccttcttctctcccttgcacctgtacctcttggtctttgaataaagcctgagtaggaaggaccggtaaaaaaaaaaaaaaaaaaaaaaaaaaaaaaacgttgactaaaaaaaaaaaaaaaaaaaaaaaaaaaaaaaaaaaaaaaaaaaaaaaaaaaaaaaaaaaaaaaaaaaaaa

SEQ ID NO: 11552 - DNA, 4564 bp, synthetic construct
  source 1..4564: mol_type = other DNA
ggtctagttacaactgggcatcgctgcagagatcgcacctcctcgtggtcccgctggtagcccttcgaagggtgactaagtcgatctctgccccaggtacggagccgttgggactcaccagtccaacgtaactcctgcctaaattcggtgaaacaaattcctcggtaaaaagccccatggcttcttgcccgaaacctggccccccggtttcagcaggggcaatgagtttggaaagtggactgaccacccactccgttctcgccatcgaacgtggtcccaattcgttggcaaattccggatcagactttgggggggggggtctggggctaccgttacgcctattgagggtatcggtcggcactcagacctcccgctccgactgggtagacctggtgtcctggagccacccaggacccacgtctaagtcccagcaggttgacctggtgtctttatttcctaaacaccgggttgacctgttatccaaaaacgaccaggtagacctggtggctcaatttttaccatctaaatttccccccaatttggcagaaaatgatttggctttgctggtgaacttagagttctacagatcggatttgcatgtgtatgagtgtgttcattttgctgcacattgggagggattaagtggtttgcctgaggtgtatgaacaacttgcaccacaaccgtgtgtgggagaaactttacattctagcctcccacgagacagtgaactgtttgtgcctgaagaggggagcagcgagaaggagagcgaggacgcgccaaaaacatctcctccgacgcctgggaaacatggtttggaacagactggggaggaaaaagtgatggtgactgttcctgacaaaaatccaccttgtccttgctgtggtacccgggtaaactctgtgttgaatctgattgaacatctgaaagtgtcacacgggaaaaggggggtttgttttcggtgtgcaaaatgtggaaaggaaaatagtaactatcacagtgttgtttgtcattttccaaaatgcaggggtccagagacggagaaagccccagctggggagtggatttgtgaggtatgcaacagagattttacaaccaaaattggcctgggacaacacaagagattggcacacccagcagtgagaaatcaggaaaggatcgttgcttcccaaccgaaagaaacatcaaatagaggtgctcacaaaaggtgctggacaaaggaggaggaagaattactaataagactggaggctcagttcgagggaaacaaaaatattaataagcttattgcagaacacataaccaccaaaacagctaagcagatcagtgacaaaaggcgattgctgtccagaaagccagcagaggagccacgtgaggagcctggaacgtgtcatcacaccaggagagcagctgcgagcctgagaacggagcctgagatgagtcatcacgcccaggcagaggacagagataatggacctgggagacgccctctgccaggcagggcagctgccggagggagaacaatggacgagataagacgccaccctgataagggcaacggacagcagagacccaccaagcaaaaatcagaagaacagctgcaggcttactataaaaagacactagaggaacgactttcagctggggcacttaacaccttcccccgagcattcaagcaggtaatggaaggccgggatataaagctagtaatcaatcagacagcgcaggactgcttcggatgcctggaatccataagccaaataagaacggcaacccgagataaaaaggacacggtgacccgggagaaacacccaaagaaaccttttcagaagtggatgaagaagagagcaatcaaaaaaggtaattatcttcggttccagcgtttattttatcttgatagagggaaactggctaaaatcattttagatgatattgaatgcttgtcttgtgacataccactcagtgaaatttattcggtttttaaaacaagatgggaaacaactggtagctttaaaagccttggggactttaaaacttacgggaaggctgacaacactgccttcagagaattaattacggctaaagaaattgagaaaaatgtgcaggaaatgagcaaaggctcggctcccggtccagacgggattactcttggggacgtcgtaaagatggatcccgagttttcccggaccatggagattttcaatttatggttaacaactggtaaaatcccggacatggtgagggggtgcagaaccgttttgattccaaaatcatcaaagccggatcgtttgaaagacattaataactggagacctatcacgatcggttccatcttgctgagactgttctccaggattgtaacagctaggctgagcaaagcgtgccccctgaacccaaggcaaagaggctttatcagagcggcgggatgctctgaaaacttaaaactcctgcaaactataatttggtcggccaaaagagaacacagaccactgggtgttgtattcgtggacatcgccaaggcttttgacaccgtaagccaccagcacatcattcatgctttgcagcaaagagaggtggatccccacatcgtcggtctggtgagcaatatgtacgagaacatcagtacgtatatcaccacaaagaggaacacacacacagacaaaatccagatccgggttggagtaaagcagggtgacccgatgtcgccccttttatttaacctggcaatggaccctctattatgcaagctggaagagagtggcaaaggataccaccgaggacagagcagcatcacagcgatggcatttgcagacgatctggttttgctgagcgactcctgggaaggcatgaatacaaatattagcatactggagaccttctgcaatctgaccggactcaaaacacaggggcaaaagtgccacggcttttacatcaagccgacaaagaagtcttacaccatcaatgactgcgctgcctggactatcaacggcacacccctgaacatgatcgaccccggcgaatctgagaaatacctcggcctgcagtttgacccgtggattggaatagcaaggtccggtctctccacaaaactagatttttggcttcagcggatcgatcaagcaccacttaaacctctgcagaaactggatattctcaaaacatacaccatccctcggctgatctacatagctgaccactcagaagtgaaaactgcactactcgaaacccttgaccagaagatccggacagcggtcaaggaatggcttcacctacctccgtgcacctgcgatgccatcctgtactcgagcacgagagacggcggtttgggcatcaccaaattggcaggactgatccccagcgtgcaggcccgtagactgcatcggatcgcacagtcatctgacgatacgatgaaatgcttcatggaaaaagagaaaatggaacagctgcataagaaattgtggattcaagctggaggggacagagagaacataccctcgatttgggaagcaccaccgtcgagtgaaccaccaaacaacgtgagcacaaattcggaatgggaagcaccgacccagaaagataaatttccaaagccttgcaattggaggaaaaacgaattcaaaaaatggaccaaattggcatcccaaggccgcggaattgtaaattttgaaagagacaaaattagtaaccattggatccaatactacagacgcatacctcacaggaaactcctcactgcactacaactcagggccaacgtttaccccacgagagaatttctagccaggggtagacaagaccaatacatcaaggcgtgtaggcactgcgatgcggacattgaatcctgcgcccacatcatcggcaactgcccagtgacacaggacgcccgaatcaagaggcacaattacatctgcgaactgcttctcgaggaggcgaagaagaaggactgggtagtgttcaaggaaccgcacataagggattccaacaaggaactgtacaaacctgacctgatatttgtgaaggatgcccgtgcacttgtcgtggatgtgacagtacggtatgaagcagccaaatcatcgctggaggaagccgctgcagagaaagtgagaaagtacaaacacctggaaacggaagtaagacatctcacgaatgcaaaggacgttacttttgtgggctttcccctaggagcgcgggggaaatggcaccaagataactttaaacttttgactgagcttggcctctccaaatcgaggcaagtgaaaatggcagagactttttccacagtagcgctcttttcatctgtggacattgtacatatgtttgccagtagggccagaaaatctatggttatgtgataataggctgccttctgcggggcttgccttctggccatgcccttcttctctcccttgcacctgtacctcttggtctttgaataaagcctgagtaggaaggaccggtaaaaaaaaaaaaaaaaaaaaaaaaaaaaaaacgttgactaaaaaaaaaaaaaaaaaaaaaaaaaaaaaaaaaaaaaaaaaaaaaaaaaaaaaaaaaaaaaaaaaaaaaa

SEQ ID NO: 11553-11554 - skipped (2 entries)

SEQ ID NO: 11555 - DNA, 4792 bp, synthetic construct
  source 1..4792: mol_type = other DNA
ggtctagttacaactgggcatcgctgcagagatcgcacctcctcgtggtcccgctggtagcccttcgaagggtgactaagtcgatctctgccccaggtacggagccgttgggactcaccagtccaacgtaactcctgcctaaattcggtgaaacaaattcctcggtaaaaagccccatggcttcttgcccgaaacctggccccccggtttcagcaggggcaatgagtttggaaagtggactgaccacccactccgttctcgccatcgaacgtggtcccaattcgttggcaaattccggatcagactttgggggggggggtctggggctaccgttacgcctattgagggtatcggtcggcactcagacctcccgctccgactgggtagacctggtgtcctggagccacccaggacccacgtctaagtcccagcaggttgacctggtgtctttatttcctaaacaccgggttgacctgttatccaaaaacgaccaggtagacctggtggctcaatttttaccatctaaatttccccccaatttggcagaaaatgatttggctttgctggtgaacttagagttctacagatcggatttgcatgtgtatgagtgtgttcattttgctgcacattgggagggattaagtggtttgcctgaggtgtatgaacaacttgcaccacaaccgtgtgtgggagaaactttacattctagcctcccacgagacagtgaactgtttgtgcctgaagaggggagcagcgagaaggagagcgaggacgcgccaaaaacatctcctccgacgcctgggaaacatggtttggaacagactggggaggaaaaagtgatggtgactgttcctgacaaaaatccaccttgtccttgctgtggtacccgggtaaactctgtgttgaatctgattgaacatctgaaagtgtcacacgggaaaaggggggtttgttttcggtgtgcaaaatgtggaaaggaaaatagtaactatcacagtgttgtttgtcattttccaaaatgcaggggtccagagacggagaaagccccagctggggagtggatttgtgaggtatgcaacagagattttacaaccaaaattggcctgggacaacacaagagattggcacacccagcagtgagaaatcaggaaaggatcgttgcttcccaaccgaaagaaacatcaaatagaggtgctcacaaaaggtgctggacaaaggaggaggaagaattactaataagactggaggctcagttcgagggaaacaaaaatattaataagcttattgcagaacacataaccaccaaaacagctaagcagatcagtgacaaaaggcgattgctgtccagaaagccagcagaggagccacgtgaggagcctggaacgtgtcatcacaccaggagagcagctgcgagcctgagaacggagcctgagatgagtcatcacgcccaggcagaggacagagataatggacctgggagacgccctctgccaggcagggcagctgccggagggagaacaatggacgagataagacgccaccctgataagggcaacggacagcagagacccaccaagcaaaaatcagaagaacagctgcaggcttactataaaaagacactagaggaacgactttcagctggggcacttaacaccttcccccgagcattcaagcaggtaatggaaggccgggatataaagctagtaatcaatcagacagcgcaggactgcttcggatgcctggaatccataagccaaataagaacggcaacccgagataaaaaggacacggtgacccgggagaaacacccaaagaaaccttttcagaagtggatgaaggacagagcaatcaaaaaaggtaattatcttcggttccagcgtttattttatcttgatagagggaaactggctaaaatcattttagatgatattgaatgcttgtcttgtgacataccactcagtgaaatttattcggtttttaaaacaagatgggaaacaactggtagctttaaaagccttggggactttaaaacttacgggaaggctgacaacactgccttcagagaattaattacggctaaagaaattgagaaaaatgtgcaggaaatgagcaaaggctcggctcccggtccagacgggattactcttggggacgtcgtaaagatggatcccgagttttcccggaccatggagattttcaatttatggttaacaactggtaaaatcccggacatggtgagggggtgcagaaccgttttgattccaaaatcatcaaagccggatcgtttgaaagacattaataactggagacctatcacgatcggttccatcttgctgagactgttctccaggattgtaacagctaggctgagcaaagcgtgccccctgaacccaaggcaaagaggctttatcagagcggcgggatgctctgaaaacttaaaactcctgcaaactataatttggtcggccaaaagagaacacagaccactgggtgttgtattcgtggacatcgccaaggcttttgacaccgtaagccaccagcacatcattcatgctttgcagcaaagagaggtggatccccacatcgtcggtctggtgagcaatatgtacgagaacatcagtacgtatatcaccacaaagaggaacacacacacagacaaaatccagatccgggttggagtaaagcagggtgacccgatgtcgccccttttatttaacctggcaatggaccctctattatgcaagctggaagagagtggcaaaggataccaccgaggacagagcagcatcacagcgatggcatttgcagacgatctggttttgctgagcgactcctgggaaaatatgaatacaaatattagcatactggagaccttctgcaatctgaccggactcaaaacacaggggcaaaagtgccacggcttttacatcaagccgacaaaggactcttacaccatcaatgactgcgctgcctggactatcaacggcacacccctgaacatgatcgaccccggcgaatctgagaaatacctcggcctgcagtttgacccgtggattggaatagcaaggtccggtctctccacaaaactagatttttggcttcagcggatcgatcaagcaccacttaaacctctgcagaaaactgatattctcaaaacatacaccatccctcggctgatctacatagctgaccactcagaagtgaaaactgcactactcgaaacccttgaccagaagatccggacagcggtcaaggaatggcttcacctacctccgtgcacctgcgatgccatcctgtactcgagcacgagagacggcggtttgggcatcaccaaattggcaggactgatccccagcgtgcaggcccgtagactgcatcggatcgcacagtcatctgacgatacgatgaaatgcttcatggaaaaagagaaaatggaacagctgcataagaaattgtggattcaagctggaggggacagagagaacataccctcgatttgggaagcaccaccgtcgagtgaaccaccaaacaacgtgagcacaaattcggaatgggaagcaccgacccagaaagataaatttccaaagccttgcaattggaggaaaaacgaattcaaaaaatggaccaaattggcatcccaaggccgcggaattgtaaattttgaaagagacaaaattagtaaccattggatccaatactacagacgcatacctcacaggaaactcctcactgcactacaactcagggccaacgtttaccccacgagagaatttctagccaggggtagacaagaccaatacatcaaggcgtgtaggcactgcgatgcggacattgaatcctgcgcccacatcatcggcaactgcccagtgacacaggacgcccgaatcaagaggcacaattacatctgcgaactgcttctcgaggaggcgaagaagaaggactgggtagtgttcaaggaaccgcacataagggattccaacaaggaactgtacaaacctgacctgatatttgtgaaggatgcccgtgcacttgtcgtggatgtgacagtacggtatgaagcagccaaatcatcgctggaggaagccgctgcagagaaagtgagaaagtacaaacacctggaaacggaagtaagacatctcacgaatgcaaaggacgttacttttgtgggctttcccctaggagcgcgggggaaatggcaccaagataactttaaacttttgactgagcttggcctctccaaatcgaggcaagtgaaaatggcagagactttttccacagtagcgctcttttcatctgtggacattgtacatatgtttgccagtagggccagaaaatctatggttatgtccggctccgagactcctggaacaagcgagagcgctacacctgagggcagccggaaaagacggcagacaagcatgaccgacttctaccactctaagcggagactgatcttcagcaagagaaagcctggcggatctggcaaaagaaccgccgacggcagcgaattcgagcccaagaagaagaggaaagtctaaaccggtagacatgataagatacattgatgagtttggacaaaccacaactagaatgcagtgaaaaaaatgctttatttgtgaaatttgtgatgctattgctttatttgtaaccattataagctgcaataaacaagttaacaacaacaaaaaaaaaaaaaaaaaaaaaaaaaaaaaaacgttgactaaaaaaaaaaaaaaaaaaaaaaaaaaaaaaaaaaaaaaaaaaaaaaaaaaaaaaaaaaaaaaaaaaaaaa

SEQ ID NO: 11556 - DNA, 4703 bp, synthetic construct
  source 1..4703: mol_type = other DNA
ggtctagttacaactgggcatcgctgcagagatcgcacctcctcgtggtcccgctggtagcccttcgaagggtgactaagtcgatctctgccccaggtacggagccgttgggactcaccagtccaacgtaactcctgcctaaattcggtgaaacaaattcctcggtaaaaagccccatggcttcttgcccgaaacctggccccccggtttcagcaggggcaatgagtttggaaagtggactgaccacccactccgttctcgccatcgaacgtggtcccaattcgttggcaaattccggatcagactttgggggggggggtctggggctaccgttacgcctattgagggtatcggtcggcactcagacctcccgctccgactgggtagacctggtgtcctggagccacccaggacccacgtctaagtcccagcaggttgacctggtgtctttatttcctaaacaccgggttgacctgttatccaaaaacgaccaggtagacctggtggctcaatttttaccatctaaatttccccccaatttggcagaaaatgatttggctttgctggtgaacttagagttctacagatcggatttgcatgtgtatgagtgtgttcattttgctgcacattgggagggattaagtggtttgcctgaggtgtatgaacaacttgcaccacaaccgtgtgtgggagaaactttacattctagcctcccacgagacagtgaactgtttgtgcctgaagaggggagcagcgagaaggagagcgaggacgcgccaaaaacatctcctccgacgcctgggaaacatggtttggaacagactggggaggaaaaagtgatggtgactgttcctgacaaaaatccaccttgtccttgctgtggtacccgggtaaactctgtgttgaatctgattgaacatctgaaagtgtcacacgggaaaaggggggtttgttttcggtgtgcaaaatgtggaaaggaaaatagtaactatcacagtgttgtttgtcattttaagaaatgcaggggtccagagacggagaaagccccagctggggagtggatttgtgaggtatgcaacagagattttacaaccaaaattggcctgggacaacacaagagattggcacacccagcagtgagaaatcaggaaaggatcgttgcttcccaaccgaaagaaacatcaaatagaggtgctcacaaaaggtgctggacaaaggaggaggaagaattactaataagactggaggctcagttcgagggaaacaaaaatattaataagcttattgcagaacacataaccaccaaaacagctaagcagatcagtgacaaaaggcgattgctgtccagaaagccagcagaggagccacgtgaggagcctggaacgtgtcatcacaccaggagagcagctgcgagcctgagaacggagcctgagatgagtcatcacgcccaggcagaggacagagataatggacctgggagacgccctctgccaggcagggcagctgccggagggagaacaatggacgagataagacgccaccctgataagggcaacggacagcagagacccaccaagcaaaaatcagaagaacagctgcaggcttactataaaaagacactagaggaacgactttcagctggggcacttaacaccttcccccgagcattcaagcaggtaatggaaggccgggatataaagctagtaatcaatcagacagcgcaggactacttcggatgcctggaatccataagccaaataagaacggcaacccgagataaaaaggacacggtgacccgggagaaacacccaaagaaaccttttcagaagtggatgaagaagagagcaatcaaaaaaggtaattatcttcggttccagcgtttattttatcttgatagagggaaactggctaaaatcattttagatgatattgaatgcttgtcttgtgacataccactcagtgaaatttattcggtttttaaaacaagatgggaaacaactggtagctttaaaagccttggggactttaaaacttacgggaaggctgacaacactgccttcagagaattaattacggctaaagaaattgagaaaaatgtgcaggaaatgagcaaaggctcggctcccggtccagacgggattactcttggggacgtcgtaaagatggatcccgagggctcccggaccatggagattttcaatttatggttaacaactggtaaaatcccggacatggtgagggggtgcagaaccgttttgattccaaaatcatcagacccggatcgtttgaaagacattaataactggagacctatcacgatcggttccatcttgctgagactgttctccaggattgtaacagctaggctgagcaaagcgtgccccctgaacccaaggcaaagaggctttatcagagcggcgggatgctctgaaaacttaaaactcctgcaaactataatttggtcggccaaaagagaacacagaccactgggtgttgtattcgtggacatcgccaaggcttttgacaccgtaagccaccagcacatcattcatgctttgcagcaaagagaggtggatccccacatcgtcggtctggtgagcaatatgtacgagaacatcagtacgtatatcaccacaaagaggaacacacacacagacaaaatccagatccgggttggagtaaagcagggtgacccgatgtcgccccttttatttaacctggcaatggaccctctattatgcaagctggaagagagtggcaaaggataccaccgaggacagagcagcatcacagcgatggcatttgcagacgatctggttttgctgagcgactcctgggaaggcatgaatacaaatattagcatactggagaccttctgcaatctgaccggactcaaaacacaggggcaaaagtgccacggcttttacatcaagccgacaaagaagtcttacaccatcaatgactgcgctgcctggactatcaacggcacacccctgaacatgatcgaccccggcgaatctgagaaatacctcggcctgcagtttgacccgtggattggaatagcaaggtccggtctctccacaaaactagatttttggcttcagcggatcgatcaagcaccacttaaacctctgcagaaaactgatattctcaaaacatacaccatccctcggctgatctacatagctgaccactcagaagtgaaaactgcactactcgaaacccttgaccagaagatccggacagcggtcaaggaatggcttcacctacctccgtgcacctgcgatgccatcctgtactcgagcacgagagacggcggtttgggcatcaccaaattggcaggactgatccccagcgtgcaggcccgtagactgcatcggatcgcacagtcatctgacgatacgatgaaatgcttcatggaaaaagagaaaatggaacagctgcataagaaattgtggattcaagctggaggggacagagagaacataccctcgatttgggaagcaccaccgtcgagtgaaccaccaaacaacgtgagcacaaattcggaatgggaagcaccgacccagaaagataaatttccaaagccttgcaattggaggaaaaacgaattcaaaaaatggaccaaattggcatcccaaggccgcggaattgtaaattttgaaagagacaaaattagtaaccattggatccaatactacagacgcatacctcacaggaaactcctcactgcactacaactcagggccaacgtttaccccacgagagaatttctagccaggggtagacaagaccaatacatcaaggcgtgtaggcactgcgatgcggacattgaatcctgcgcccacatcatcggcaactgcccagtgacacaggacgcccgaatcaagaggcacaataagatctgcgaactgcttctcgaggaggcgaagaagaaggactgggtagtgttcaaggaaccgcacataagggattccaacaaggaactgtacaaacctgacctgatatttgtgaaggatgcccgtgcacttgtcgtggatgtgacagtacggtatgaagcagccaaatcatcgctggaggaagccgctgcagagaaagtgagaaagtacaaacacctggaaacggaagtaagacatctcacgaatgcaaaggacgttacttttgtgggctttcccctaggagcgcgggggaaatggcaccaagataactttaaacttttgactgagcttggcctctccaaatcgaggcaagtgaaaatggcagagactttttccacagtagcgctcttttcatctgtggacattgtacatatgtttgccagtagggccagaaaatctatggttatgtgataataggctgccttctgcggggcttgccttctggccatgcccttcttctctcccttgcacctgtacctcttggtctttgaataaagcctgagtaggaaggaccggtagacatgataagatacattgatgagtttggacaaaccacaactagaatgcagtgaaaaaaatgctttatttgtgaaatttgtgatgctattgctttatttgtaaccattataagctgcaataaacaagttaacaacaacaaaaaaaaaaaaaaaaaaaaaaaaaaaaaaacgttgactaaaaaaaaaaaaaaaaaaaaaaaaaaaaaaaaaaaaaaaaaaaaaaaaaaaaaaaaaaaaaaaaaaaaaa

SEQ ID NO: 11557 - DNA, 4703 bp, synthetic construct
  source 1..4703: mol_type = other DNA
ggtctagttacaactgggcatcgctgcagagatcgcacctcctcgtggtcccgctggtagcccttcgaagggtgactaagtcgatctctgccccaggtacggagccgttgggactcaccagtccaacgtaactcctgcctaaattcggtgaaacaaattcctcggtaaaaagccccatggcttcttgcccgaaacctggccccccggtttcagcaggggcaatgagtttggaaagtggactgaccacccactccgttctcgccatcgaacgtggtcccaattcgttggcaaattccggatcagactttgggggggggggtctggggctaccgttacgcctattgagggtatcggtcggcactcagacctcccgctccgactgggtagacctggtgtcctggagccacccaggacccacgtctaagtcccagcaggttgacctggtgtctttatttcctaaacaccgggttgacctgttatccaaaaacgaccaggtagacctggtggctcaatttttaccatctaaatttccccccaatttggcagaaaatgatttggctttgctggtgaacttagagttctacagatcggatttgcatgtgtatgagtgtgttcattttgctgcacattgggagggattaagtggtttgcctgaggtgtatgaacaacttgcaccacaaccgtgtgtgggagaaactttacattctagcctcccacgagacagtgaactgtttgtgcctgaagaggggagcagcgagaaggagagcgaggacgcgccaaaaacatctcctccgacgcctgggaaacatggtttggaacagactggggaggaaaaagtgatggtgactgttcctgacaaaaatccaccttgtccttgctgtggtacccgggtaaactctgtgttgaatctgattgaacatctgaaagtgtcacacgggaaaaggggggtttgttttcggtgtgcaaaatgtggaaaggaaaatagtaactatcacagtgttgtttgtcattttaagaaatgcaggggtccagagacggagaaagccccagctggggagtggatttgtgaggtatgcaacagagattttacaaccaaaattggcctgggacaacacaagagattggcacacccagcagtgagaaatcaggaaaggatcgttgcttcccaaccgaaagaaacatcaaatagaggtgctcacaaaaggtgctggacaaaggaggaggaagaattactaataagactggaggctcagttcgagggaaacaaaaatattaataagcttattgcagaacacataaccaccaaaacagctaagcagatcagtgacaaaaggcgattgctgtccagaaagccagcagaggagccacgtgaggagcctggaacgtgtcatcacaccaggagagcagctgcgagcctgagaacggagcctgagatgagtcatcacgcccaggcagaggacagagataatggacctgggagacgccctctgccaggcagggcagctgccggagggagaacaatggacgagataagacgccaccctgataagggcaacggacagcagagacccaccaagcaaaaatcagaagaacagctgcaggcttactataaaaagacactagaggaacgactttcagctggggcacttaacaccttcccccgagcattcaagcaggtaatggaaggccgggatataaagctagtaatcaatcagacagcgcaggactacttcggatgcctggaatccataagccaaataagaacggcaacccgagataaaaaggacacggtgacccggaagaaacacccaaagaaaccttttcagaagtggatgaagaagagagcaatcaaaaaaggtaattatcttcggttccagcgtttattttatcttgatagagggaaactggctaaaatcattttagatgatattgaatgcttgtcttgtgacataccactcagtgaaatttattcggtttttaaaacaagatgggaaacaactggtagctttaaaagccttggggactttaaaacttacgggaaggctgacaacactgccttcagagaattaattacggctaaagaaattgagaaaaatgtgcaggaaatgagcaaaggctcggctcccggtccagacgggattactcttggggacgtcgtaaagatggatcccgagggctcccggaccatggagattttcaatttatggttaacaactggtaaaatcccggacatggtgagggggtgcagaaccgttttgattccaaaatcatcagacccggatcgtttgaaagacattaataactggagacctatcacgatcggttccatcttgctgagactgttctccaggattgtaacagctaggctgagcaaagcgtgccccctgaacccaaggcaaagaggctttatcagagcggcgggatgctctgaaaacttaaaactcctgcaaactataatttggtcggccaaaagagaacacagaccactgggtgttgtattcgtggacatcgccaaggcttttgacaccgtaagccaccagcacatcattcatgctttgcagcaaagagaggtggatccccacatcgtcggtctggtgagcaatatgtacgagaacatcagtacgtatatcaccacaaagaggaacacacacacagacaaaatccagatccgggttggagtaaagcagggtgacccgatgtcgccccttttatttaacctggcaatggaccctctattatgcaagctggaagagagtggcaaaggataccaccgaggacagagcagcatcacagcgatggcatttgcagacgatctggttttgctgagcgactcctgggaaaatatgaatacaaatattagcatactggagaccttctgcaatctgaccggactcaaaacacaggggcaaaagtgccacggcttttacatcaagccgacaaaggactcttacaccatcaatgactgcgctgcctggactatcaacggcacacccctgaacatgatcgaccccggcgaatctgagaaatacctcggcctgcagtttgacccgtggattggaatagcaaggtccggtctctccacaaaactagatttttggcttcagcggatcgatcaagcaccacttaaacctctgcagaaactggatattctcaaaacatacaccatccctcggctgatctacatagctgaccactcagaagtgaaaactgcactactcgaaacccttgaccagaagatccggacagcggtcaaggaatggcttcacctacctccgtgcacctgcgatgccatcctgtactcgagcacgagagacggcggtttgggcatcaccaaattggcaggactgatccccagcgtgcaggcccgtagactgcatcggatcgcacagtcatctgacgatacgatgaaatgcttcatggaaaaagagaaaatggaacagctgcataagaaattgtggattcaagctggaggggacagagagaacataccctcgatttgggaagcaccaccgtcgagtgaaccaccaaacaacgtgagcacaaattcggaatgggaagcaccgacccagaaagataaatttccaaagccttgcaattggaggaaaaacgaattcaaaaaatggaccaaattggcatcccaaggccgcggaattgtaaattttgaaagagacaaaattagtaaccattggatccaatactacagacgcatacctcacaggaaactcctcactgcactacaactcagggccaacgtttaccccacgagagaatttctagccaggggtagacaagaccaatacatcaaggcgtgtaggcactgcgatgcggacattgaatcctgcgcccacatcatcggcaactgcccagtgacacaggacgcccgaatcaagaggcacaataagatctgcgaactgcttctcgaggaggcgaagaagaaggactgggtagtgttcaaggaaccgcacataagggattccaacaaggaactgtacaaacctgacctgatatttgtgaaggatgcccgtgcacttgtcgtggatgtgacagtacggtatgaagcagccaaatcatcgctggaggaagccgctgcagagaaagtgagaaagtacaaacacctggaaacggaagtaagacatctcacgaatgcaaaggacgttacttttgtgggctttcccctaggagcgcgggggaaatggcaccaagataactttaaacttttgactgagcttggcctctccaaatcgaggcaagtgaaaatggcagagactttttccacagtagcgctcttttcatctgtggacattgtacatatgtttgccagtagggccagaaaatctatggttatgtgataataggctgccttctgcggggcttgccttctggccatgcccttcttctctcccttgcacctgtacctcttggtctttgaataaagcctgagtaggaaggaccggtagacatgataagatacattgatgagtttggacaaaccacaactagaatgcagtgaaaaaaatgctttatttgtgaaatttgtgatgctattgctttatttgtaaccattataagctgcaataaacaagttaacaacaacaaaaaaaaaaaaaaaaaaaaaaaaaaaaaaacgttgactaaaaaaaaaaaaaaaaaaaaaaaaaaaaaaaaaaaaaaaaaaaaaaaaaaaaaaaaaaaaaaaaaaaaaa

SEQ ID NO: 11558 - DNA, 4703 bp, synthetic construct
  source 1..4703: mol_type = other DNA
ggtctagttacaactgggcatcgctgcagagatcgcacctcctcgtggtcccgctggtagcccttcgaagggtgactaagtcgatctctgccccaggtacggagccgttgggactcaccagtccaacgtaactcctgcctaaattcggtgaaacaaattcctcggtaaaaagccccatggcttcttgcccgaaacctggccccccggtttcagcaggggcaatgagtttggaaagtggactgaccacccactccgttctcgccatcgaacgtggtcccaattcgttggcaaattccggatcagactttgggggggggggtctggggctaccgttacgcctattgagggtatcggtcggcactcagacctcccgctccgactgggtagacctggtgtcctggagccacccaggacccacgtctaagtcccagcaggttgacctggtgtctttatttcctaaacaccgggttgacctgttatccaaaaacgaccaggtagacctggtggctcaatttttaccatctaaatttccccccaatttggcagaaaatgatttggctttgctggtgaacttagagttctacagatcggatttgcatgtgtatgagtgtgttcattttgctgcacattgggagggattaagtggtttgcctgaggtgtatgaacaacttgcaccacaaccgtgtgtgggagaaactttacattctagcctcccacgagacagtgaactgtttgtgcctgaagaggggagcagcgagaaggagagcgaggacgcgccaaaaacatctcctccgacgcctgggaaacatggtttggaacagactggggaggaaaaagtgatggtgactgttcctgacaaaaatccaccttgtccttgctgtggtacccgggtaaactctgtgttgaatctgattgaacatctgaaagtgtcacacgggaaaaggggggtttgttttcggtgtgcaaaatgtggaaaggaaaatagtaactatcacagtgttgtttgtcattttaagaaatgcaggggtccagagacggagaaagccccagctggggagtggatttgtgaggtatgcaacagagattttacaaccaaaattggcctgggacaacacaagagattggcacacccagcagtgagaaatcaggaaaggatcgttgcttcccaaccgaaagaaacatcaaatagaggtgctcacaaaaggtgctggacaaaggaggaggaagaattactaataagactggaggctcagttcgagggaaacaaaaatattaataagcttattgcagaacacataaccaccaaaacagctaagcagatcagtgacaaaaggcgattgctgtccagaaagccagcagaggagccacgtgaggagcctggaacgtgtcatcacaccaggagagcagctgcgagcctgagaacggagcctgagatgagtcatcacgcccaggcagaggacagagataatggacctgggagacgccctctgccaggcagggcagctgccggagggagaacaatggacgagataagacgccaccctgataagggcaacggacagcagagacccaccaagcaaaaatcagaagaacagctgcaggcttactataaaaagacactagaggaacgactttcagctggggcacttaacaccttcccccgagcattcaagcaggtaatggaaggccgggatataaagctagtaatcaatcagacagcgcaggactacttcggatgcctggaatccataagccaaataagaacggcaacccgagataaaaaggacacggtgacccgggagaaacacccaaagaaaccttttcagaagtggatgaaggacagagcaatcaaaaaaggtaattatcttcggttccagcgtttattttatcttgatagagggaaactggctaaaatcattttagatgatattgaatgcttgtcttgtgacataccactcagtgaaatttattcggtttttaaaacaagatgggaaacaactggtagctttaaaagccttggggactttaaaacttacgggaaggctgacaacactgccttcagagaattaattacggctaaagaaattgagaaaaatgtgcaggaaatgagcaaaggctcggctcccggtccagacgggattactcttggggacgtcgtaaagatggatcccgagggctcccggaccatggagattttcaatttatggttaacaactggtaaaatcccggacatggtgagggggtgcagaaccgttttgattccaaaatcatcagacccggatcgtttgaaagacattaataactggagacctatcacgatcggttccatcttgctgagactgttctccaggattgtaacagctaggctgagcaaagcgtgccccctgaacccaaggcaaagaggctttatcagagcggcgggatgctctgaaaacttaaaactcctgcaaactataatttggtcggccaaaagagaacacagaccactgggtgttgtattcgtggacatcgccaaggcttttgacaccgtaagccaccagcacatcattcatgctttgcagcaaagagaggtggatccccacatcgtcggtctggtgagcaatatgtacgagaacatcagtacgtatatcaccacaaagaggaacacacacacagacaaaatccagatccgggttggagtaaagcagggtgacccgatgtcgccccttttatttaacctggcaatggaccctctattatgcaagctggaagagagtggcaaaggataccaccgaggacagagcagcatcacagcgatggcatttgcagacgatctggttttgctgagcgactcctgggaaggcatgaatacaaatattagcatactggagaccttctgcaatctgaccggactcaaaacacaggggcaaaagtgccacggcttttacatcaagccgacaaagaagtcttacaccatcaatgactgcgctgcctggactatcaacggcacacccctgaacatgatcgaccccggcgaatctgagaaatacctcggcctgcagtttgacccgtggattggaatagcaaggtccggtctctccacaaaactagatttttggcttcagcggatcgatcaagcaccacttaaacctctgcagaaactggatattctcaaaacatacaccatccctcggctgatctacatagctgaccactcagaagtgaaaactgcactactcgaaacccttgaccagaagatccggacagcggtcaaggaatggcttcacctacctccgtgcacctgcgatgccatcctgtactcgagcacgagagacggcggtttgggcatcaccaaattggcaggactgatccccagcgtgcaggcccgtagactgcatcggatcgcacagtcatctgacgatacgatgaaatgcttcatggaaaaagagaaaatggaacagctgcataagaaattgtggattcaagctggaggggacagagagaacataccctcgatttgggaagcaccaccgtcgagtgaaccaccaaacaacgtgagcacaaattcggaatgggaagcaccgacccagaaagataaatttccaaagccttgcaattggaggaaaaacgaattcaaaaaatggaccaaattggcatcccaaggccgcggaattgtaaattttgaaagagacaaaattagtaaccattggatccaatactacagacgcatacctcacaggaaactcctcactgcactacaactcagggccaacgtttaccccacgagagaatttctagccaggggtagacaagaccaatacatcaaggcgtgtaggcactgcgatgcggacattgaatcctgcgcccacatcatcggcaactgcccagtgacacaggacgcccgaatcaagaggcacaataagatctgcgaactgcttctcgaggaggcgaagaagaaggactgggtagtgttcaaggaaccgcacataagggattccaacaaggaactgtacaaacctgacctgatatttgtgaaggatgcccgtgcacttgtcgtggatgtgacagtacggtatgaagcagccaaatcatcgctggaggaagccgctgcagagaaagtgagaaagtacaaacacctggaaacggaagtaagacatctcacgaatgcaaaggacgttacttttgtgggctttcccctaggagcgcgggggaaatggcaccaagataactttaaacttttgactgagcttggcctctccaaatcgaggcaagtgaaaatggcagagactttttccacagtagcgctcttttcatctgtggacattgtacatatgtttgccagtagggccagaaaatctatggttatgtgataataggctgccttctgcggggcttgccttctggccatgcccttcttctctcccttgcacctgtacctcttggtctttgaataaagcctgagtaggaaggaccggtagacatgataagatacattgatgagtttggacaaaccacaactagaatgcagtgaaaaaaatgctttatttgtgaaatttgtgatgctattgctttatttgtaaccattataagctgcaataaacaagttaacaacaacaaaaaaaaaaaaaaaaaaaaaaaaaaaaaaacgttgactaaaaaaaaaaaaaaaaaaaaaaaaaaaaaaaaaaaaaaaaaaaaaaaaaaaaaaaaaaaaaaaaaaaaaa

SEQ ID NO: 11559 - DNA, 4703 bp, synthetic construct
  source 1..4703: mol_type = other DNA
ggtctagttacaactgggcatcgctgcagagatcgcacctcctcgtggtcccgctggtagcccttcgaagggtgactaagtcgatctctgccccaggtacggagccgttgggactcaccagtccaacgtaactcctgcctaaattcggtgaaacaaattcctcggtaaaaagccccatggcttcttgcccgaaacctggccccccggtttcagcaggggcaatgagtttggaaagtggactgaccacccactccgttctcgccatcgaacgtggtcccaattcgttggcaaattccggatcagactttgggggggggggtctggggctaccgttacgcctattgagggtatcggtcggcactcagacctcccgctccgactgggtagacctggtgtcctggagccacccaggacccacgtctaagtcccagcaggttgacctggtgtctttatttcctaaacaccgggttgacctgttatccaaaaacgaccaggtagacctggtggctcaatttttaccatctaaatttccccccaatttggcagaaaatgatttggctttgctggtgaacttagagttctacagatcggatttgcatgtgtatgagtgtgttcattttgctgcacattgggagggattaagtggtttgcctgaggtgtatgaacaacttgcaccacaaccgtgtgtgggagaaactttacattctagcctcccacgagacagtgaactgtttgtgcctgaagaggggagcagcgagaaggagagcgaggacgcgccaaaaacatctcctccgacgcctgggaaacatggtttggaacagactggggaggaaaaagtgatggtgactgttcctgacaaaaatccaccttgtccttgctgtggtacccgggtaaactctgtgttgaatctgattgaacatctgaaagtgtcacacgggaaaaggggggtttgttttcggtgtgcaaaatgtggaaaggaaaatagtaactatcacagtgttgtttgtcattttaagaaatgcaggggtccagagacggagaaagccccagctggggagtggatttgtgaggtatgcaacagagattttacaaccaaaattggcctgggacaacacaagagattggcacacccagcagtgagaaatcaggaaaggatcgttgcttcccaaccgaaagaaacatcaaatagaggtgctcacaaaaggtgctggacaaaggaggaggaagaattactaataagactggaggctcagttcgagggaaacaaaaatattaataagcttattgcagaacacataaccaccaaaacagctaagcagatcagtgacaaaaggcgattgctgtccagaaagccagcagaggagccacgtgaggagcctggaacgtgtcatcacaccaggagagcagctgcgagcctgagaacggagcctgagatgagtcatcacgcccaggcagaggacagagataatggacctgggagacgccctctgccaggcagggcagctgccggagggagaacaatggacgagataagacgccaccctgataagggcaacggacagcagagacccaccaagcaaaaatcagaagaacagctgcaggcttactataaaaagacactagaggaacgactttcagctggggcacttaacaccttcccccgagcattcaagcaggtaatggaaggccgggatataaagctagtaatcaatcagacagcgcaggactacttcggatgcctggaatccataagccaaataagaacggcaacccgagataaaaaggacacggtgacccggaagaaacacccaaagaaaccttttcagaagtggatgaaggacagagcaatcaaaaaaggtaattatcttcggttccagcgtttattttatcttgatagagggaaactggctaaaatcattttagatgatattgaatgcttgtcttgtgacataccactcagtgaaatttattcggtttttaaaacaagatgggaaacaactggtagctttaaaagccttggggactttaaaacttacgggaaggctgacaacactgccttcagagaattaattacggctaaagaaattgagaaaaatgtgcaggaaatgagcaaaggctcggctcccggtccagacgggattactcttggggacgtcgtaaagatggatcccgagggctcccggaccatggagattttcaatttatggttaacaactggtaaaatcccggacatggtgagggggtgcagaaccgttttgattccaaaatcatcagacccggatcgtttgaaagacattaataactggagacctatcacgatcggttccatcttgctgagactgttctccaggattgtaacagctaggctgagcaaagcgtgccccctgaacccaaggcaaagaggctttatcagagcggcgggatgctctgaaaacttaaaactcctgcaaactataatttggtcggccaaaagagaacacagaccactgggtgttgtattcgtggacatcgccaaggcttttgacaccgtaagccaccagcacatcattcatgctttgcagcaaagagaggtggatccccacatcgtcggtctggtgagcaatatgtacgagaacatcagtacgtatatcaccacaaagaggaacacacacacagacaaaatccagatccgggttggagtaaagcagggtgacccgatgtcgccccttttatttaacctggcaatggaccctctattatgcaagctggaagagagtggcaaaggataccaccgaggacagagcagcatcacagcgatggcatttgcagacgatctggttttgctgagcgactcctgggaaaatatgaatacaaatattagcatactggagaccttctgcaatctgaccggactcaaaacacaggggcaaaagtgccacggcttttacatcaagccgacaaagaagtcttacaccatcaatgactgcgctgcctggactatcaacggcacacccctgaacatgatcgaccccggcgaatctgagaaatacctcggcctgcagtttgacccgtggattggaatagcaaggtccggtctctccacaaaactagatttttggcttcagcggatcgatcaagcaccacttaaacctctgcagaaactggatattctcaaaacatacaccatccctcggctgatctacatagctgaccactcagaagtgaaaactgcactactcgaaacccttgaccagaagatccggacagcggtcaaggaatggcttcacctacctccgtgcacctgcgatgccatcctgtactcgagcacgagagacggcggtttgggcatcaccaaattggcaggactgatccccagcgtgcaggcccgtagactgcatcggatcgcacagtcatctgacgatacgatgaaatgcttcatggaaaaagagaaaatggaacagctgcataagaaattgtggattcaagctggaggggacagagagaacataccctcgatttgggaagcaccaccgtcgagtgaaccaccaaacaacgtgagcacaaattcggaatgggaagcaccgacccagaaagataaatttccaaagccttgcaattggaggaaaaacgaattcaaaaaatggaccaaattggcatcccaaggccgcggaattgtaaattttgaaagagacaaaattagtaaccattggatccaatactacagacgcatacctcacaggaaactcctcactgcactacaactcagggccaacgtttaccccacgagagaatttctagccaggggtagacaagaccaatacatcaaggcgtgtaggcactgcgatgcggacattgaatcctgcgcccacatcatcggcaactgcccagtgacacaggacgcccgaatcaagaggcacaataagatctgcgaactgcttctcgaggaggcgaagaagaaggactgggtagtgttcaaggaaccgcacataagggattccaacaaggaactgtacaaacctgacctgatatttgtgaaggatgcccgtgcacttgtcgtggatgtgacagtacggtatgaagcagccaaatcatcgctggaggaagccgctgcagagaaagtgagaaagtacaaacacctggaaacggaagtaagacatctcacgaatgcaaaggacgttacttttgtgggctttcccctaggagcgcgggggaaatggcaccaagataactttaaacttttgactgagcttggcctctccaaatcgaggcaagtgaaaatggcagagactttttccacagtagcgctcttttcatctgtggacattgtacatatgtttgccagtagggccagaaaatctatggttatgtgataataggctgccttctgcggggcttgccttctggccatgcccttcttctctcccttgcacctgtacctcttggtctttgaataaagcctgagtaggaaggaccggtagacatgataagatacattgatgagtttggacaaaccacaactagaatgcagtgaaaaaaatgctttatttgtgaaatttgtgatgctattgctttatttgtaaccattataagctgcaataaacaagttaacaacaacaaaaaaaaaaaaaaaaaaaaaaaaaaaaaaacgttgactaaaaaaaaaaaaaaaaaaaaaaaaaaaaaaaaaaaaaaaaaaaaaaaaaaaaaaaaaaaaaaaaaaaaaa

SEQ ID NO: 11560 - DNA, 4703 bp, synthetic construct
  source 1..4703: mol_type = other DNA
ggtctagttacaactgggcatcgctgcagagatcgcacctcctcgtggtcccgctggtagcccttcgaagggtgactaagtcgatctctgccccaggtacggagccgttgggactcaccagtccaacgtaactcctgcctaaattcggtgaaacaaattcctcggtaaaaagccccatggcttcttgcccgaaacctggccccccggtttcagcaggggcaatgagtttggaaagtggactgaccacccactccgttctcgccatcgaacgtggtcccaattcgttggcaaattccggatcagactttgggggggggggtctggggctaccgttacgcctattgagggtatcggtcggcactcagacctcccgctccgactgggtagacctggtgtcctggagccacccaggacccacgtctaagtcccagcaggttgacctggtgtctttatttcctaaacaccgggttgacctgttatccaaaaacgaccaggtagacctggtggctcaatttttaccatctaaatttccccccaatttggcagaaaatgatttggctttgctggtgaacttagagttctacagatcggatttgcatgtgtatgagtgtgttcattttgctgcacattgggagggattaagtggtttgcctgaggtgtatgaacaacttgcaccacaaccgtgtgtgggagaaactttacattctagcctcccacgagacagtgaactgtttgtgcctgaagaggggagcagcgagaaggagagcgaggacgcgccaaaaacatctcctccgacgcctgggaaacatggtttggaacagactggggaggaaaaagtgatggtgactgttcctgacaaaaatccaccttgtccttgctgtggtacccgggtaaactctgtgttgaatctgattgaacatctgaaagtgtcacacgggaaaaggggggtttgttttcggtgtgcaaaatgtggaaaggaaaatagtaactatcacagtgttgtttgtcattttaagaaatgcaggggtccagagacggagaaagccccagctggggagtggatttgtgaggtatgcaacagagattttacaaccaaaattggcctgggacaacacaagagattggcacacccagcagtgagaaatcaggaaaggatcgttgcttcccaaccgaaagaaacatcaaatagaggtgctcacaaaaggtgctggacaaaggaggaggaagaattactaataagactggaggctcagttcgagggaaacaaaaatattaataagcttattgcagaacacataaccaccaaaacagctaagcagatcagtgacaaaaggcgattgctgtccagaaagccagcagaggagccacgtgaggagcctggaacgtgtcatcacaccaggagagcagctgcgagcctgagaacggagcctgagatgagtcatcacgcccaggcagaggacagagataatggacctgggagacgccctctgccaggcagggcagctgccggagggagaacaatggacgagataagacgccaccctgataagggcaacggacagcagagacccaccaagcaaaaatcagaagaacagctgcaggcttactataaaaagacactagaggaacgactttcagctggggcacttaacaccttcccccgagcattcaagcaggtaatggaaggccgggatataaagctagtaatcaatcagacagcgcaggactacttcggatgcctggaatccataagccaaataagaacggcaacccgagataaaaaggacacggtgacccggaagaaacacccaaagaaaccttttcagaagtggatgaaggacagagcaatcaaaaaaggtaattatcttcggttccagcgtttattttatcttgatagagggaaactggctaaaatcattttagatgatattgaatgcttgtcttgtgacataccactcagtgaaatttattcggtttttaaaacaagatgggaaacaactggtagctttaaaagccttggggactttaaaacttacgggaaggctgacaacactgccttcagagaattaattacggctaaagaaattgagaaaaatgtgcaggaaatgagcaaaggctcggctcccggtccagacgggattactcttggggacgtcgtaaagatggatcccgagggctcccggaccatggagattttcaatttatggttaacaactggtaaaatcccggacatggtgagggggtgcagaaccgttttgattccaaaatcatcagacccggatcgtttgaaagacattaataactggagacctatcacgatcggttccatcttgctgagactgttctccaggattgtaacagctaggctgagcaaagcgtgccccctgaacccaaggcaaagaggctttatcagagcggcgggatgctctgaaaacttaaaactcctgcaaactataatttggtcggccaaaagagaacacagaccactgggtgttgtattcgtggacatcgccaaggcttttgacaccgtaagccaccagcacatcattcatgctttgcagcaaagagaggtggatccccacatcgtcggtctggtgagcaatatgtacgagaacatcagtacgtatatcaccacaaagaggaacacacacacagacaaaatccagatccgggttggagtaaagcagggtgacccgatgtcgccccttttatttaacctggcaatggaccctctattatgcaagctggaagagagtggcaaaggataccaccgaggacagagcagcatcacagcgatggcatttgcagacgatctggttttgctgagcgactcctgggaaggcatgaatacaaatattagcatactggagaccttctgcaatctgaccggactcaaaacacaggggcaaaagtgccacggcttttacatcaagccgacaaagaagtcttacaccatcaatgactgcgctgcctggactatcaacggcacacccctgaacatgatcgaccccggcgaatctgagaaatacctcggcctgcagtttgacccgtggattggaatagcaaggtccggtctctccacaaaactagatttttggcttcagcggatcgatcaagcaccacttaaacctctgcagaaactggatattctcaaaacatacaccatccctcggctgatctacatagctgaccactcagaagtgaaaactgcactactcgaaacccttgaccagaagatccggacagcggtcaaggaatggcttcacctacctccgtgcacctgcgatgccatcctgtactcgagcacgagagacggcggtttgggcatcaccaaattggcaggactgatccccagcgtgcaggcccgtagactgcatcggatcgcacagtcatctgacgatacgatgaaatgcttcatggaaaaagagaaaatggaacagctgcataagaaattgtggattcaagctggaggggacagagagaacataccctcgatttgggaagcaccaccgtcgagtgaaccaccaaacaacgtgagcacaaattcggaatgggaagcaccgacccagaaagataaatttccaaagccttgcaattggaggaaaaacgaattcaaaaaatggaccaaattggcatcccaaggccgcggaattgtaaattttgaaagagacaaaattagtaaccattggatccaatactacagacgcatacctcacaggaaactcctcactgcactacaactcagggccaacgtttaccccacgagagaatttctagccaggggtagacaagaccaatacatcaaggcgtgtaggcactgcgatgcggacattgaatcctgcgcccacatcatcggcaactgcccagtgacacaggacgcccgaatcaagaggcacaataagatctgcgaactgcttctcgaggaggcgaagaagaaggactgggtagtgttcaaggaaccgcacataagggattccaacaaggaactgtacaaacctgacctgatatttgtgaaggatgcccgtgcacttgtcgtggatgtgacagtacggtatgaagcagccaaatcatcgctggaggaagccgctgcagagaaagtgagaaagtacaaacacctggaaacggaagtaagacatctcacgaatgcaaaggacgttacttttgtgggctttcccctaggagcgcgggggaaatggcaccaagataactttaaacttttgactgagcttggcctctccaaatcgaggcaagtgaaaatggcagagactttttccacagtagcgctcttttcatctgtggacattgtacatatgtttgccagtagggccagaaaatctatggttatgtgataataggctgccttctgcggggcttgccttctggccatgcccttcttctctcccttgcacctgtacctcttggtctttgaataaagcctgagtaggaaggaccggtagacatgataagatacattgatgagtttggacaaaccacaactagaatgcagtgaaaaaaatgctttatttgtgaaatttgtgatgctattgctttatttgtaaccattataagctgcaataaacaagttaacaacaacaaaaaaaaaaaaaaaaaaaaaaaaaaaaaaacgttgactaaaaaaaaaaaaaaaaaaaaaaaaaaaaaaaaaaaaaaaaaaaaaaaaaaaaaaaaaaaaaaaaaaaaaa

SEQ ID NO: 11561 - DNA, 4703 bp, synthetic construct
  source 1..4703: mol_type = other DNA
ggtctagttacaactgggcatcgctgcagagatcgcacctcctcgtggtcccgctggtagcccttcgaagggtgactaagtcgatctctgccccaggtacggagccgttgggactcaccagtccaacgtaactcctgcctaaattcggtgaaacaaattcctcggtaaaaagccccatggcttcttgcccgaaacctggccccccggtttcagcaggggcaatgagtttggaaagtggactgaccacccactccgttctcgccatcgaacgtggtcccaattcgttggcaaattccggatcagactttgggggggggggtctggggctaccgttacgcctattgagggtatcggtcggcactcagacctcccgctccgactgggtagacctggtgtcctggagccacccaggacccacgtctaagtcccagcaggttgacctggtgtctttatttcctaaacaccgggttgacctgttatccaaaaacgaccaggtagacctggtggctcaatttttaccatctaaatttccccccaatttggcagaaaatgatttggctttgctggtgaacttagagttctacagatcggatttgcatgtgtatgagtgtgttcattttgctgcacattgggagggattaagtggtttgcctgaggtgtatgaacaacttgcaccacaaccgtgtgtgggagaaactttacattctagcctcccacgagacagtgaactgtttgtgcctgaagaggggagcagcgagaaggagagcgaggacgcgccaaaaacatctcctccgacgcctgggaaacatggtttggaacagactggggaggaaaaagtgatggtgactgttcctgacaaaaatccaccttgtccttgctgtggtacccgggtaaactctgtgttgaatctgattgaacatctgaaagtgtcacacgggaaaaggggggtttgttttcggtgtgcaaaatgtggaaaggaaaatagtaactatcacagtgttgtttgtcattttaagaaatgcaggggtccagagacggagaaagccccagctggggagtggatttgtgaggtatgcaacagagattttacaaccaaaattggcctgggacaacacaagagattggcacacccagcagtgagaaatcaggaaaggatcgttgcttcccaaccgaaagaaacatcaaatagaggtgctcacaaaaggtgctggacaaaggaggaggaagaattactaataagactggaggctcagttcgagggaaacaaaaatattaataagcttattgcagaacacataaccaccaaaacagctaagcagatcagtgacaaaaggcgattgctgtccagaaagccagcagaggagccacgtgaggagcctggaacgtgtcatcacaccaggagagcagctgcgagcctgagaacggagcctgagatgagtcatcacgcccaggcagaggacagagataatggacctgggagacgccctctgccaggcagggcagctgccggagggagaacaatggacgagataagacgccaccctgataagggcaacggacagcagagacccaccaagcaaaaatcagaagaacagctgcaggcttactataaaaagacactagaggaacgactttcagctggggcacttaacaccttcccccgagcattcaagcaggtaatggaaggccgggatataaagctagtaatcaatcagacagcgcaggactacttcggatgcctggaatccataagccaaataagaacggcaacccgagataaaaaggacacggtgacccggaagaaacacccaaagaaaccttttcagaagtggatgaagaagagagcaatcaaaaaaggtaattatcttcggttccagcgtttattttatcttgatagagggaaactggctaaaatcattttagatgatattgaatgcttgtcttgtgacataccactcagtgaaatttattcggtttttaaaacaagatgggaaacaactggtagctttaaaagccttggggactttaaaacttacgggaaggctgacaacactgccttcagagaattaattacggctaaagaaattgagaaaaatgtgcaggaaatgagcaaaggctcggctcccggtccagacgggattactcttggggacgtcgtaaagatggatcccgagggctcccggaccatggagattttcaatttatggttaacaactggtaaaatcccggacatggtgagggggtgcagaaccgttttgattccaaaatcatcagacccggatcgtttgaaagacattaataactggagacctatcacgatcggttccatcttgctgagactgttctccaggattgtaacagctaggctgagcaaagcgtgccccctgaacccaaggcaaagaggctttatcagagcggcgggatgctctgaaaacttaaaactcctgcaaactataatttggtcggccaaaagagaacacagaccactgggtgttgtattcgtggacatcgccaaggcttttgacaccgtaagccaccagcacatcattcatgctttgcagcaaagagaggtggatccccacatcgtcggtctggtgagcaatatgtacgagaacatcagtacgtatatcaccacaaagaggaacacacacacagacaaaatccagatccgggttggagtaaagcagggtgacccgatgtcgccccttttatttaacctggcaatggaccctctattatgcaagctggaagagagtggcaaaggataccaccgaggacagagcagcatcacagcgatggcatttgcagacgatctggttttgctgagcgactcctgggaaggcatgaatacaaatattagcatactggagaccttctgcaatctgaccggactcaaaacacaggggcaaaagtgccacggcttttacatcaagccgacaaagaagtcttacaccatcaatgactgcgctgcctggactatcaacggcacacccctgaacatgatcgaccccggcgaatctgagaaatacctcggcctgcagtttgacccgtggattggaatagcaaggtccggtctctccacaaaactagatttttggcttcagcggatcgatcaagcaccacttaaacctctgcagaaactggatattctcaaaacatacaccatccctcggctgatctacatagctgaccactcagaagtgaaaactgcactactcgaaacccttgaccagaagatccggacagcggtcaaggaatggcttcacctacctccgtgcacctgcgatgccatcctgtactcgagcacgagagacggcggtttgggcatcaccaaattggcaggactgatccccagcgtgcaggcccgtagactgcatcggatcgcacagtcatctgacgatacgatgaaatgcttcatggaaaaagagaaaatggaacagctgcataagaaattgtggattcaagctggaggggacagagagaacataccctcgatttgggaagcaccaccgtcgagtgaaccaccaaacaacgtgagcacaaattcggaatgggaagcaccgacccagaaagataaatttccaaagccttgcaattggaggaaaaacgaattcaaaaaatggaccaaattggcatcccaaggccgcggaattgtaaattttgaaagagacaaaattagtaaccattggatccaatactacagacgcatacctcacaggaaactcctcactgcactacaactcagggccaacgtttaccccacgagagaatttctagccaggggtagacaagaccaatacatcaaggcgtgtaggcactgcgatgcggacattgaatcctgcgcccacatcatcggcaactgcccagtgacacaggacgcccgaatcaagaggcacaataagatctgcgaactgcttctcgaggaggcgaagaagaaggactgggtagtgttcaaggaaccgcacataagggattccaacaaggaactgtacaaacctgacctgatatttgtgaaggatgcccgtgcacttgtcgtggatgtgacagtacggtatgaagcagccaaatcatcgctggaggaagccgctgcagagaaagtgagaaagtacaaacacctggaaacggaagtaagacatctcacgaatgcaaaggacgttacttttgtgggctttcccctaggagcgcgggggaaatggcaccaagataactttaaacttttgactgagcttggcctctccaaatcgaggcaagtgaaaatggcagagactttttccacagtagcgctcttttcatctgtggacattgtacatatgtttgccagtagggccagaaaatctatggttatgtgataataggctgccttctgcggggcttgccttctggccatgcccttcttctctcccttgcacctgtacctcttggtctttgaataaagcctgagtaggaaggaccggtagacatgataagatacattgatgagtttggacaaaccacaactagaatgcagtgaaaaaaatgctttatttgtgaaatttgtgatgctattgctttatttgtaaccattataagctgcaataaacaagttaacaacaacaaaaaaaaaaaaaaaaaaaaaaaaaaaaaaacgttgactaaaaaaaaaaaaaaaaaaaaaaaaaaaaaaaaaaaaaaaaaaaaaaaaaaaaaaaaaaaaaaaaaaaaaa

SEQ ID NO: 11562 - DNA, 4703 bp, synthetic construct
  source 1..4703: mol_type = other DNA
ggtctagttacaactgggcatcgctgcagagatcgcacctcctcgtggtcccgctggtagcccttcgaagggtgactaagtcgatctctgccccaggtacggagccgttgggactcaccagtccaacgtaactcctgcctaaattcggtgaaacaaattcctcggtaaaaagccccatggcttcttgcccgaaacctggccccccggtttcagcaggggcaatgagtttggaaagtggactgaccacccactccgttctcgccatcgaacgtggtcccaattcgttggcaaattccggatcagactttgggggggggggtctggggctaccgttacgcctattgagggtatcggtcggcactcagacctcccgctccgactgggtagacctggtgtcctggagccacccaggacccacgtctaagtcccagcaggttgacctggtgtctttatttcctaaacaccgggttgacctgttatccaaaaacgaccaggtagacctggtggctcaatttttaccatctaaatttccccccaatttggcagaaaatgatttggctttgctggtgaacttagagttctacagatcggatttgcatgtgtatgagtgtgttcattttgctgcacattgggagggattaagtggtttgcctgaggtgtatgaacaacttgcaccacaaccgtgtgtgggagaaactttacattctagcctcccacgagacagtgaactgtttgtgcctgaagaggggagcagcgagaaggagagcgaggacgcgccaaaaacatctcctccgacgcctgggaaacatggtttggaacagactggggaggaaaaagtgatggtgactgttcctgacaaaaatccaccttgtccttgctgtggtacccgggtaaactctgtgttgaatctgattgaacatctgaaagtgtcacacgggaaaaggggggtttgttttcggtgtgcaaaatgtggaaaggaaaatagtaactatcacagtgttgtttgtcattttaagaaatgcaggggtccagagacggagaaagccccagctggggagtggatttgtgaggtatgcaacagagattttacaaccaaaattggcctgggacaacacaagagattggcacacccagcagtgagaaatcaggaaaggatcgttgcttcccaaccgaaagaaacatcaaatagaggtgctcacaaaaggtgctggacaaaggaggagagggaattactaataagactggaggctcagttcgagggaaacaaaaatattaataagcttattgcagaacacataaccaccaaaacagctaagcagatcagtgacaaaaggcgattgctgtccagaaagccagcagaggagccacgtatggagcctggaacgtgtcatcacaccaggagagcagctgcgagcctgagaacggagcctgagatgagtcatcacgcccaggcagaggacagagataatggacctgggagacgccctctgccaggcagggcagctgccggagggagaacaatggacgagataagacgccaccctgataagggcaacggacagcagagacccaccaagcaaaaatcagaagaacagctgcaggcttactataaaaagacactagaggaacgactttcagctggggcacttaacaccttcccccgagcattcaagcaggtaatggaaggccgggatataaagctagtaatcaatcagacagcgcaggactacttcggatgcctggaatccataagccaaataagaacggcaacccgagataaaaaggacacggtgacccgggagaaacacccaaagaaaccttttcagaagtggatgaagaagagagcaatcaaaaaaggtaattatcttcggttccagcgtttattttatcttgatagagggaaactggctaaaatcattttagatgatattgaatgcttgtcttgtgacataccactcagtgaaatttattcggtttttaaaacaagatgggaaacaactggtagctttaaaagccttggggactttaaaacttacgggaaggctgacaacactgccttcagagaattaattacggctaaagaaattgagaaaaatgtgcaggaaatgagcaaaggctcggctcccggtccagacgggattactcttggggacgtcgtaaagatggatcccgagttttcccggaccatggagattttcaatttatggttaacaactggtaaaatcccggacatggtgagggggtgcagaaccgttttgattccaaaatcatcagacccggatcgtttgaaagacattaataactggagacctatcacgatcggttccatcttgctgagactgttctccaggattgtaacagctaggctgagcaaagcgtgccccctgaacccaaggcaaagaggctttatcagagcggcgggatgctctgaaaacttaaaactcctgcaaactataatttggtcggccaaaagagaacacagaccactgggtgttgtattcgtggacatcgccaaggcttttgacaccgtaagccaccagcacatcattcatgctttgcagcaaagagaggtggatccccacatcgtcggtctggtgagcaatatgtacgagaacatcagtacgtatatcaccacaaagaggaacacacacacagacaaaatccagatccgggttggagtaaagcagggtgacccgatgtcgccccttttatttaacctggcaatggaccctctattatgcaagctggaagagagtggcaaaggataccaccgaggacagagcagcatcacagcgatggcatttgcagacgatctggttttgctgagcgactcctgggaaaatatgaatacaaatattagcatactggagaccttctgcaatctgaccggactcaaaacacaggggcaaaagtgccacggcttttacatcaagccgacaaagaagtcttacaccatcaatgactgcgctgcctggactatcaacggcacacccctgaacatgatcgaccccggcgaatctgagaaatacctcggcctgcagtttgacccgtggattggaatagcaaggtccggtctctccacaaaactagatttttggcttcagcggatcgatcaagcaccacttaaacctctgcagaaaactgatattctcaaaacatacaccatccctcggctgatctacatagctgaccactcagaagtgaaaactgcactactcgaaacccttgaccagaagatccggacagcggtcaaggaatggcttcacctacctccgtgcacctgcgatgccatcctgtactcgagcacgagagacggcggtttgggcatcaccaaattggcaggactgatccccagcgtgcaggcccgtagactgcatcggatcgcacagtcatctgacgatacgatgaaatgcttcatggaaaaagagaaaatggaacagctgcataagaaattgtggattcaagctggaggggacagagagaacataccctcgatttgggaagcaccaccgtcgagtgaaccaccaaacaacgtgagcacaaattcggaatgggaagcaccgacccagaaagataaatttccaaagccttgcaattggaggaaaaacgaattcaaaaaatggaccaaattggcatcccaaggccgcggaattgtaaattttgaaagagacaaaattagtaaccattggatccaatactacagacgcatacctcacaggaaactcctcactgcactacaactcagggccaacgtttaccccacgagagaatttctagccaggggtagacaagaccaatacatcaaggcgtgtaggcactgcgatgcggacaacgaatcctgcgcccacatcatcggcaactgcccagtgacacaggacgcccgaatcaagaggcacaattacatctgcgaactgcttctcgaggaggcgaagaagaaggactgggtagtgttcaaggaaccgcacataagggattccaacaaggaactgtacaaacctgacctgatatttgtgaaggatgcccgtgcacttgtcgtggatgtgacagtacggtatgaagcagccaaatcatcgctggaggaagccgctgcagagaaagtgagaaagtacaaacacctggaaacggaagtaagacatctcacgaatgcaaaggacgttacttttgtgggctttcccctaggagcgcgggggaaatggcaccaagataactttaaacttttgactgagcttggcctctccaaatcgaggcaagtgaaaatggcagagactttttccacagtagcgctcttttcatctgtggacattgtacatatgtttgccagtagggccagaaaatctatggttatgtgataataggctgccttctgcggggcttgccttctggccatgcccttcttctctcccttgcacctgtacctcttggtctttgaataaagcctgagtaggaaggaccggtagacatgataagatacattgatgagtttggacaaaccacaactagaatgcagtgaaaaaaatgctttatttgtgaaatttgtgatgctattgctttatttgtaaccattataagctgcaataaacaagttaacaacaacaaaaaaaaaaaaaaaaaaaaaaaaaaaaaaacgttgactaaaaaaaaaaaaaaaaaaaaaaaaaaaaaaaaaaaaaaaaaaaaaaaaaaaaaaaaaaaaaaaaaaaaaa

SEQ ID NO: 11563 - DNA, 4703 bp, synthetic construct
  source 1..4703: mol_type = other DNA
ggtctagttacaactgggcatcgctgcagagatcgcacctcctcgtggtcccgctggtagcccttcgaagggtgactaagtcgatctctgccccaggtacggagccgttgggactcaccagtccaacgtaactcctgcctaaattcggtgaaacaaattcctcggtaaaaagccccatggcttcttgcccgaaacctggccccccggtttcagcaggggcaatgagtttggaaagtggactgaccacccactccgttctcgccatcgaacgtggtcccaattcgttggcaaattccggatcagactttgggggggggggtctggggctaccgttacgcctattgagggtatcggtcggcactcagacctcccgctccgactgggtagacctggtgtcctggagccacccaggacccacgtctaagtcccagcaggttgacctggtgtctttatttcctaaacaccgggttgacctgttatccaaaaacgaccaggtagacctggtggctcaatttttaccatctaaatttccccccaatttggcagaaaatgatttggctttgctggtgaacttagagttctacagatcggatttgcatgtgtatgagtgtgttcattttgctgcacattgggagggattaagtggtttgcctgaggtgtatgaacaacttgcaccacaaccgtgtgtgggagaaactttacattctagcctcccacgagacagtgaactgtttgtgcctgaagaggggagcagcgagaaggagagcgaggacgcgccaaaaacatctcctccgacgcctgggaaacatggtttggaacagactggggaggaaaaagtgatggtgactgttcctgacaaaaatccaccttgtccttgctgtggtacccgggtaaactctgtgttgaatctgattgaacatctgaaagtgtcacacgggaaaaggggggtttgttttcggtgtgcaaaatgtggaaaggaaaatagtaactatcacagtgttgtttgtcattttaagaaatgcaggggtccagagacggagaaagccccagctggggagtggatttgtgaggtatgcaacagagattttacaaccaaaattggcctgggacaacacaagagattggcacacccagcagtgagaaatcaggaaaggatcgttgcttcccaaccgaaagaaacatcaaatagaggtgctcacaaaaggtgctggacaaaggaggaggaagaattactaataagactggaggctcagttcgagggaaacaaaaatattaataagcttattgcagaacacataaccaccaaaacagctaagcagatcagtgacaaaaggcgattgctgtccagaaagccagcagaggagccacgtgaggagcctggaacgtgtcatcacaccaggagagcagctgcgagcctgagaacggagcctgagatgagtcatcacgcccaggcagaggacagagataatggacctgggagacgccctctgccaggcagggcagctgccggagggagaacaatggacgagataagacgccaccctgataagggcaacggacagcagagacccaccaagcaaaaatcagaagaacagctgcaggcttactataaaaagacactagaggaacgactttcagctggggcacttaacaccttcccccgagcattcaagcaggtaatggaaggccgggatataaagctagtaatcaatcagacagcgcaggactacttcggatgcctggaatccataagccaaataagaacggcaacccgagataaaaaggacacggtgacccggaagaaacacccaaagaaaccttttcagaagtggatgaaggacagagcaatcaaaaaaggtaattatcttcggttccagcgtttattttatcttgatagagggaaactggctaaaatcattttagatgatattgaatgcttgtcttgtgacataccactcagtgaaatttattcggtttttaaaacaagatgggaaacaactggtagctttaaaagccttggggactttaaaacttacgggaaggctgacaacactgccttcagagaattaattacggctaaagaaattgagaaaaatgtgcaggaaatgagcaaaggctcggctcccggtccagacgggattactcttggggacgtcgtaaagatggatcccgagggctcccggaccatggagattttcaatttatggttaacaactggtaaaatcccggacatggtgagggggtgcagaaccgttttgattccaaaatcatcagacccggatcgtttgaaagacattaataactggagacctatcacgatcggttccatcttgctgagactgttctccaggattgtaacagctaggctgagcaaagcgtgccccctgaacccaaggcaaagaggctttatcagagcggcgggatgctctgaaaacttaaaactcctgcaaactataatttggtcggccaaaagagaacacagaccactgggtgttgtattcgtggacatcgccaaggcttttgacaccgtaagccaccagcacatcattcatgctttgcagcaaagagaggtggatccccacatcgtcggtctggtgagcaatatgtacgagaacatcagtacgtatatcaccacaaagaggaacacacacacagacaaaatccagatccgggttggagtaaagcagggtgacccgatgtcgccccttttatttaacctggcaatggaccctctattatgcaagctggaagagagtggcaaaggataccaccgaggacagagcagcatcacagcgatggcatttgcagacgatctggttttgctgagcgactcctgggaaaatatgaatacaaatattagcatactggagaccttctgcaatctgaccggactcaaaacacaggggcaaaagtgccacggcttttacatcaagccgacaaagaagtcttacaccatcaatgactgcgctgcctggactatcaacggcacacccctgaacatgatcgaccccggcgaatctgagaaatacctcggcctgcagtttgacccgtggattggaatagcaaggtccggtctctccacaaaactagatttttggcttcagcggatcgatcaagcaccacttaaacctctgcagaaaactgatattctcaaaacatacaccatccctcggctgatctacatagctgaccactcagaagtgaaaactgcactactcgaaacccttgaccagaagatccggacagcggtcaaggaatggcttcacctacctccgtgcacctgcgatgccatcctgtactcgagcacgagagacggcggtttgggcatcaccaaattggcaggactgatccccagcgtgcaggcccgtagactgcatcggatcgcacagtcatctgacgatacgatgaaatgcttcatggaaaaagagaaaatggaacagctgcataagaaattgtggattcaagctggaggggacagagagaacataccctcgatttgggaagcaccaccgtcgagtgaaccaccaaacaacgtgagcacaaattcggaatgggaagcaccgacccagaaagataaatttccaaagccttgcaattggaggaaaaacgaattcaaaaaatggaccaaattggcatcccaaggccgcggaattgtaaattttgaaagagacaaaattagtaaccattggatccaatactacagacgcatacctcacaggaaactcctcactgcactacaactcagggccaacgtttaccccacgagagaatttctagccaggggtagacaagaccaatacatcaaggcgtgtaggcactgcgatgcggacattgaatcctgcgcccacatcatcggcaactgcccagtgacacaggacgcccgaatcaagaggcacaataagatctgcgaactgcttctcgaggaggcgaagaagaaggactgggtagtgttcaaggaaccgcacataagggattccaacaaggaactgtacaaacctgacctgatatttgtgaaggatgcccgtgcacttgtcgtggatgtgacagtacggtatgaagcagccaaatcatcgctggaggaagccgctgcagagaaagtgagaaagtacaaacacctggaaacggaagtaagacatctcacgaatgcaaaggacgttacttttgtgggctttcccctaggagcgcgggggaaatggcaccaagataactttaaacttttgactgagcttggcctctccaaatcgaggcaagtgaaaatggcagagactttttccacagtagcgctcttttcatctgtggacattgtacatatgtttgccagtagggccagaaaatctatggttatgtgataataggctgccttctgcggggcttgccttctggccatgcccttcttctctcccttgcacctgtacctcttggtctttgaataaagcctgagtaggaaggaccggtagacatgataagatacattgatgagtttggacaaaccacaactagaatgcagtgaaaaaaatgctttatttgtgaaatttgtgatgctattgctttatttgtaaccattataagctgcaataaacaagttaacaacaacaaaaaaaaaaaaaaaaaaaaaaaaaaaaaaacgttgactaaaaaaaaaaaaaaaaaaaaaaaaaaaaaaaaaaaaaaaaaaaaaaaaaaaaaaaaaaaaaaaaaaaaaa

SEQ ID NO: 11564 - DNA, 4703 bp, synthetic construct
  source 1..4703: mol_type = other DNA
ggtctagttacaactgggcatcgctgcagagatcgcacctcctcgtggtcccgctggtagcccttcgaagggtgactaagtcgatctctgccccaggtacggagccgttgggactcaccagtccaacgtaactcctgcctaaattcggtgaaacaaattcctcggtaaaaagccccatggcttcttgcccgaaacctggccccccggtttcagcaggggcaatgagtttggaaagtggactgaccacccactccgttctcgccatcgaacgtggtcccaattcgttggcaaattccggatcagactttgggggggggggtctggggctaccgttacgcctattgagggtatcggtcggcactcagacctcccgctccgactgggtagacctggtgtcctggagccacccaggacccacgtctaagtcccagcaggttgacctggtgtctttatttcctaaacaccgggttgacctgttatccaaaaacgaccaggtagacctggtggctcaatttttaccatctaaatttccccccaatttggcagaaaatgatttggctttgctggtgaacttagagttctacagatcggatttgcatgtgtatgagtgtgttcattttgctgcacattgggagggattaagtggtttgcctgaggtgtatgaacaacttgcaccacaaccgtgtgtgggagaaactttacattctagcctcccacgagacagtgaactgtttgtgcctgaagaggggagcagcgagaaggagagcgaggacgcgccaaaaacatctcctccgacgcctgggaaacatggtttggaacagactggggaggaaaaagtgatggtgactgttcctgacaaaaatccaccttgtccttgctgtggtacccgggtaaactctgtgttgaatctgattgaacatctgaaagtgtcacacgggaaaaggggggtttgttttcggtgtgcaaaatgtggaaaggaaaatagtaactatcacagtgttgtttgtcattttaagaaatgcaggggtccagagacggagaaagccccagctggggagtggatttgtgaggtatgcaacagagattttacaaccaaaattggcctgggacaacacaagagattggcacacccagcagtgagaaatcaggaaaggatcgttgcttcccaaccgaaagaaacatcaaatagaggtgctcacaaaaggtgctggacaaaggaggaggaagaattactaataagactggaggctcagttcgagggaaacaaaaatattaataagcttattgcagaacacataaccaccaaaacagctaagcagatcagtgacaaaaggcgattgctgtccagaaagccagcagaggagccacgtgaggagcctggaacgtgtcatcacaccaggagagcagctgcgagcctgagaacggagcctgagatgagtcatcacgcccaggcagaggacagagataatggacctgggagacgccctctgccaggcagggcagctgccggagggagaacaatggacgagataagacgccaccctgataagggcaacggacagcagagacccaccaagcaaaaatcagaagaacagctgcaggcttactataaaaagacactagaggaacgactttcagctggggcacttaacaccttcccccgagcattcaagcaggtaatggaaggccgggatataaagctagtaatcaatcagacagcgcaggactacttcggatgcctggaatccataagccaaataagaacggcaacccgagataaaaaggacacggtgacccggaagaaacacccaaagaaaccttttcagaagtggatgaaggacagagcaatcaaaaaaggtaattatcttcggttccagcgtttattttatcttgatagagggaaactggctaaaatcattttagatgatattgaatgcttgtcttgtgacataccactcagtgaaatttattcggtttttaaaacaagatgggaaacaactggtagctttaaaagccttggggactttaaaacttacgggaaggctgacaacactgccttcagagaattaattacggctaaagaaattgagaaaaatgtgcaggaaatgagcaaaggctcggctcccggtccagacgggattactcttggggacgtcgtaaagatggatcccgagggctcccggaccatggagattttcaatttatggttaacaactggtaaaatcccggacatggtgagggggtgcagaaccgttttgattccaaaatcatcagacccggatcgtttgaaagacattaataactggagacctatcacgatcggttccatcttgctgagactgttctccaggattgtaacagctaggctgagcaaagcgtgccccctgaacccaaggcaaagaggctttatcagagcggcgggatgctctgaaaacttaaaactcctgcaaactataatttggtcggccaaaagagaacacagaccactgggtgttgtattcgtggacatcgccaaggcttttgacaccgtaagccaccagcacatcattcatgctttgcagcaaagagaggtggatccccacatcgtcggtctggtgagcaatatgtacgagaacatcagtacgtatatcaccacaaagaggaacacacacacagacaaaatccagatccgggttggagtaaagcagggtgacccgatgtcgccccttttatttaacctggcaatggaccctctattatgcaagctggaagagagtggcaaaggataccaccgaggacagagcagcatcacagcgatggcatttgcagacgatctggttttgctgagcgactcctgggaaggcatgaatacaaatattagcatactggagaccttctgcaatctgaccggactcaaaacacaggggcaaaagtgccacggcttttacatcaagccgacaaaggactcttacaccatcaatgactgcgctgcctggactatcaacggcacacccctgaacatgatcgaccccggcgaatctgagaaatacctcggcctgcagtttgacccgtggattggaatagcaaggtccggtctctccacaaaactagatttttggcttcagcggatcgatcaagcaccacttaaacctctgcagaaactggatattctcaaaacatacaccatccctcggctgatctacatagctgaccactcagaagtgaaaactgcactactcgaaacccttgaccagaagatccggacagcggtcaaggaatggcttcacctacctccgtgcacctgcgatgccatcctgtactcgagcacgagagacggcggtttgggcatcaccaaattggcaggactgatccccagcgtgcaggcccgtagactgcatcggatcgcacagtcatctgacgatacgatgaaatgcttcatggaaaaagagaaaatggaacagctgcataagaaattgtggattcaagctggaggggacagagagaacataccctcgatttgggaagcaccaccgtcgagtgaaccaccaaacaacgtgagcacaaattcggaatgggaagcaccgacccagaaagataaatttccaaagccttgcaattggaggaaaaacgaattcaaaaaatggaccaaattggcatcccaaggccgcggaattgtaaattttgaaagagacaaaattagtaaccattggatccaatactacagacgcatacctcacaggaaactcctcactgcactacaactcagggccaacgtttaccccacgagagaatttctagccaggggtagacaagaccaatacatcaaggcgtgtaggcactgcgatgcggacattgaatcctgcgcccacatcatcggcaactgcccagtgacacaggacgcccgaatcaagaggcacaattacatctgcgaactgcttctcgaggaggcgaagaagaaggactgggtagtgttcaaggaaccgcacataagggattccaacaaggaactgtacaaacctgacctgatatttgtgaaggatgcccgtgcacttgtcgtggatgtgacagtacggtatgaagcagccaaatcatcgctggaggaagccgctgcagagaaagtgagaaagtacaaacacctggaaacggaagtaagacatctcacgaatgcaaaggacgttacttttgtgggctttcccctaggagcgcgggggaaatggcaccaagataactttaaacttttgactgagcttggcctctccaaatcgaggcaagtgaaaatggcagagactttttccacagtagcgctcttttcatctgtggacattgtacatatgtttgccagtagggccagaaaatctatggttatgtgataataggctgccttctgcggggcttgccttctggccatgcccttcttctctcccttgcacctgtacctcttggtctttgaataaagcctgagtaggaaggaccggtagacatgataagatacattgatgagtttggacaaaccacaactagaatgcagtgaaaaaaatgctttatttgtgaaatttgtgatgctattgctttatttgtaaccattataagctgcaataaacaagttaacaacaacaaaaaaaaaaaaaaaaaaaaaaaaaaaaaaacgttgactaaaaaaaaaaaaaaaaaaaaaaaaaaaaaaaaaaaaaaaaaaaaaaaaaaaaaaaaaaaaaaaaaaaaaa

SEQ ID NO: 11565 - DNA, 4703 bp, synthetic construct
  source 1..4703: mol_type = other DNA
ggtctagttacaactgggcatcgctgcagagatcgcacctcctcgtggtcccgctggtagcccttcgaagggtgactaagtcgatctctgccccaggtacggagccgttgggactcaccagtccaacgtaactcctgcctaaattcggtgaaacaaattcctcggtaaaaagccccatggcttcttgcccgaaacctggccccccggtttcagcaggggcaatgagtttggaaagtggactgaccacccactccgttctcgccatcgaacgtggtcccaattcgttggcaaattccggatcagactttgggggggggggtctggggctaccgttacgcctattgagggtatcggtcggcactcagacctcccgctccgactgggtagacctggtgtcctggagccacccaggacccacgtctaagtcccagcaggttgacctggtgtctttatttcctaaacaccgggttgacctgttatccaaaaacgaccaggtagacctggtggctcaatttttaccatctaaatttccccccaatttggcagaaaatgatttggctttgctggtgaacttagagttctacagatcggatttgcatgtgtatgagtgtgttcattttgctgcacattgggagggattaagtggtttgcctgaggtgtatgaacaacttgcaccacaaccgtgtgtgggagaaactttacattctagcctcccacgagacagtgaactgtttgtgcctgaagaggggagcagcgagaaggagagcgaggacgcgccaaaaacatctcctccgacgcctgggaaacatggtttggaacagactggggaggaaaaagtgatggtgactgttcctgacaaaaatccaccttgtccttgctgtggtacccgggtaaactctgtgttgaatctgattgaacatctgaaagtgtcacacgggaaaaggggggtttgttttcggtgtgcaaaatgtggaaaggaaaatagtaactatcacagtgttgtttgtcattttaagaaatgcaggggtccagagacggagaaagccccagctggggagtggatttgtgaggtatgcaacagagattttacaaccaaaattggcctgggacaacacaagagattggcacacccagcagtgagaaatcaggaaaggatcgttgcttcccaaccgaaagaaacatcaaatagaggtgctcacaaaaggtgctggacaaaggaggaggaagaattactaataagactggaggctcagttcgagggaaacaaaaatattaataagcttattgcagaacacataaccaccaaaacagctaagcagatcagtgacaaaaggcgattgctgtccagaaagccagcagaggagccacgtgaggagcctggaacgtgtcatcacaccaggagagcagctgcgagcctgagaacggagcctgagatgagtcatcacgcccaggcagaggacagagataatggacctgggagacgccctctgccaggcagggcagctgccggagggagaacaatggacgagataagacgccaccctgataagggcaacggacagcagagacccaccaagcaaaaatcagaagaacagctgcaggcttactataaaaagacactagaggaacgactttcagctggggcacttaacaccttcccccgagcattcaagcaggtaatggaaggccgggatataaagctagtaatcaatcagacagcgcaggactgcttcggatgcctggaatccataagccaaataagaacggcaacccgagataaaaaggacacggtgacccggaagaaacacccaaagaaaccttttcagaagtggatgaaggacagagcaatcaaaaaaggtaattatcttcggttccagcgtttattttatcttgatagagggaaactggctaaaatcattttagatgatattgaatgcttgtcttgtgacataccactcagtgaaatttattcggtttttaaaacaagatgggaaacaactggtagctttaaaagccttggggactttaaaacttacgggaaggctgacaacactgccttcagagaattaattacggctaaagaaattgagaaaaatgtgcaggaaatgagcaaaggctcggctcccggtccagacgggattactcttggggacgtcgtaaagatggatcccgagggctcccggaccatggagattttcaatttatggttaacaactggtaaaatcccggacatggtgagggggtgcagaaccgttttgattccaaaatcatcagacccggatcgtttgaaagacattaataactggagacctatcacgatcggttccatcttgctgagactgttctccaggattgtaacagctaggctgagcaaagcgtgccccctgaacccaaggcaaagaggctttatcagagcggcgggatgctctgaaaacttaaaactcctgcaaactataatttggtcggccaaaagagaacacagaccactgggtgttgtattcgtggacatcgccaaggcttttgacaccgtaagccaccagcacatcattcatgctttgcagcaaagagaggtggatccccacatcgtcggtctggtgagcaatatgtacgagaacatcagtacgtatatcaccacaaagaggaacacacacacagacaaaatccagatccgggttggagtaaagcagggtgacccgatgtcgccccttttatttaacctggcaatggaccctctattatgcaagctggaagagagtggcaaaggataccaccgaggacagagcagcatcacagcgatggcatttgcagacgatctggttttgctgagcgactcctgggaaggcatgaatacaaatattagcatactggagaccttctgcaatctgaccggactcaaaacacaggggcaaaagtgccacggcttttacatcaagccgacaaagaagtcttacaccatcaatgactgcgctgcctggactatcaacggcacacccctgaacatgatcgaccccggcgaatctgagaaatacctcggcctgcagtttgacccgtggattggaatagcaaggtccggtctctccacaaaactagatttttggcttcagcggatcgatcaagcaccacttaaacctctgcagaaactggatattctcaaaacatacaccatccctcggctgatctacatagctgaccactcagaagtgaaaactgcactactcgaaacccttgaccagaagatccggacagcggtcaaggaatggcttcacctacctccgtgcacctgcgatgccatcctgtactcgagcacgagagacggcggtttgggcatcaccaaattggcaggactgatccccagcgtgcaggcccgtagactgcatcggatcgcacagtcatctgacgatacgatgaaatgcttcatggaaaaagagaaaatggaacagctgcataagaaattgtggattcaagctggaggggacagagagaacataccctcgatttgggaagcaccaccgtcgagtgaaccaccaaacaacgtgagcacaaattcggaatgggaagcaccgacccagaaagataaatttccaaagccttgcaattggaggaaaaacgaattcaaaaaatggaccaaattggcatcccaaggccgcggaattgtaaattttgaaagagacaaaattagtaaccattggatccaatactacagacgcatacctcacaggaaactcctcactgcactacaactcagggccaacgtttaccccacgagagaatttctagccaggggtagacaagaccaatacatcaaggcgtgtaggcactgcgatgcggacattgaatcctgcgcccacatcatcggcaactgcccagtgacacaggacgcccgaatcaagaggcacaattacatctgcgaactgcttctcgaggaggcgaagaagaaggactgggtagtgttcaaggaaccgcacataagggattccaacaaggaactgtacaaacctgacctgatatttgtgaaggatgcccgtgcacttgtcgtggatgtgacagtacggtatgaagcagccaaatcatcgctggaggaagccgctgcagagaaagtgagaaagtacaaacacctggaaacggaagtaagacatctcacgaatgcaaaggacgttacttttgtgggctttcccctaggagcgcgggggaaatggcaccaagataactttaaacttttgactgagcttggcctctccaaatcgaggcaagtgaaaatggcagagactttttccacagtagcgctcttttcatctgtggacattgtacatatgtttgccagtagggccagaaaatctatggttatgtgataataggctgccttctgcggggcttgccttctggccatgcccttcttctctcccttgcacctgtacctcttggtctttgaataaagcctgagtaggaaggaccggtagacatgataagatacattgatgagtttggacaaaccacaactagaatgcagtgaaaaaaatgctttatttgtgaaatttgtgatgctattgctttatttgtaaccattataagctgcaataaacaagttaacaacaacaaaaaaaaaaaaaaaaaaaaaaaaaaaaaaacgttgactaaaaaaaaaaaaaaaaaaaaaaaaaaaaaaaaaaaaaaaaaaaaaaaaaaaaaaaaaaaaaaaaaaaaaa

SEQ ID NO: 11566 - DNA, 4703 bp, synthetic construct
  source 1..4703: mol_type = other DNA
ggtctagttacaactgggcatcgctgcagagatcgcacctcctcgtggtcccgctggtagcccttcgaagggtgactaagtcgatctctgccccaggtacggagccgttgggactcaccagtccaacgtaactcctgcctaaattcggtgaaacaaattcctcggtaaaaagccccatggcttcttgcccgaaacctggccccccggtttcagcaggggcaatgagtttggaaagtggactgaccacccactccgttctcgccatcgaacgtggtcccaattcgttggcaaattccggatcagactttgggggggggggtctggggctaccgttacgcctattgagggtatcggtcggcactcagacctcccgctccgactgggtagacctggtgtcctggagccacccaggacccacgtctaagtcccagcaggttgacctggtgtctttatttcctaaacaccgggttgacctgttatccaaaaacgaccaggtagacctggtggctcaatttttaccatctaaatttccccccaatttggcagaaaatgatttggctttgctggtgaacttagagttctacagatcggatttgcatgtgtatgagtgtgttcattttgctgcacattgggagggattaagtggtttgcctgaggtgtatgaacaacttgcaccacaaccgtgtgtgggagaaactttacattctagcctcccacgagacagtgaactgtttgtgcctgaagaggggagcagcgagaaggagagcgaggacgcgccaaaaacatctcctccgacgcctgggaaacatggtttggaacagactggggaggaaaaagtgatggtgactgttcctgacaaaaatccaccttgtccttgctgtggtacccgggtaaactctgtgttgaatctgattgaacatctgaaagtgtcacacgggaaaaggggggtttgttttcggtgtgcaaaatgtggaaaggaaaatagtaactatcacagtgttgtttgtcattttaagaaatgcaggggtccagagacggagaaagccccagctggggagtggatttgtgaggtatgcaacagagattttacaaccaaaattggcctgggacaacacaagagaaggtggcacccagcagtgagaaatcaggaaaggatcgttgcttcccaaccgaaagaaacatcaaatagaggtgctcacaaaaggtgctggacaaaggaggagagggaattactaataagactggaggctcagttcgagggaaacaaaaatattaataagcttattgcagaacacataaccaccaaaacagctaagcagatcagtgacaaaaggcgattgctgtccagaaagccagcagaggagccacgtatgatgcctggaacgtgtcatcacaccaggagagcagctgcgagcctgagaacggagcctgagatgagtcatcacgcccaggcagaggacagagataatggacctgggagacgccctctgccaggcagggcagctgccggagggagaacaatggacgagataagacgccaccctgataagggcaacggacagcagagacccaccaagcaaaaatcagaagaacagctgcaggcttactataaaaagacactagaggaacgactttcagctggggcacttaacaccttcccccgagcattcaagcaggtaatggaaggccgggatataaagctagtaatcaatcagacagcgcaggactgcttcggatgcctggaatccataagccaaataagaacggcaacccgagataaaaaggacacggtgacccgggagaaacacccaaagaaaccttttcagaagtggatgaagaagagagcaatcaaaaaaggtaattatcttcggttccagcgtttattttatcttgatagagggaaactggctaaaatcattttagatgatattgaatgcttgtcttgtgacataccactcagtgaaatttattcggtttttaaaacaagatgggaaacaactggtagctttaaaagccttggggactttaaaacttacgggaaggctgacaacactgccttcagagaattaattacggctaaagaaattgagaaaaatgtgcaggaaatgagcaaaggctcggctcccggtccagacgggattactcttggggacgtcgtaaagatggatcccgagggctcccggaccatggagattttcaatttatggttaacaactggtaaaatcccggacatggtgagggggtgcagaaccgttttgattccaaaatcatcagacccggatcgtttgaaagacattaataactggagacctatcacgatcggttccatcttgctgagactgttctccaggattgtaacagctaggctgagcaaagcgtgccccctgaacccaaggcaaagaggctttatcagagcggcgggatgctctgaaaacttaaaactcctgcaaactataatttggtcggccaaaagagaacacagaccactgggtgttgtattcgtggacatcgccaaggcttttgacaccgtaagccaccagcacatcattcatgctttgcagcaaagagaggtggatccccacatcgtcggtctggtgagcaatatgtacgagaacatcagtacgtatatcaccacaaagaggaacacacacacagacaaaatccagatccgggttggagtaaagcagggtgacccgatgtcgccccttttatttaacctggcaatggaccctctattatgcaagctggaagagagtggcaaaggataccaccgaggacagagcagcatcacagcgatggcatttgcagacgatctggttttgctgagcgactcctgggaaaatatgaatacaaatattagcatactggagaccttctgcaatctgaccggactcaaaacacaggggcaaaagtgccacggcttttacatcaagccgacaaagaagtcttacaccatcaatgactgcgctgcctggactatcaacggcacacccctgaacatgatcgaccccggcgaatctgagaaatacctcggcctgcagtttgacccgtggattggaatagcaaggtccggtctctccacaaaactagatttttggcttcagcggatcgatcaagcaccacttaaacctctgcagaaaactgatattctcaaaacatacaccatccctcggctgatctacatagctgaccactcagaagtgaaaactgcactactcgaaacccttgaccagaagatccggacagcggtcaaggaatggcttcacctacctccgtgcacctgcgatgccatcctgtactcgagcacgagagacggcggtttgggcatcaccaaattggcaggactgatccccagcgtgcaggcccgtagactgcatcggatcgcacagtcatctgacgatacgatgaaatgcttcatggaaaaagagaaaatggaacagctgcataagaaattgtggattcaagctggaggggacagagagaacataccctcgatttgggaagcaccaccgtcgagtgaaccaccaaacaacgtgagcacaaattcggaatgggaagcaccgacccagaaagataaatttccaaagccttgcaattggaggaaaaacgaattcaaaaaatggaccaaattggcatcccaaggccgcggaattgtaaattttgaaagagacaaaattagtaaccattggatccaatactacagacgcatacctcacaggaaactcctcactgcactacaactcagggccaacgtttaccccacgagagaatttctagccaggggtagacaagaccaatacatcaaggcgtgtaggcactgcgatgcggacaacgaatcctgcgcccacatcatcggcaactgcccagtgacacaggacgcccgaatcaagaggcacaattacatctgcgaactgcttctcgaggaggcgaagaagaaggactgggtagtgttcaaggaaccgcacataagggattccaacaaggaactgtacaaacctgacctgatatttgtgaaggatgcccgtgcacttgtcgtggatgtgacagtacggtatgaagcagccaaatcatcgctggaggaagccgctgcagagaaagtgagaaagtacaaacacctggaaacggaagtaagacatctcacgaatgcaaaggacgttacttttgtgggctttcccctaggagcgcgggggaaatggcaccaagataactttaaacttttgactgagcttggcctctccaaatcgaggcaagtgaaaatggcagagactttttccacagtagcgctcttttcatctgtggacattgtacatatgtttgccagtagggccagaaaatctatggttatgtgataataggctgccttctgcggggcttgccttctggccatgcccttcttctctcccttgcacctgtacctcttggtctttgaataaagcctgagtaggaaggaccggtagacatgataagatacattgatgagtttggacaaaccacaactagaatgcagtgaaaaaaatgctttatttgtgaaatttgtgatgctattgctttatttgtaaccattataagctgcaataaacaagttaacaacaacaaaaaaaaaaaaaaaaaaaaaaaaaaaaaaacgttgactaaaaaaaaaaaaaaaaaaaaaaaaaaaaaaaaaaaaaaaaaaaaaaaaaaaaaaaaaaaaaaaaaaaaaa

SEQ ID NO: 11567 - DNA, 4564 bp, synthetic construct
  source 1..4564: mol_type = other DNA
ggtctagttacaactgggcatcgctgcagagatcgcacctcctcgtggtcccgctggtagcccttcgaagggtgactaagtcgatctctgccccaggtacggagccgttgggactcaccagtccaacgtaactcctgcctaaattcggtgaaacaaattcctcggtaaaaagccccatggcttcttgcccgaaacctggccccccggtttcagcaggggcaatgagtttggaaagtggactgaccacccactccgttctcgccatcgaacgtggtcccaattcgttggcaaattccggatcagactttgggggggggggtctggggctaccgttacgcctattgagggtatcggtcggcactcagacctcccgctccgactgggtagacctggtgtcctggagccacccaggacccacgtctaagtcccagcaggttgacctggtgtctttatttcctaaacaccgggttgacctgttatccaaaaacgaccaggtagacctggtggctcaatttttaccatctaaatttccccccaatttggcagaaaatgatttggctttgctggtgaacttagagttctacagatcggatttgcatgtgtatgagtgtgttcattttgctgcacattgggagggattaagtggtttgcctgaggtgtatgaacaacttgcaccacaaccgtgtgtgggagaaactttacattctagcctcccacgagacagtgaactgtttgtgcctgaagaggggagcagcgagaaggagagcgaggacgcgccaaaaacatctcctccgacgcctgggaaacatggtttggaacagactggggaggaaaaagtgatggtgactgttcctgacaaaaatccaccttgtccttgctgtggtacccgggtaaactctgtgttgaatctgattgaacatctgaaagtgtcacacgggaaaaggggggtttgttttcggtgtgcaaaatgtggaaaggaaaatagtaactatcacagtgttgtttgtcattttccaaaatgcaggggtccagagacggagaaagccccagctggggagtggatttgtgaggtatgcaacagagattttacaaccaaaattggcctgggacaacacaagagattggcacacccagcagtgagaaatcaggaaaggatcgttgcttcccaaccgaaagaaacatcaaatagaggtgctcacaaaaggtgctggacaaaggaggaggaagaattactaataagactggaggctcagttcgagggaaacaaaaatattaataagcttattgcagaacacataaccaccaaaacagctaagcagatcagtgacaaaaggcgattgctgtccagaaagccagcagaggagccacgtgaggagcctggaacgtgtcatcacaccaggagagcagctgcgagcctgagaacggagcctgagatgagtcatcacgcccaggcagaggacagagataatggacctgggagacgccctctgccaggcagggcagctgccggagggagaacaatggacgagataagacgccaccctgataagggcaacggacagcagagacccaccaagcaaaaatcagaagaacagctgcaggcttactataaaaagacactagaggaacgactttcagctggggcacttaacaccttcccccgagcattcaagcaggtaatggaaggccgggatataaagctagtaatcaatcagacagcgcaggactgcttcggatgcctggaatccataagccaaataagaacggcaacccgagataaaaaggacacggtgacccggaagaaacacccaaagaaaccttttcagaagtggatgaagaagagagcaatcaaaaaaggtaattatcttcggttccagcgtttattttatcttgatagagggaaactggctaaaatcattttagatgatattgaatgcttgtcttgtgacataccactcagtgaaatttattcggtttttaaaacaagatgggaaacaactggtagctttaaaagccttggggactttaaaacttacgggaaggctgacaacactgccttcagagaattaattacggctaaagaaattgagaaaaatgtgcaggaaatgagcaaaggctcggctcccggtccagacgggattactcttggggacgtcgtaaagatggatcccgagttttcccggaccatggagattttcaatttatggttaacaactggtaaaatcccggacatggtgagggggtgcagaaccgttttgattccaaaatcatcaaagccggatcgtttgaaagacattaataactggagacctatcacgatcggttccatcttgctgagactgttctccaggattgtaacagctaggctgagcaaagcgtgccccctgaacccaaggcaaagaggctttatcagagcggcgggatgctctgaaaacttaaaactcctgcaaactataatttggtcggccaaaagagaacacagaccactgggtgttgtattcgtggacatcgccaaggcttttgacaccgtaagccaccagcacatcattcatgctttgcagcaaagagaggtggatccccacatcgtcggtctggtgagcaatatgtacgagaacatcagtacgtatatcaccacaaagaggaacacacacacagacaaaatccagatccgggttggagtaaagcagggtgacccgatgtcgccccttttatttaacctggcaatggaccctctattatgcaagctggaagagagtggcaaaggataccaccgaggacagagcagcatcacagcgatggcatttgcagacgatctggttttgctgagcgactcctgggaaaatatgaatacaaatattagcatactggagaccttctgcaatctgaccggactcaaaacacaggggcaaaagtgccacggcttttacatcaagccgacaaagaagtcttacaccatcaatgactgcgctgcctggactatcaacggcacacccctgaacatgatcgaccccggcgaatctgagaaatacctcggcctgcagtttgacccgtggattggaatagcaaggtccggtctctccacaaaactagatttttggcttcagcggatcgatcaagcaccacttaaacctctgcagaaactggatattctcaaaacatacaccatccctcggctgatctacatagctgaccactcagaagtgaaaactgcactactcgaaacccttgaccagaagatccggacagcggtcaaggaatggcttcacctacctccgtgcacctgcgatgccatcctgtactcgagcacgagagacggcggtttgggcatcaccaaattggcaggactgatccccagcgtgcaggcccgtagactgcatcggatcgcacagtcatctgacgatacgatgaaatgcttcatggaaaaagagaaaatggaacagctgcataagaaattgtggattcaagctggaggggacagagagaacataccctcgatttgggaagcaccaccgtcgagtgaaccaccaaacaacgtgagcacaaattcggaatgggaagcaccgacccagaaagataaatttccaaagccttgcaattggaggaaaaacgaattcaaaaaatggaccaaattggcatcccaaggccgcggaattgtaaattttgaaagagacaaaattagtaaccattggatccaatactacagacgcatacctcacaggaaactcctcactgcactacaactcagggccaacgtttaccccacgagagaatttctagccaggggtagacaagaccaatacatcaaggcgtgtaggcactgcgatgcggacattgaatcctgcgcccacatcatcggcaactgcccagtgacacaggacgcccgaatcaagaggcacaattacatctgcgaactgcttctcgaggaggcgaagaagaaggactgggtagtgttcaaggaaccgcacataagggattccaacaaggaactgtacaaacctgacctgatatttgtgaaggatggccgtgcacttgtcgtggatgtgacagtacggtatgaagcagccaaatcatcgctggaggaagccgctgcagagaaagtgagaaagtacaaacacctggaaacggaagtaagacatctcacgaatgcaaaggacgttacttttgtgggctttcccctaggagcgcgggggaaatggcaccaagataactttaaacttttgactgagcttggcctctccaaatcgaggcaagtgaaaatggcagagactttttccacagtagcgctcttttcatctgtggacattgtacatatgtttgccagtagggccagaaaatctatggttatgtgataataggctgccttctgcggggcttgccttctggccatgcccttcttctctcccttgcacctgtacctcttggtctttgaataaagcctgagtaggaaggaccggtaaaaaaaaaaaaaaaaaaaaaaaaaaaaaaacgttgactaaaaaaaaaaaaaaaaaaaaaaaaaaaaaaaaaaaaaaaaaaaaaaaaaaaaaaaaaaaaaaaaaaaaaa

SEQ ID NO: 11568 - DNA, 4564 bp, synthetic construct
  source 1..4564: mol_type = other DNA
ggtctagttacaactgggcatcgctgcagagatcgcacctcctcgtggtcccgctggtagcccttcgaagggtgactaagtcgatctctgccccaggtacggagccgttgggactcaccagtccaacgtaactcctgcctaaattcggtgaaacaaattcctcggtaaaaagccccatggcttcttgcccgaaacctggccccccggtttcagcaggggcaatgagtttggaaagtggactgaccacccactccgttctcgccatcgaacgtggtcccaattcgttggcaaattccggatcagactttgggggggggggtctggggctaccgttacgcctattgagggtatcggtcggcactcagacctcccgctccgactgggtagacctggtgtcctggagccacccaggacccacgtctaagtcccagcaggttgacctggtgtctttatttcctaaacaccgggttgacctgttatccaaaaacgaccaggtagacctggtggctcaatttttaccatctaaatttccccccaatttggcagaaaatgatttggctttgctggtgaacttagagttctacagatcggatttgcatgtgtatgagtgtgttcattttgctgcacattgggagggattaagtggtttgcctgaggtgtatgaacaacttgcaccacaaccgtgtgtgggagaaactttacattctagcctcccacgagacagtgaactgtttgtgcctgaagaggggagcagcgagaaggagagcgaggacgcgccaaaaacatctcctccgacgcctgggaaacatggtttggaacagactggggaggaaaaagtgatggtgactgttcctgacaaaaatccaccttgtccttgctgtggtacccgggtaaactctgtgttgaatctgattgaacatctgaaagtgtcacacgggaaaaggggggtttgttttcggtgtgcaaaatgtggaaaggaaaatagtaactatcacagtgttgtttgtcattttccaaaatgcaggggtccagagacggagaaagccccagctggggagtggatttgtgaggtatgcaacagagattttacaaccaaaattggcctgggacaacacaagagattggcacacccagcagtgagaaatcaggaaaggatcgttgcttcccaaccgaaagaaacatcaaatagaggtgctcacaaaaggtgctggacaaaggaggaggaagaattactaataagactggaggctcagttcgagggaaacaaaaatattaataagcttattgcagaacacataaccaccaaaacagctaagcagatcagtgacaaaaggcgattgctgtccagaaagccagcagaggagccacgtgaggagcctggaacgtgtcatcacaccaggagagcagctgcgagcctgagaacggagcctgagatgagtcatcacgcccaggcagaggacagagataatggacctgggagacgccctctgccaggcagggcagctgccggagggagaacaatggacgagataagacgccaccctgataagggcaacggacagcagagacccaccaagcaaaaatcagaagaacagctgcaggcttactataaaaagacactagaggaacgactttcagctggggcacttaacaccttcccccgagcattcaagcaggtaatggaaggccgggatataaagctagtaatcaatcagacagcgcaggactgcttcggatgcctggaatccataagccaaataagaacggcaacccgagataaaaaggacacggtgacccggaagaaacacccaaagaaaccttttcagaagtggatgaagaagagagcaatcaaaaaaggtaattatcttcggttccagcgtttattttatcttgatagagggaaactggctaaaatcattttagatgatattgaatgcttgtcttgtgacataccactcagtgaaatttattcggtttttaaaacaagatgggaaacaactggtagctttaaaagccttggggactttaaaacttacgggaaggctgacaacactgccttcagagaattaattacggctaaagaaattgagaaaaatgtgcaggaaatgagcaaaggctcggctcccggtccagacgggattactcttggggacgtcgtaaagatggatcccgagttttcccggaccatggagattttcaatttatggttaacaactggtaaaatcccggacatggtgagggggtgcagaaccgttttgattccaaaatcatcaaagccggatcgtttgaaagacattaataactggagacctatcacgatcggttccatcttgctgagactgttctccaggattgtaacagctaggctgagcaaagcgtgccccctgaacccaaggcaaagaggctttatcagagcggcgggatgctctgaaaacttaaaactcctgcaaactataatttggtcggccaaaagagaacacagaccactgggtgttgtattcgtggacatcgccaaggcttttgacaccgtaagccaccagcacatcattcatgctttgcagcaaagagaggtggatccccacatcgtcggtctggtgagcaatatgtacgagaacatcagtacgtatatcaccacaaagaggaacacacacacagacaaaatccagatccgggttggagtaaagcagggtgacccgatgtcgccccttttatttaacctggcaatggaccctctattatgcaagctggaagagagtggcaaaggataccaccgaggacagagcagcatcacagcgatggcatttgcagacgatctggttttgctgagcgactcctgggaaaatatgaatacaaatattagcatactggagaccttctgcaatctgaccggactcaaaacacaggggcaaaagtgccacggcttttacatcaagccgacaaagaagtcttacaccatcaatgactgcgctgcctggactatcaacggcacacccctgaacatgatcgaccccggcgaatctgagaaatacctcggcctgcagtttgacccgtggattggaatagcaaggtccggtctctccacaaaactagatttttggcttcagcggatcgatcaagcaccacttaaacctctgcagaaactggatattctcaaaacatacaccatccctcggctgatctacatagctgaccactcagaagtgaaaactgcactactcgaaacccttgaccagaagatccggacagcggtcaaggaatggcttcacctacctccgtgcacctgcgatgccatcctgtactcgagcacgagagacggcggtttgggcatcaccaaattggcaggactgatccccagcgtgcaggcccgtagactgcatcggatcgcacagtcatctgacgatacgatgaaatgcttcatggaaaaagagaaaatggaacagctgcataagaaattgtggattcaagctggaggggacagagagaacataccctcgatttgggaagcaccaccgtcgagtgaaccaccaaacaacgtgagcacaaattcggaatgggaagcaccgacccagaaagataaatttccaaagccttgcaattggaggaaaaacgaattcaaaaaatggaccaaattggcatcccaaggccgcggaattgtaaattttgaaagagacaaaattagtaaccattggatccaatactacagacgcatacctcacaggaaactcctcactgcactacaactcagggccaacgtttaccccacgagagaatttctagccaggggtagacaagaccaatacatcaaggcgtgtaggcactgcgatgcggacattgaatcctgcgcccacatcatcggcaactgcccagtgacacaggacgcccgaatcaagaggcacaattacatctgcgaactgcttctcgaggaggcgaagaagaaggactgggtagtgttcaaggaaccgcacataagggattccaacaaggaactgtacaaacctgacctgatatttgtgaaggatgcccgtgcacttgtcgtggatgtgacagtacggtatgaagcagccaaatcatcgctggaggaagccgctgcagagaaagtgagaaagtacaaacacctggaaacggaagtaagacatctcacgaatgcaaaggacgttacttttgtgggctttcccctaggagcgcgggggaaatggcaccaagataactttaaacttttgactgagcttggcctctccaaatcgaggcaagtgaaaatggcagagactttttccacagtagcgctcttttcatctgtggacattgtacatatgtttgccagtagggccagaaaatctatggttatgtgataataggctgccttctgcggggcttgccttctggccatgcccttcttctctcccttgcacctgtacctcttggtctttgaataaagcctgagtaggaaggaccggtaaaaaaaaaaaaaaaaaaaaaaaaaaaaaaacgttgactaaaaaaaaaaaaaaaaaaaaaaaaaaaaaaaaaaaaaaaaaaaaaaaaaaaaaaaaaaaaaaaaaaaaaa

SEQ ID NO: 11569 - DNA, 4564 bp, synthetic construct
  source 1..4564: mol_type = other DNA
ggtctagttacaactgggcatcgctgcagagatcgcacctcctcgtggtcccgctggtagcccttcgaagggtgactaagtcgatctctgccccaggtacggagccgttgggactcaccagtccaacgtaactcctgcctaaattcggtgaaacaaattcctcggtaaaaagccccatggcttcttgcccgaaacctggccccccggtttcagcaggggcaatgagtttggaaagtggactgaccacccactccgttctcgccatcgaacgtggtcccaattcgttggcaaattccggatcagactttgggggggggggtctggggctaccgttacgcctattgagggtatcggtcggcactcagacctcccgctccgactgggtagacctggtgtcctggagccacccaggacccacgtctaagtcccagcaggttgacctggtgtctttatttcctaaacaccgggttgacctgttatccaaaaacgaccaggtagacctggtggctcaatttttaccatctaaatttccccccaatttggcagaaaatgatttggctttgctggtgaacttagagttctacagatcggatttgcatgtgtatgagtgtgttcattttgctgcacattgggagggattaagtggtttgcctgaggtgtatgaacaacttgcaccacaaccgtgtgtgggagaaactttacattctagcctcccacgagacagtgaactgtttgtgcctgaagaggggagcagcgagaaggagagcgaggacgcgccaaaaacatctcctccgacgcctgggaaacatggtttggaacagactggggaggaaaaagtgatggtgactgttcctgacaaaaatccaccttgtccttgctgtggtacccgggtaaactctgtgttgaatctgattgaacatctgaaagtgtcacacgggaaaaggggggtttgttttcggtgtgcaaaatgtggaaaggaaaatagtaactatcacagtgttgtttgtcattttccaaaatgcaggggtccagagacggagaaagccccagctggggagtggatttgtgaggtatgcaacagagattttacaaccaaaattggcctgggacaacacaagagattggcacacccagcagtgagaaatcaggaaaggatcgttgcttcccaaccgaaagaaacatcaaatagaggtgctcacaaaaggtgctggacaaaggaggaggaagaattactaataagactggaggctcagttcgagggaaacaaaaatattaataagcttattgcagaacacataaccaccaaaacagctaagcagatcagtgacaaaaggcgattgctgtccagaaagccagcagaggagccacgtgaggagcctggaacgtgtcatcacaccaggagagcagctgcgagcctgagaacggagcctgagatgagtcatcacgcccaggcagaggacagagataatggacctgggagacgccctctgccaggcagggcagctgccggagggagaacaatggacgagataagacgccaccctgataagggcaacggacagcagagacccaccaagcaaaaatcagaagaacagctgcaggcttactataaaaagacactagaggaacgactttcagctggggcacttaacaccttcccccgagcattcaagcaggtaatggaaggccgggatataaagctagtaatcaatcagacagcgcaggactgcttcggatgcctggaatccataagccaaataagaacggcaacccgagataaaaaggacacggtgacccggaagaaacacccaaagaaaccttttcagaagtggatgaagaagagagcaatcaaaaaaggtaattatcttcggttccagcgtttattttatcttgatagagggaaactggctaaaatcattttagatgatattgaatgcttgtcttgtgacataccactcagtgaaatttattcggtttttaaaacaagatgggaaacaactggtagctttaaaagccttggggactttaaaacttacgggaaggctgacaacactgccttcagagaattaattacggctaaagaaattgagaaaaatgtgcaggaaatgagcaaaggctcggctcccggtccagacgggattactcttggggacgtcgtaaagatggatcccgagttttcccggaccatggagattttcaatttatggttaacaactggtaaaatcccggacatggtgagggggtgcagaaccgttttgattccaaaatcatcaaagccggatcgtttgaaagacattaataactggagacctatcacgatcggttccatcttgctgagactgttctccaggattgtaacagctaggctgagcaaagcgtgccccctgaacccaaggcaaagaggctttatcagagcggcgggatgctctgaaaacttaaaactcctgcaaactataatttggtcggccaaaagagaacacagaccactgggtgttgtattcgtggacatcgccaaggcttttgacaccgtaagccaccagcacatcattcatgctttgcagcaaagagaggtggatccccacatcgtcggtctggtgagcaatatgtacgagaacatcagtacgtatatcaccacaaagaggaacacacacacagacaaaatccagatccgggttggagtaaagcagggtgacccgatgtcgccccttttatttaacctggcaatggaccctctattatgcaagctggaagagagtggcaaaggataccaccgaggacagagcagcatcacagcgatggcatttgcagacgatctggttttgctgagcgactcctgggaaggcatgaatacaaatattagcatactggagaccttctgcaatctgaccggactcaaaacacaggggcaaaagtgccacggcttttacatcaagccgacaaagaagtcttacaccatcaatgactgcgctgcctggactatcaacggcacacccctgaacatgatcgaccccggcgaatctgagaaatacctcggcctgcagtttgacccgtggattggaatagcaaggtccggtctctccacaaaactagatttttggcttcagcggatcgatcaagcaccacttaaacctctgcagaaactggatattctcaaaacatacaccatccctcggctgatctacatagctgaccactcagaagtgaaaagcgcactactcgaaacccttgaccagaagatccggacagcggtcaaggaatggcttcacctacctccgtgcacctgcgatgccatcctgtactcgagcacgagagacggcggtttgggcatcaccaaattggcaggactgatccccagcgtgcaggcccgtagactgcatcggatcgcacagtcatctgacgatacgatgaaatgcttcatggaaaaagagaaaatggaacagctgcataagaaattgtggattcaagctggaggggacagagagaacataccctcgatttgggaagcaccaccgtcgagtgaaccaccaaacaacgtgagcacaaattcggaatgggaagcaccgacccagaaagataaatttccaaagccttgcaattggaggaaaaacgaattcaaaaaatggaccaaattggcatcccaaggccgcggaattgtaaattttgaaagagacaaaattagtaaccattggatccaatactacagacgcatacctcacaggaaactcctcactgcactacaactcagggccaacgtttaccccacgagagaatttctagccaggggtagacaagaccaatacatcaaggcgtgtaggcactgcgatgcggacattgaatcctgcgcccacatcatcggcaactgcccagtgacacaggacgcccgaatcaagaggcacaattacatctgcgaactgcttctcgaggaggcgaagaagaaggactgggtagtgttcaaggaaccgcacataagggattccaacaaggaactgtacaaacctgacctgatatttgtgaaggatgcccgtgcacttgtcgtggatgtgacagtacggtatgaagcagccaaatcatcgctggaggaagccgctgcagagaaagtgagaaagtacaaacacctggaaacggaagtaagacatctcacgaatgcaaaggacgttacttttgtgggctttcccctaggagcgcgggggaaatggcaccaagataactttaaacttttgactgagcttggcctctccaaatcgaggcaagtgaaaatggcagagactttttccacagtagcgctcttttcatctgtggacattgtacatatgtttgccagtagggccagaaaatctatggttatgtgataataggctgccttctgcggggcttgccttctggccatgcccttcttctctcccttgcacctgtacctcttggtctttgaataaagcctgagtaggaaggaccggtaaaaaaaaaaaaaaaaaaaaaaaaaaaaaaacgttgactaaaaaaaaaaaaaaaaaaaaaaaaaaaaaaaaaaaaaaaaaaaaaaaaaaaaaaaaaaaaaaaaaaaaaa

SEQ ID NO: 11570 - DNA, 4564 bp, synthetic construct
  source 1..4564: mol_type = other DNA
ggtctagttacaactgggcatcgctgcagagatcgcacctcctcgtggtcccgctggtagcccttcgaagggtgactaagtcgatctctgccccaggtacggagccgttgggactcaccagtccaacgtaactcctgcctaaattcggtgaaacaaattcctcggtaaaaagccccatggcttcttgcccgaaacctggccccccggtttcagcaggggcaatgagtttggaaagtggactgaccacccactccgttctcgccatcgaacgtggtcccaattcgttggcaaattccggatcagactttgggggggggggtctggggctaccgttacgcctattgagggtatcggtcggcactcagacctcccgctccgactgggtagacctggtgtcctggagccacccaggacccacgtctaagtcccagcaggttgacctggtgtctttatttcctaaacaccgggttgacctgttatccaaaaacgaccaggtagacctggtggctcaatttttaccatctaaatttccccccaatttggcagaaaatgatttggctttgctggtgaacttagagttctacagatcggatttgcatgtgtatgagtgtgttcattttgctgcacattgggagggattaagtggtttgcctgaggtgtatgaacaacttgcaccacaaccgtgtgtgggagaaactttacattctagcctcccacgagacagtgaactgtttgtgcctgaagaggggagcagcgagaaggagagcgaggacgcgccaaaaacatctcctccgacgcctgggaaacatggtttggaacagactggggaggaaaaagtgatggtgactgttcctgacaaaaatccaccttgtccttgctgtggtacccgggtaaactctgtgttgaatctgattgaacatctgaaagtgtcacacgggaaaaggggggtttgttttcggtgtgcaaaatgtggaaaggaaaatagtaactatcacagtgttgtttgtcattttccaaaatgcaggggtccagagacggagaaagccccagctggggagtggatttgtgaggtatgcaacagagattttacaaccaaaattggcctgggacaacacaagagattggcacacccagcagtgagaaatcaggaaaggatcgttgcttcccaaccgaaagaaacatcaaatagaggtgctcacaaaaggtgctggacaaaggaggaggaagaattactaataagactggaggctcagttcgagggaaacaaaaatattaataagcttattgcagaacacataaccaccaaaacagctaagcagatcagtgacaaaaggcgattgctgtccagaaagccagcagaggagccacgtgaggagcctggaacgtgtcatcacaccaggagagcagctgcgagcctgagaacggagcctgagatgagtcatcacgcccaggcagaggacagagataatggacctgggagacgccctctgccaggcagggcagctgccggagggagaacaatggacgagataagacgccaccctgataagggcaacggacagcagagacccaccaagcaaaaatcagaagaacagctgcaggcttactataaaaagacactagaggaacgactttcagctggggcacttaacaccttcccccgagcattcaagcaggtaatggaaggccgggatataaagctagtaatcaatcagacagcgcaggactgcttcggatgcctggaatccataagccaaataagaacggcaacccgagataaaaaggacacggtgacccggaagaaacacccaaagaaaccttttcagaagtggatgaagaagagagcaatcaaaaaaggtaattatcttcggttccagcgtttattttatcttgatagagggaaactggctaaaatcattttagatgatattgaatgcttgtcttgtgacataccactcagtgaaatttattcggtttttaaaacaagatgggaaacaactggtagctttaaaagccttggggactttaaaacttacgggaaggctgacaacactgccttcagagaattaattacggctaaagaaattgagaaaaatgtgcaggaaatgagcaaaggctcggctcccggtccagacgggattactcttggggacgtcgtaaagatggatcccgagggctcccggaccatggagattttcaatttatggttaacaactggtaaaatcccggacatggtgagggggtgcagaaccgttttgattccaaaatcatcaaagccggatcgtttgaaagacattaataactggagacctatcacgatcggttccatcttgctgagactgttctccaggattgtaacagctaggctgagcaaagcgtgccccctgaacccaaggcaaagaggctttatcagagcggcgggatgctctgaaaacttaaaactcctgcaaactataatttggtcggccaaaagagaacacagaccactgggtgttgtattcgtggacatcgccaaggcttttgacaccgtaagccaccagcacatcattcatgctttgcagcaaagagaggtggatccccacatcgtcggtctggtgagcaatatgtacgagaacatcagtacgtatatcaccacaaagaggaacacacacacagacaaaatccagatccgggttggagtaaagcagggtgacccgatgtcgccccttttatttaacctggcaatggaccctctattatgcaagctggaagagagtggcaaaggataccaccgaggacagagcagcatcacagcgatggcatttgcagacgatctggttttgctgagcgactcctgggaaggcatgaatacaaatattagcatactggagaccttctgcaatctgaccggactcaaaacacaggggcaaaagtgccacggcttttacatcaagccgacaaagaagtcttacaccatcaatgactgcgctgcctggactatcaacggcacacccctgaacatgatcgaccccggcgaatctgagaaatacctcggcctgcagtttgacccgtggattggaatagcaaggtccggtctctccacaaaactagatttttggcttcagcggatcgatcaagcaccacttaaacctctgcagaaactggatattctcaaaacatacaccatccctcggctgatctacatagctgaccactcagaagtgaaaactgcactactcgaaacccttgaccagaagatccggacagcggtcaaggaatggcttcacctacctccgtgcacctgcgatgccatcctgtactcgagcacgagagacggcggtttgggcatcaccaaattggcaggactgatccccagcgtgcaggcccgtagactgcatcggatcgcacagtcatctgacgatacgatgaaatgcttcatggaaaaagagaaaatggaacagctgcataagaaattgtggattcaagctggaggggacagagagaacataccctcgatttgggaagcaccaccgtcgagtgaaccaccaaacaacgtgagcacaaattcggaatgggaagcaccgacccagaaagataaatttccaaagccttgcaattggaggaaaaacgaattcaaaaaatggaccaaattggcatcccaaggccgcggaattgtaaattttgaaagagacaaaattagtaaccattggatccaatactacagacgcatacctcacaggaaactcctcactgcactacaactcagggccaacgtttaccccacgagagaatttctagccaggggtagacaagaccaatacatcaaggcgtgtaggcactgcgatgcggacattgaatcctgcgcccacatcatcggcaactgcccagtgacacaggacgcccgaatcaagaggcacaattacatctgcgaactgcttctcgaggaggcgaagaagaaggactgggtagtgttcaaggaaccgcacataagggattccaacaaggaactgtacaaacctgacctgatatttgtgaaggatggccgtgcacttgtcgtggatgtgacagtacggtatgaagcagccaaatcatcgctggaggaagccgctgcagagaaagtgagaaagtacaaacacctggaaacggaagtaagacatctcacgaatgcaaaggacgttacttttgtgggctttcccctaggagcgcgggggaaatggcaccaagataactttaaacttttgactgagcttggcctctccaaatcgaggcaagtgaaaatggcagagactttttccacagtagcgctcttttcatctgtggacattgtacatatgtttgccagtagggccagaaaatctatggttatgtgataataggctgccttctgcggggcttgccttctggccatgcccttcttctctcccttgcacctgtacctcttggtctttgaataaagcctgagtaggaaggaccggtaaaaaaaaaaaaaaaaaaaaaaaaaaaaaaacgttgactaaaaaaaaaaaaaaaaaaaaaaaaaaaaaaaaaaaaaaaaaaaaaaaaaaaaaaaaaaaaaaaaaaaaaa

SEQ ID NO: 11571 - DNA, 4564 bp, synthetic construct
  source 1..4564: mol_type = other DNA
ggtctagttacaactgggcatcgctgcagagatcgcacctcctcgtggtcccgctggtagcccttcgaagggtgactaagtcgatctctgccccaggtacggagccgttgggactcaccagtccaacgtaactcctgcctaaattcggtgaaacaaattcctcggtaaaaagccccatggcttcttgcccgaaacctggccccccggtttcagcaggggcaatgagtttggaaagtggactgaccacccactccgttctcgccatcgaacgtggtcccaattcgttggcaaattccggatcagactttgggggggggggtctggggctaccgttacgcctattgagggtatcggtcggcactcagacctcccgctccgactgggtagacctggtgtcctggagccacccaggacccacgtctaagtcccagcaggttgacctggtgtctttatttcctaaacaccgggttgacctgttatccaaaaacgaccaggtagacctggtggctcaatttttaccatctaaatttccccccaatttggcagaaaatgatttggctttgctggtgaacttagagttctacagatcggatttgcatgtgtatgagtgtgttcattttgctgcacattgggagggattaagtggtttgcctgaggtgtatgaacaacttgcaccacaaccgtgtgtgggagaaactttacattctagcctcccacgagacagtgaactgtttgtgcctgaagaggggagcagcgagaaggagagcgaggacgcgccaaaaacatctcctccgacgcctgggaaacatggtttggaacagactggggaggaaaaagtgatggtgactgttcctgacaaaaatccaccttgtccttgctgtggtacccgggtaaactctgtgttgaatctgattgaacatctgaaagtgtcacacgggaaaaggggggtttgttttcggtgtgcaaaatgtggaaaggaaaatagtaactatcacagtgttgtttgtcattttccaaaatgcaggggtccagagacggagaaagccccagctggggagtggatttgtgaggtatgcaacagagattttacaaccaaaattggcctgggacaacacaagagattggcacacccagcagtgagaaatcaggaaaggatcgttgcttcccaaccgaaagaaacatcaaatagaggtgctcacaaaaggtgctggacaaaggaggaggaagaattactaataagactggaggctcagttcgagggaaacaaaaatattaataagcttattgcagaacacataaccaccaaaacagctaagcagatcagtgacaaaaggcgattgctgtccagaaagccagcagaggagccacgtgaggagcctggaacgtgtcatcacaccaggagagcagctgcgagcctgagaacggagcctgagatgagtcatcacgcccaggcagaggacagagataatggacctgggagacgccctctgccaggcagggcagctgccggagggagaacaatggacgagataagacgccaccctgataagggcaacggacagcagagacccaccaagcaaaaatcagaagaacagctgcaggcttactataaaaagacactagaggaacgactttcagctggggcacttaacaccttcccccgagcattcaagcaggtaatggaaggccgggatataaagctagtaatcaatcagacagcgcaggactgcttcggatgcctggaatccataagccaaataagaacggcaacccgagataaaaaggacacggtgacccggaagaaacacccaaagaaaccttttcagaagtggatgaagaagagagcaatcaaaaaaggtaattatcttcggttccagcgtttattttatcttgatagagggaaactggctaaaatcattttagatgatattgaatgcttgtcttgtgacataccactcagtgaaatttattcggtttttaaaacaagatgggaaacaactggtagctttaaaagccttggggactttaaaacttacgggaaggctgacaacactgccttcagagaattaattacggctaaagaaattgagaaaaatgtgcaggaaatgagcaaaggctcggctcccggtccagacgggattactcttggggacgtcgtaaagatggatcccgagttttcccggaccatggagattttcaatttatggttaacaactggtaaaatcccggacatggtgagggggtgcagaaccgttttgattccaaaatcatcaaagccggatcgtttgaaagacattaataactggagacctatcacgatcggttccatcttgctgagactgttctccaggattgtaacagctaggctgagcaaagcgtgccccctgaacccaaggcaaagaggctttatcagagcggcgggatgctctgaaaacttaaaactcctgcaaactataatttggtcggccaaaagagaacacagaccactgggtgttgtattcgtggacatcgccaaggcttttgacaccgtaagccaccagcacatcattcatgctttgcagcaaagagaggtggatccccacatcgtcggtctggtgagcaatatgtacgagaacatcagtacgtatatcaccacaaagaggaacacacacacagacaaaatccagatccgggttggagtaaagcagggtgacccgatgtcgccccttttatttaacctggcaatggaccctctattatgcaagctggaagagagtggcaaaggataccaccgaggacagagcagcatcacagcgatggcatttgcagacgatctggttttgctgagcgactcctgggaaggcatgaatacaaatattagcatactggagaccttctgcaatctgaccggactcaaaacacaggggcaaaagtgccacggcttttacatcaagccgacaaagaagtcttacaccatcaatgactgcgctgcctggactatcaacggcacacccctgaacatgatcgaccccggcgaatctgagaaatacctcggcctgcagtttgacccgtggattggaatagcaaggtccggtctctccacaaaactagatttttggcttcagcggatcgatcaagcaccacttaaacctctgcagaaactggatattctcaaaacatacaccatccctcggctgatctacatagctgaccactcagaagtgaaaactgcactactcgaaacccttgaccagaagatccggacagcggtcaaggaatggcttcacctacctccgtgcacctgcgatgccatcctgtactcgagcacgagagacggcggtttgggcatcaccaaattggcaggactgatccccagcgtgcaggcccgtagactgcatcggatcgcacagtcatctgacgatacgatgaaatgcttcatggaaaaagagaaaatggaacagctgcataagaaattgtggattcaagctggaggggacagagagaacataccctcgatttgggaagcaccaccgtcgagtgaaccaccaaacaacgtgagcacaaattcggaatgggaagcaccgacccagaaagataaatttccaaagccttgcaattggaggaaaaacgaattcaaaaaatggaccaaattggcatcccaaggccgcggaattgtaaattttgaaagagacaaaattagtaaccattggatccaatactacagacgcatacctcacaggaaactcctcactgcactacaactcagggccaacgtttaccccacgagagaatttctagccaggggtagacaagaccaatacatcaaggcgtgtaggcactgcgatgcggacattgaatcctgcgcccacatcatcggcaactgcccagtgacacaggacgcccgaatcaagaggcacaataagatctgcgaactgcttctcgaggaggcgaagaagaaggactgggtagtgttcaaggaaccgcacataagggattccaacaaggaactgtacaaacctgacctgatatttgtgaaggatggccgtgcacttgtcgtggatgtgacagtacggtatgaagcagccaaatcatcgctggaggaagccgctgcagagaaagtgagaaagtacaaacacctggaaacggaagtaagacatctcacgaatgcaaaggacgttacttttgtgggctttcccctaggagcgcgggggaaatggcaccaagataactttaaacttttgactgagcttggcctctccaaatcgaggcaagtgaaaatggcagagactttttccacagtagcgctcttttcatctgtggacattgtacatatgtttgccagtagggccagaaaatctatggttatgtgataataggctgccttctgcggggcttgccttctggccatgcccttcttctctcccttgcacctgtacctcttggtctttgaataaagcctgagtaggaaggaccggtaaaaaaaaaaaaaaaaaaaaaaaaaaaaaaacgttgactaaaaaaaaaaaaaaaaaaaaaaaaaaaaaaaaaaaaaaaaaaaaaaaaaaaaaaaaaaaaaaaaaaaaaa

SEQ ID NO: 11572 - DNA, 4564 bp, synthetic construct
  source 1..4564: mol_type = other DNA
ggtctagttacaactgggcatcgctgcagagatcgcacctcctcgtggtcccgctggtagcccttcgaagggtgactaagtcgatctctgccccaggtacggagccgttgggactcaccagtccaacgtaactcctgcctaaattcggtgaaacaaattcctcggtaaaaagccccatggcttcttgcccgaaacctggccccccggtttcagcaggggcaatgagtttggaaagtggactgaccacccactccgttctcgccatcgaacgtggtcccaattcgttggcaaattccggatcagactttgggggggggggtctggggctaccgttacgcctattgagggtatcggtcggcactcagacctcccgctccgactgggtagacctggtgtcctggagccacccaggacccacgtctaagtcccagcaggttgacctggtgtctttatttcctaaacaccgggttgacctgttatccaaaaacgaccaggtagacctggtggctcaatttttaccatctaaatttccccccaatttggcagaaaatgatttggctttgctggtgaacttagagttctacagatcggatttgcatgtgtatgagtgtgttcattttgctgcacattgggagggattaagtggtttgcctgaggtgtatgaacaacttgcaccacaaccgtgtgtgggagaaactttacattctagcctcccacgagacagtgaactgtttgtgcctgaagaggggagcagcgagaaggagagcgaggacgcgccaaaaacatctcctccgacgcctgggaaacatggtttggaacagactggggaggaaaaagtgatggtgactgttcctgacaaaaatccaccttgtccttgctgtggtacccgggtaaactctgtgttgaatctgattgaacatctgaaagtgtcacacgggaaaaggggggtttgttttcggtgtgcaaaatgtggaaaggaaaatagtaactatcacagtgttgtttgtcattttccaaaatgcaggggtccagagacggagaaagccccagctggggagtggatttgtgaggtatgcaacagagattttacaaccaaaattggcctgggacaacacaagagattggcacacccagcagtgagaaatcaggaaaggatcgttgcttcccaaccgaaagaaacatcaaatagaggtgctcacaaaaggtgctggacaaaggaggaggaagaattactaataagactggaggctcagttcgagggaaacaaaaatattaataagcttattgcagaacacataaccaccaaaacagctaagcagatcagtgacaaaaggcgattgctgtccagaaagccagcagaggagccacgtgaggagcctggaacgtgtcatcacaccaggagagcagctgcgagcctgagaacggagcctgagatgagtcatcacgcccaggcagaggacagagataatggacctgggagacgccctctgccaggcagggcagctgccggagggagaacaatggacgagataagacgccaccctgataagggcaacggacagcagagacccaccaagcaaaaatcagaagaacagctgcaggcttactataaaaagacactagaggaacgactttcagctggggcacttaacaccttcccccgagcattcaagcaggtaatggaaggccgggatataaagctagtaatcaatcagacagcgcaggactgcttcggatgcctggaatccataagccaaataagaacggcaacccgagataaaaaggacacggtgacccggaagaaacacccaaagaaaccttttcagaagtggatgaagaagagagcaatcaaaaaaggtaattatcttcggttccagcgtttattttatcttgatagagggaaactggctaaaatcattttagatgatattgaatgcttgtcttgtgacataccactcagtgaaatttattcggtttttaaaacaagatgggaaacaactggtagctttaaaagccttggggactttaaaacttacgggaaggctgacaacactgccttcagagaattaattacggctaaagaaattgagaaaaatgtgcaggaaatgagcaaaggctcggctcccggtccagacgggattactcttggggacgtcgtaaagatggatcccgagggctcccggaccatggagattttcaatttatggttaacaactggtaaaatcccggacatggtgagggggtgcagaaccgttttgattccaaaatcatcaaagccggatcgtttgaaagacattaataactggagacctatcacgatcggttccatcttgctgagactgttctccaggattgtaacagctaggctgagcaaagcgtgccccctgaacccaaggcaaagaggctttatcagagcggcgggatgctctgaaaacttaaaactcctgcaaactataatttggtcggccaaaagagaacacagaccactgggtgttgtattcgtggacatcgccaaggcttttgacaccgtaagccaccagcacatcattcatgctttgcagcaaagagaggtggatccccacatcgtcggtctggtgagcaatatgtacgagaacatcagtacgtatatcaccacaaagaggaacacacacacagacaaaatccagatccgggttggagtaaagcagggtgacccgatgtcgccccttttatttaacctggcaatggaccctctattatgcaagctggaagagagtggcaaaggataccaccgaggacagagcagcatcacagcgatggcatttgcagacgatctggttttgctgagcgactcctgggaaaatatgaatacaaatattagcatactggagaccttctgcaatctgaccggactcaaaacacaggggcaaaagtgccacggcttttacatcaagccgacaaagaagtcttacaccatcaatgactgcgctgcctggactatcaacggcacacccctgaacatgatcgaccccggcgaatctgagaaatacctcggcctgcagtttgacccgtggattggaatagcaaggtccggtctctccacaaaactagatttttggcttcagcggatcgatcaagcaccacttaaacctctgcagaaactggatattctcaaaacatacaccatccctcggctgatctacatagctgaccactcagaagtgaaaactgcactactcgaaacccttgaccagaagatccggacagcggtcaaggaatggcttcacctacctccgtgcacctgcgatgccatcctgtactcgagcacgagagacggcggtttgggcatcaccaaattggcaggactgatccccagcgtgcaggcccgtagactgcatcggatcgcacagtcatctgacgatacgatgaaatgcttcatggaaaaagagaaaatggaacagctgcataagaaattgtggattcaagctggaggggacagagagaacataccctcgatttgggaagcaccaccgtcgagtgaaccaccaaacaacgtgagcacaaattcggaatgggaagcaccgacccagaaagataaatttccaaagccttgcaattggaggaaaaacgaattcaaaaaatggaccaaattggcatcccaaggccgcggaattgtaaattttgaaagagacaaaattagtaaccattggatccaatactacagacgcatacctcacaggaaactcctcactgcactacaactcagggccaacgtttaccccacgagagaatttctagccaggggtagacaagaccaatacatcaaggcgtgtaggcactgcgatgcggacattgaatcctgcgcccacatcatcggcaactgcccagtgacacaggacgcccgaatcaagaggcacaattacatctgcgaactgcttctcgaggaggcgaagaagaaggactgggtagtgttcaaggaaccgcacataagggattccaacaaggaactgtacaaacctgacctgatatttgtgaaggatggccgtgcacttgtcgtggatgtgacagtacggtatgaagcagccaaatcatcgctggaggaagccgctgcagagaaagtgagaaagtacaaacacctggaaacggaagtaagacatctcacgaatgcaaaggacgttacttttgtgggctttcccctaggagcgcgggggaaatggcaccaagataactttaaacttttgactgagcttggcctctccaaatcgaggcaagtgaaaatggcagagactttttccacagtagcgctcttttcatctgtggacattgtacatatgtttgccagtagggccagaaaatctatggttatgtgataataggctgccttctgcggggcttgccttctggccatgcccttcttctctcccttgcacctgtacctcttggtctttgaataaagcctgagtaggaaggaccggtaaaaaaaaaaaaaaaaaaaaaaaaaaaaaaacgttgactaaaaaaaaaaaaaaaaaaaaaaaaaaaaaaaaaaaaaaaaaaaaaaaaaaaaaaaaaaaaaaaaaaaaaa

SEQ ID NO: 11573 - DNA, 4564 bp, synthetic construct
  source 1..4564: mol_type = other DNA
ggtctagttacaactgggcatcgctgcagagatcgcacctcctcgtggtcccgctggtagcccttcgaagggtgactaagtcgatctctgccccaggtacggagccgttgggactcaccagtccaacgtaactcctgcctaaattcggtgaaacaaattcctcggtaaaaagccccatggcttcttgcccgaaacctggccccccggtttcagcaggggcaatgagtttggaaagtggactgaccacccactccgttctcgccatcgaacgtggtcccaattcgttggcaaattccggatcagactttgggggggggggtctggggctaccgttacgcctattgagggtatcggtcggcactcagacctcccgctccgactgggtagacctggtgtcctggagccacccaggacccacgtctaagtcccagcaggttgacctggtgtctttatttcctaaacaccgggttgacctgttatccaaaaacgaccaggtagacctggtggctcaatttttaccatctaaatttccccccaatttggcagaaaatgatttggctttgctggtgaacttagagttctacagatcggatttgcatgtgtatgagtgtgttcattttgctgcacattgggagggattaagtggtttgcctgaggtgtatgaacaacttgcaccacaaccgtgtgtgggagaaactttacattctagcctcccacgagacagtgaactgtttgtgcctgaagaggggagcagcgagaaggagagcgaggacgcgccaaaaacatctcctccgacgcctgggaaacatggtttggaacagactggggaggaaaaagtgatggtgactgttcctgacaaaaatccaccttgtccttgctgtggtacccgggtaaactctgtgttgaatctgattgaacatctgaaagtgtcacacgggaaaaggggggtttgttttcggtgtgcaaaatgtggaaaggaaaatagtaactatcacagtgttgtttgtcattttccaaaatgcaggggtccagagacggagaaagccccagctggggagtggatttgtgaggtatgcaacagagattttacaaccaaaattggcctgggacaacacaagagattggcacacccagcagtgagaaatcaggaaaggatcgttgcttcccaaccgaaagaaacatcaaatagaggtgctcacaaaaggtgctggacaaaggaggaggaagaattactaataagactggaggctcagttcgagggaaacaaaaatattaataagcttattgcagaacacataaccaccaaaacagctaagcagatcagtgacaaaaggcgattgctgtccagaaagccagcagaggagccacgtgaggagcctggaacgtgtcatcacaccaggagagcagctgcgagcctgagaacggagcctgagatgagtcatcacgcccaggcagaggacagagataatggacctgggagacgccctctgccaggcagggcagctgccggagggagaacaatggacgagataagacgccaccctgataagggcaacggacagcagagacccaccaagcaaaaatcagaagaacagctgcaggcttactataaaaagacactagaggaacgactttcagctggggcacttaacaccttcccccgagcattcaagcaggtaatggaaggccgggatataaagctagtaatcaatcagacagcgcaggactgcttcggatgcctggaatccataagccaaataagaacggcaacccgagataaaaaggacacggtgacccggaagaaacacccaaagaaaccttttcagaagtggatgaagaagagagcaatcaaaaaaggtaattatcttcggttccagcgtttattttatcttgatagagggaaactggctaaaatcattttagatgatattgaatgcttgtcttgtgacataccactcagtgaaatttattcggtttttaaaacaagatgggaaacaactggtagctttaaaagccttggggactttaaaacttacgggaaggctgacaacactgccttcagagaattaattacggctaaagaaattgagaaaaatgtgcaggaaatgagcaaaggctcggctcccggtccagacgggattactcttggggacgtcgtaaagatggatcccgagggctcccggaccatggagattttcaatttatggttaacaactggtaaaatcccggacatggtgagggggtgcagaaccgttttgattccaaaatcatcaaagccggatcgtttgaaagacattaataactggagacctatcacgatcggttccatcttgctgagactgttctccaggattgtaacagctaggctgagcaaagcgtgccccctgaacccaaggcaaagaggctttatcagagcggcgggatgctctgaaaacttaaaactcctgcaaactataatttggtcggccaaaagagaacacagaccactgggtgttgtattcgtggacatcgccaaggcttttgacaccgtaagccaccagcacatcattcatgctttgcagcaaagagaggtggatccccacatcgtcggtctggtgagcaatatgtacgagaacatcagtacgtatatcaccacaaagaggaacacacacacagacaaaatccagatccgggttggagtaaagcagggtgacccgatgtcgccccttttatttaacctggcaatggaccctctattatgcaagctggaagagagtggcaaaggataccaccgaggacagagcagcatcacagcgatggcatttgcagacgatctggttttgctgagcgactcctgggaaggcatgaatacaaatattagcatactggagaccttctgcaatctgaccggactcaaaacacaggggcaaaagtgccacggcttttacatcaagccgacaaagaagtcttacaccatcaatgactgcgctgcctggactatcaacggcacacccctgaacatgatcgaccccggcgaatctgagaaatacctcggcctgcagtttgacccgtggattggaatagcaaggtccggtctctccacaaaactagatttttggcttcagcggatcgatcaagcaccacttaaacctctgcagaaactggatattctcaaaacatacaccatccctcggctgatctacatagctgaccactcagaagtgaaaagcgcactactcgaaacccttgaccagaagatccggacagcggtcaaggaatggcttcacctacctccgtgcacctgcgatgccatcctgtactcgagcacgagagacggcggtttgggcatcaccaaattggcaggactgatccccagcgtgcaggcccgtagactgcatcggatcgcacagtcatctgacgatacgatgaaatgcttcatggaaaaagagaaaatggaacagctgcataagaaattgtggattcaagctggaggggacagagagaacataccctcgatttgggaagcaccaccgtcgagtgaaccaccaaacaacgtgagcacaaattcggaatgggaagcaccgacccagaaagataaatttccaaagccttgcaattggaggaaaaacgaattcaaaaaatggaccaaattggcatcccaaggccgcggaattgtaaattttgaaagagacaaaattagtaaccattggatccaatactacagacgcatacctcacaggaaactcctcactgcactacaactcagggccaacgtttaccccacgagagaatttctagccaggggtagacaagaccaatacatcaaggcgtgtaggcactgcgatgcggacattgaatcctgcgcccacatcatcggcaactgcccagtgacacaggacgcccgaatcaagaggcacaattacatctgcgaactgcttctcgaggaggcgaagaagaaggactgggtagtgttcaaggaaccgcacataagggattccaacaaggaactgtacaaacctgacctgatatttgtgaaggatggccgtgcacttgtcgtggatgtgacagtacggtatgaagcagccaaatcatcgctggaggaagccgctgcagagaaagtgagaaagtacaaacacctggaaacggaagtaagacatctcacgaatgcaaaggacgttacttttgtgggctttcccctaggagcgcgggggaaatggcaccaagataactttaaacttttgactgagcttggcctctccaaatcgaggcaagtgaaaatggcagagactttttccacagtagcgctcttttcatctgtggacattgtacatatgtttgccagtagggccagaaaatctatggttatgtgataataggctgccttctgcggggcttgccttctggccatgcccttcttctctcccttgcacctgtacctcttggtctttgaataaagcctgagtaggaaggaccggtaaaaaaaaaaaaaaaaaaaaaaaaaaaaaaacgttgactaaaaaaaaaaaaaaaaaaaaaaaaaaaaaaaaaaaaaaaaaaaaaaaaaaaaaaaaaaaaaaaaaaaaaa

SEQ ID NO: 11574 - DNA, 4564 bp, synthetic construct
  source 1..4564: mol_type = other DNA
ggtctagttacaactgggcatcgctgcagagatcgcacctcctcgtggtcccgctggtagcccttcgaagggtgactaagtcgatctctgccccaggtacggagccgttgggactcaccagtccaacgtaactcctgcctaaattcggtgaaacaaattcctcggtaaaaagccccatggcttcttgcccgaaacctggccccccggtttcagcaggggcaatgagtttggaaagtggactgaccacccactccgttctcgccatcgaacgtggtcccaattcgttggcaaattccggatcagactttgggggggggggtctggggctaccgttacgcctattgagggtatcggtcggcactcagacctcccgctccgactgggtagacctggtgtcctggagccacccaggacccacgtctaagtcccagcaggttgacctggtgtctttatttcctaaacaccgggttgacctgttatccaaaaacgaccaggtagacctggtggctcaatttttaccatctaaatttccccccaatttggcagaaaatgatttggctttgctggtgaacttagagttctacagatcggatttgcatgtgtatgagtgtgttcataaggctgcacattgggagggattaagtggtttgcctgaggtgtatgaacaacttgcaccacaaccgtgtgtgggagaaactttacattctagcctcccacgagacagtgaactgtttgtgcctgaagaggggagcagcgagaaggagagcgaggacgcgccaaaaacatctcctccgacgcctgggaaacatggtttggaacagactggggaggaaaaagtgatggtgactgttcctgacaaaaatccaccttgtccttgctgtggtacccgggtaaactctgtgttgaatctgattgaacatctgaaagtgtcacacgggaaaaggggggtttgttttcggtgtgcaaaatgtggaaaggaaaatagtaactatcacagtgttgtttgtcattttaagaaatgcaggggtccagagacggagaaagccccagctggggagtggatttgtgaggtatgcaacagagattttacaaccaaaattggcctgggacaacacaagagattggcacacccagcagtgagaaatcaggaaaggatcgttgcttcccaaccgaaagaaacatcaaatagaggtgctcacaaaaggtgctggacaaaggaggaggaagaattactaataagactggaggctcagttcgagggaaacaaaaatattaataagcttattgcagaacacataaccaccaaaacagctaagcagatcagtgacaaaaggcgattgctgtccagaaagccagcagaggagccacgtgaggagcctggaacgtgtcatcacaccaggagagcagctgcgagcctgagaacggagcctgagatgagtcatcacgcccaggcagaggacagagataatggacctgggagacgccctctgccaggcagggcagctgccggagggagaacaatggacgagataagacgccaccctgataagggcaacggacagcagagacccaccaagcaaaaatcagaagaacagctgcaggcttactataaaaagacactagaggaacgactttcagctggggcacttaacaccttcccccgagcattcaagcaggtaatggaaggccgggatataaagctagtaatcaatcagacagcgcaggactgcttcggatgcctggaatccataagccaaataagaacggcaacccgagataaaaaggacacggtgacccgggagaaacacccaaagaaaccttttcagaagtggatgaagaagagagcaatcaaaaaaggtaattatcttcggttccagcgtttattttatcttgatagagggaaactggctaaaatcattttagatgatattgaatgcttgtcttgtgacataccactcagtgaaatttattcggtttttaaaacaagatgggaaacaactggtagctttaaaagccttggggactttaaaacttacgggaaggctgacaacactgccttcagagaattaattacggctaaagaaattgagaaaaatgtgcaggaaatgagcaaaggctcggctcccggtccagacgggattactcttggggacgtcgtaaagatggatcccgagggctcccggaccatggagattttcaatttatggttaacaactggtaaaatcccggacatggtgagggggtgcagaaccgttttgattccaaaatcatcagacccggatcgtttgaaagacattaataactggagacctatcacgatcggttccatcttgctgagactgttctccaggattgtaacagctaggctgagcaaagcgtgccccctgaacccaaggcaaagaggctttatcagagcggcgggatgctctgaaaacttaaaactcctgcaaactataatttggtcggccaaaagagaacacagaccactgggtgttgtattcgtggacatcgccaaggcttttgacaccgtaagccaccagcacatcattcatgctttgcagcaaagagaggtggatccccacatcgtcggtctggtgagcaatatgtacgagaacatcagtacgtatatcaccacaaagaggaacacacacacagacaaaatccagatccgggttggagtaaagcagggtgacccgatgtcgccccttttatttaacctggcaatggaccctctattatgcaagctggaagagagtggcaaaggataccaccgaggacagagcagcatcacagcgatggcatttgcagacgatctggttttgctgagcgactcctgggaaaatatgaatacaaatattagcatactggagaccttctgcaatctgaccggactcaaaacacaggggcaaaagtgccacggcttttacatcaagccgacaaaggactcttacaccatcaatgactgcgctgcctggactatcaacggcacacccctgaacatgatcgaccccggcgaatctgagaaatacctcggcctgcagtttgacccgtggattggaatagcaaggtccggtctctccacaaaactagatttttggcttcagcggatcgatcaagcaccacttaaacctctgcagaaaactgatattctcaaaacatacaccatccctcggctgatctacatagctgaccactcagaagtgaaaactgcactactcgaaacccttgaccagaagatccggacagcggtcaaggaatggcttcacctacctccgtgcacctgcgatgccatcctgtactcgagcacgagagacggcggtttgggcatcaccaaattggcaggactgatccccagcgtgcaggcccgtagactgcatcggatcgcacagtcatctgacgatacgatgaaatgcttcatggaaaaagagaaaatggaacagctgcataagaaattgtggattcaagctggaggggacagagagaacataccctcgatttgggaagcaccaccgtcgagtgaaccaccaaacaacgtgagcacaaattcggaatgggaagcaccgacccagaaagataaatttccaaagccttgcaattggaggaaaaacgaattcaaaaaatggaccaaattggcatcccaaggccgcggaattgtaaattttgaaagagacaaaattagtaaccattggatccaatactacagacgcatacctcacaggaaactcctcactgcactacaactcagggccaacgtttaccccacgagagaatttctagccaggggtagacaagaccaatacatcaaggcgtgtaggcactgcgatgcggacattgaatcctgcgcccacatcatcggcaactgcccagtgacacaggacgcccgaatcaagaggcacaataagatctgcgaactgcttctcgaggaggcgaagaagaaggactgggtagtgttcaaggaaccgcacataagggattccaacaaggaactgtacaaacctgacctgatatttgtgaaggatgcccgtgcacttgtcgtggatgtgacagtacggtatgaagcagccaaatcatcgctggaggaagccgctgcagagaaagtgagaaagtacaaacacctggaaacggaagtaagacatctcacgaatgcaaaggacgttacttttgtgggctttcccctaggagcgcgggggaaatggcaccaagataactttaaacttttgactgagcttggcctctccaaatcgaggcaagtgaaaatggcagagactttttccacagtagcgctcttttcatctgtggacattgtacatatgtttgccagtagggccagaaaatctatggttatgtgataataggctgccttctgcggggcttgccttctggccatgcccttcttctctcccttgcacctgtacctcttggtctttgaataaagcctgagtaggaaggaccggtaaaaaaaaaaaaaaaaaaaaaaaaaaaaaaacgttgactaaaaaaaaaaaaaaaaaaaaaaaaaaaaaaaaaaaaaaaaaaaaaaaaaaaaaaaaaaaaaaaaaaaaaa

SEQ ID NO: 11575 - DNA, 4564 bp, synthetic construct
  source 1..4564: mol_type = other DNA
ggtctagttacaactgggcatcgctgcagagatcgcacctcctcgtggtcccgctggtagcccttcgaagggtgactaagtcgatctctgccccaggtacggagccgttgggactcaccagtccaacgtaactcctgcctaaattcggtgaaacaaattcctcggtaaaaagccccatggcttcttgcccgaaacctggccccccggtttcagcaggggcaatgagtttggaaagtggactgaccacccactccgttctcgccatcgaacgtggtcccaattcgttggcaaattccggatcagactttgggggggggggtctggggctaccgttacgcctattgagggtatcggtcggcactcagacctcccgctccgactgggtagacctggtgtcctggagccacccaggacccacgtctaagtcccagcaggttgacctggtgtctttatttcctaaacaccgggttgacctgttatccaaaaacgaccaggtagacctggtggctcaatttttaccatctaaatttccccccaatttggcagaaaatgatttggctttgctggtgaacttagagttctacagatcggatttgcatgtgtatgagggcgttcataaggctgcacattgggagggattaagtggtttgcctgaggtgtatgaacaacttgcaccacaaccgtgtgtgggagaaactttacattctagcctcccacgagacagtgaactgtttgtgcctgaagaggggagcagcgagaaggagagcgaggacgcgccaaaaacatctcctccgacgcctgggaaacatggtttggaacagactggggaggaaaaagtgatggtgactgttcctgacaaaaatccaccttgtccttgctgtggtacccgggtaaactctgtgttgaatctgattgaacatctgaaagtgtcacacgggaaaaggggggtttgttttcggtgtgcaaaatgtggaaaggaaaatagtaactatcacagtgttgtttgtcattttaagaaatgcaggggtccagagacggagaaagccccagctggggagtggatttgtgaggtatgcaacagagattttacaaccaaaattggcctgggacaacacaagagattggcacacccagcagtgagaaatcaggaaaggatcgttgcttcccaaccgaaagaaacatcaaatagaggtgctcacaaaaggtgctggacaaaggaggaggaagaattactaataagactggaggctcagttcgagggaaacaaaaatattaataagcttattgcagaacacataaccaccaaaacagctaagcagatcagtgacaaaaggcgattgctgtccagaaagccagcagaggagccacgtgaggagcctggaacgtgtcatcacaccaggagagcagctgcgagcctgagaacggagcctgagatgagtcatcacgcccaggcagaggacagagataatggacctgggagacgccctctgccaggcagggcagctgccggagggagaacaatggacgagataagacgccaccctgataagggcaacggacagcagagacccaccaagcaaaaatcagaagaacagctgcaggcttactataaaaagacactagaggaacgactttcagctggggcacttaacaccttcccccgagcattcaagcaggtaatggaaggccgggatataaagctagtaatcaatcagacagcgcaggactgcttcggatgcctggaatccataagccaaataagaacggcaacccgagataaaaaggacacggtgacccgggagaaacacccaaagaaaccttttcagaagtggatgaagaagagagcaatcaaaaaaggtaattatcttcggttccagcgtttattttatcttgatagagggaaactggctaaaatcattttagatgatattgaatgcttgtcttgtgacataccactcagtgaaatttattcggtttttaaaacaagatgggaaacaactggtagctttaaaagccttggggactttaaaacttacgggaaggctgacaacactgccttcagagaattaattacggctaaagaaattgagaaaaatgtgcaggaaatgagcaaaggctcggctcccggtccagacgggattactcttggggacgtcgtaaagatggatcccgagggctcccggaccatggagattttcaatttatggttaacaactggtaaaatcccggacatggtgagggggtgcagaaccgttttgattccaaaatcatcagacccggatcgtttgaaagacattaataactggagacctatcacgatcggttccatcttgctgagactgttctccaggattgtaacagctaggctgagcaaagcgtgccccctgaacccaaggcaaagaggctttatcagagcggcgggatgctctgaaaacttaaaactcctgcaaactataatttggtcggccaaaagagaacacagaccactgggtgttgtattcgtggacatcgccaaggcttttgacaccgtaagccaccagcacatcattcatgctttgcagcaaagagaggtggatccccacatcgtcggtctggtgagcaatatgtacgagaacatcagtacgtatatcaccacaaagaggaacacacacacagacaaaatccagatccgggttggagtaaagcagggtgacccgatgtcgccccttttatttaacctggcaatggaccctctattatgcaagctggaagagagtggcaaaggataccaccgaggacagagcagcatcacagcgatggcatttgcagacgatctggttttgctgagcgactcctgggaaaatatgaatacaaatattagcatactggagaccttctgcaatctgaccggactcaaaacacaggggcaaaagtgccacggcttttacatcaagccgacaaaggactcttacaccatcaatgactgcgctgcctggactatcaacggcacacccctgaacatgatcgaccccggcgaatctgagaaatacctcggcctgcagtttgacccgtggattggaatagcaaggtccggtctctccacaaaactagatttttggcttcagcggatcgatcaagcaccacttaaacctctgcagaaactggatattctcaaaacatacaccatccctcggctgatctacatagctgaccactcagaagtgaaaactgcactactcgaaacccttgaccagaagatccggacagcggtcaaggaatggcttcacctacctccgtgcacctgcgatgccatcctgtactcgagcacgagagacggcggtttgggcatcaccaaattggcaggactgatccccagcgtgcaggcccgtagactgcatcggatcgcacagtcatctgacgatacgatgaaatgcttcatggaaaaagagaaaatggaacagctgcataagaaattgtggattcaagctggaggggacagagagaacataccctcgatttgggaagcaccaccgtcgagtgaaccaccaaacaacgtgagcacaaattcggaatgggaagcaccgacccagaaagataaatttccaaagccttgcaattggaggaaaaacgaattcaaaaaatggaccaaattggcatcccaaggccgcggaattgtaaattttgaaagagacaaaattagtaaccattggatccaatactacagacgcatacctcacaggaaactcctcactgcactacaactcagggccaacgtttaccccacgagagaatttctagccaggggtagacaagaccaatacatcaaggcgtgtaggcactgcgatgcggacattgaatcctgcgcccacatcatcggcaactgcccagtgacacaggacgcccgaatcaagaggcacaataagatctgcgaactgcttctcgaggaggcgaagaagaaggactgggtagtgttcaaggaaccgcacataagggattccaacaaggaactgtacaaacctgacctgatatttgtgaaggatgcccgtgcacttgtcgtggatgtgacagtacggtatgaagcagccaaatcatcgctggaggaagccgctgcagagaaagtgagaaagtacaaacacctggaaacggaagtaagacatctcacgaatgcaaaggacgttacttttgtgggctttcccctaggagcgcgggggaaatggcaccaagataactttaaacttttgactgagcttggcctctccaaatcgaggcaagtgaaaatggcagagactttttccacagtagcgctcttttcatctgtggacattgtacatatgtttgccagtagggccagaaaatctatggttatgtgataataggctgccttctgcggggcttgccttctggccatgcccttcttctctcccttgcacctgtacctcttggtctttgaataaagcctgagtaggaaggaccggtaaaaaaaaaaaaaaaaaaaaaaaaaaaaaaacgttgactaaaaaaaaaaaaaaaaaaaaaaaaaaaaaaaaaaaaaaaaaaaaaaaaaaaaaaaaaaaaaaaaaaaaaa

SEQ ID NO: 11576 - DNA, 4564 bp, synthetic construct
  source 1..4564: mol_type = other DNA
ggtctagttacaactgggcatcgctgcagagatcgcacctcctcgtggtcccgctggtagcccttcgaagggtgactaagtcgatctctgccccaggtacggagccgttgggactcaccagtccaacgtaactcctgcctaaattcggtgaaacaaattcctcggtaaaaagccccatggcttcttgcccgaaacctggccccccggtttcagcaggggcaatgagtttggaaagtggactgaccacccactccgttctcgccatcgaacgtggtcccaattcgttggcaaattccggatcagactttgggggggggggtctggggctaccgttacgcctattgagggtatcggtcggcactcagacctcccgctccgactgggtagacctggtgtcctggagccacccaggacccacgtctaagtcccagcaggttgacctggtgtctttatttcctaaacaccgggttgacctgttatccaaaaacgaccaggtagacctggtggctcaatttttaccatctaaatttccccccaatttggcagaaaatgatttggctttgctggtgaacttagagttctacagatcggatttgcatgtgtatgagggcgttcattttgctgcacattgggagggattaagtggtttgcctgaggtgtatgaacaacttgcaccacaaccgtgtgtgggagaaactttacattctagcctcccacgagacagtgaactgtttgtgcctgaagaggggagcagcgagaaggagagcgaggacgcgccaaaaacatctcctccgacgcctgggaaacatggtaagaggcagactggggaggaaaaagtgatggtgactgttcctgacaaaaatccaccttgtccttgctgtggtacccgggtaaactctgtgttgaatctgattgaacatctgaaagtgtcacacgggaaaaggagggtttgttttcggtgtgcaaaatgtggaaaggaaaatagtaactatcacagtgttgtttgtcattttccaaaatgcaggggtccagagacggagaaagccccagctggggagtggatttgtgaggtatgcaacagagattttacaaccaaaattggcctgggacaacacaagagattggcacacccagcagtgagaaatcaggaaaggatcgttgcttcccaaccgaaagaaacatcaaatagaggtgctcacaaaaggtgctggacaaaggaggaggaagaattactaataagactggaggctcagttcgagggaaacaaaaatattaataagcttattgcagaacacataaccaccaaaacagctaagcagatcagtgacaaaaggcgattgctgtccagaaagccagcagaggagccacgtgaggagcctggaacgtgtcatcacaccaggagagcagctgcgagcctgagaacggagcctgagatgagtcatcacgcccaggcagaggacagagataatggacctgggagacgccctctgccaggcagggcagctgccggagggagaacaatggacgagataagacgccaccctgataagggcaacggacagcagagacccaccaagcaaaaatcagaagaacagctgcaggcttactataaaaagacactagaggaacgactttcagctggggcacttaacaccttcccccgagcattcaagcaggtaatggaaggccgggatataaagctagtaatcaatcagacagcgcaggactgcttcggatgcctggaatccataagccaaataagaacggcaacccgagataaaaagtacacggtgacccgggagaaacacccaaagaaaccttttcagaagtggatgaagaagagagcaatcaaaaaaggtaattatcttcggttccagcgtttattttatcttgatagagggaaactggctaaaatcattttagatgatattgaatgcttgtcttgtgacataccactcagtgaaatttattcggtttttaaaacaagatgggaaacaactggtagctttaaaagccttggggactttaaaacttacgggaaggctgacaacactgccttcagagaattaattacggctaaagaaattgagaaaaatgtgcaggaaatgagcaaaggctcggctcccggtccagacgggattactcttggggacgtcgtaaagatggatcccgagttttcccggaccatggagattttcaatttatggttaacaactggtaaaatcccggacatggtgagggggtgcagaaccgttttgattccaaaatcatcaaagccggatcgtttgaaagacattaataactggagacctatcacgatcggttccatcttgctgagactgttctccaggattgtaacagctaggctgagcaaagcgtgccccctgaacccaaggcaaagaggctttatcagagcggcgggatgctctgaaaacttaaaactcctgcaaactataatttggtcggccaaaagagaacacagaccactgggtgttgtattcgtggacatcgccaaggcttttgacaccgtaagccaccagcacatcattcatgctttgcagcaaagagaggtggatccccacatcgtcggtctggtgagcaatatgtacgagaacatcagtacgtatatcaccacaaagaggaacacacacacagacaaaatccagatccgggttggagtaaagcagggtgacccgatgtcgccccttttatttaacctggcaatggaccctctattatgcaagctggaagagagtggcaaaggataccaccgaggacagagcagcatcacagcgatggcatttgcagacgatctggttttgctgagcgactcctgggaaaatatgaatacaaatattagcatactggagaccttctgcaatctgaccggactcaaaacacaggggcaaaagtgccacggcttttacatcaagccgacaaaggactcttacaccatcaatgactgcgctgcctggactatcaacggcacacccctgaacatgatcgaccccggcgaatctgagaaatacctcggcctgcagtttgacccgtggattggaatagcaaggtccggtctctccacaaaactagatttttggcttcagcggatcgatcaagcaccacttaaacctctgcagaaaactgatattctcaaaacatacaccatccctcggctgatctacatagctgaccactcagaagtgaaaactgcactactcgaaacccttgaccagaagatccggacagcggtcaaggaatggcttcacctacctccgtgcacctgcgatgccatcctgtactcgagcacgagagacggcggtttgggcatcaccaaattggcaggactgatccccagcgtgcaggcccgtagactgcatcggatcgcacagtcatctgacgatacgatgaaatgcttcatggaaaaagagaaaatggaacagctgcataagaaattgtggattcaagctggaggggacagagagaacataccctcgatttgggaagcaccaccgtcgagtgaaccaccaaacaacgtgagcacaaattcggaatgggaagcaccgacccagaaagataaatttccaaagccttgcaattggaggaaaaacgaattcaaaaaatggaccaaattggcatcccaaggccgcggaattgtaaattttgaaagagacaaaattagtaaccattggatccaatactacagacgcatacctcacaggaaactcctcactgcactacaactcagggccaacgtttaccccacgagagaatttctagccaggggtagacaagaccaatacatcaaggcgtgtaggcactgcgatgcggacattgaatcctgcgcccacatcatcggcaactgcccagtgacacaggacgcccgaatcaagaggcacaattacatctgcgaactgcttctcgaggaggcgaagaagaaggactgggtagtgttcaaggaaccgcacataagggattccaacaaggaactgtacaaacctgacctgatatttgtgaaggatggccgtgcacttgtcgtggatgtgacagtacggtatgaagcagccaaatcatcgctggaggaagccgctgcagagaaagtgagaaagtacaaacacctggaaacggaagtaagacatctcacgaatgcaaaggacgttacttttgtgggctttcccctaggagcgcgggggaaatggcaccaagataactttaaacttttgactgagcttggcctctccaaatcgaggcaagtgaaaatggcagagactttttccacagtagcgctcttttcatctgtggacattgtacatatgtttgccagtagggccagaaaatctatggttatgtgataataggctgccttctgcggggcttgccttctggccatgcccttcttctctcccttgcacctgtacctcttggtctttgaataaagcctgagtaggaaggaccggtaaaaaaaaaaaaaaaaaaaaaaaaaaaaaaacgttgactaaaaaaaaaaaaaaaaaaaaaaaaaaaaaaaaaaaaaaaaaaaaaaaaaaaaaaaaaaaaaaaaaaaaaa

SEQ ID NO: 11577 - DNA, 4564 bp, synthetic construct
  source 1..4564: mol_type = other DNA
ggtctagttacaactgggcatcgctgcagagatcgcacctcctcgtggtcccgctggtagcccttcgaagggtgactaagtcgatctctgccccaggtacggagccgttgggactcaccagtccaacgtaactcctgcctaaattcggtgaaacaaattcctcggtaaaaagccccatggctagctgccctaagcctggacctcctgtgtctgctggcgctatgagcctggagagcggacttaccacccactctgtgctggccatcgagagaggccccaactctctggccaactctggcagcgatttcggcggaggaggacttggcctgcctctgagacttctgagagtttctgtgggcacccagaccagcagaagcgactgggtcgaccttgtgagctggagccaccctggtcctacaagcaagagccagcaggtcgatctggtgagcctgttccccaagcacagagtcgacctgctgagcaagaacgaccaggtcgacttggtggcccagttcctgcctagcaagttccctcccaacctggctgagaacgacttagccctgctggtgaacctggagttctatcgttccgacctgcacgtgtacgagtgcgtgcacaaggctgcccattgggagggcttaagcggccttcctgaggtgtacgaacagctggctccccagccctgtgtaggcgagacattacacagcagcctgcccagagacagcgagctgttcgttccggaagagggctctagcgagaaggagagcgaggacgctcctaagaccagccctcctacccctggcaaacacggcctggagcaaacaggcgaggagaaggtcatggtgaccgtgcccgacaagaaccctccctgtccttgctgtggcacaagagtcaacagcgtgctgaacctcatcgagcacctgaaggtgtcccacggcaagagaggcgtgtgcttcagatgcgccaagtgcggcaaggagaacagcaactaccacagcgtcgtgtgccacttccctaagtgcagaggccctgagaccgagaaggctcccgctggcgaatggatttgcgaggtgtgcaacagagacttcaccaccaagatcggcctgggccagcacaagcggttagctcaccctgctgtgagaaaccaggagagaatcgtggccagccagcccaaggagacaagcaacaggggcgctcacaagagatgctggaccaaggaggaagaggagctgctcatcagactggaggctcagttcgagggcaacaagaacatcaataagcttatcgccgagcacatcaccacaaagaccgccaagcagatcagcgacaagaggagactgctgtccagaaagcccgccgaggagcctagagaggaacctggtacatgtcaccacaccagaagagccgccgctagcctgagaaccgagcccgaaatgtctcaccacgctcaggccgaggacagagacaacggccctggcaggagacctcttcccggcagagctgctgctggaggcagaaccatggacgagatcaggagacaccccgataagggcaacggccagcagagacccacaaagcagaagtccgaggaacagctccaggcctactacaagaaaaccctggaggagagactgtccgcgggagctctgaacaccttccctagagccttcaaacaagtcatggagggcagagacatcaagctggtgatcaaccagaccgcccaggactgcttcggctgccttgagtctatcagccagatcaggaccgccacacgggataagaaggacaccgtcaccagagagaagcaccccaagaagcccttccagaaatggatgaaggacagggccatcaagaagggcaattacctgagattccagaggctgttctacctggacagaggcaagctggccaagatcatcctggacgacatcgagtgcctgagctgcgacatccctctgagcgagatctacagcgtgttcaagaccagatgggagaccaccggcagcttcaagtctctgggcgacttcaagacatacggcaaggccgacaacaccgccttcagagagctcatcaccgctaaggagatcgagaagaacgtgcaggagatgagcaagggcagcgctcctggccccgatggaattacactgggcgatgtggtgaagatggaccccgagttcagcagaacaatggagatcttcaacctgtggctcaccacaggcaagatccccgacatggtgagaggctgcagaaccgtgcttatccccaagagcagcaagcccgacagactgaaggatatcaacaactggagacccatcaccatcggcagcatcctgctgcggctgttcagccggattgtgaccgctagactgagcaaagcctgtcccctgaaccccagacagagaggcttcatcagagccgctggctgcagcgagaacctgaagctgctccagacaatcatctggagcgccaagagagagcacagacccctgggcgttgttttcgtggacatcgccaaggccttcgacaccgtgtcccatcagcacattatccacgccctgcagcagagggaggtcgaccctcatattgtgggcctggtgtccaacatgtacgagaacatctccacctatattacgaccaagagaaacacccacacagacaagatccagatccgggtcggcgtcaagcagggcgatcctatgtctcctctgctgttcaacctcgccatggaccctctgctctgcaagctcgaggagtctggaaagggctaccatagaggccaatcatcgatcaccgccatggccttcgccgacgacctggtgcttttaagcgacagctgggagaacatgaacaccaacatctctatcctggagacattctgcaaccttaccggcctgaaaacccagggccagaagtgtcatggcttctacatcaaacccaccaaggacagctacaccatcaacgactgcgccgcctggacaatcaacggcacccctctcaacatgatcgaccccggcgagtctgagaagtacctgggcctgcagttcgatccctggatcggcatcgctagaagcggcttgagcaccaagctggacttttggctccaacgcatagaccaggcccccctgaagcctcttcagaaaaccgacattttgaaaacttatacgatccccagactcatctacatcgccgaccactccgaggtcaagaccgctctgctggaaaccctggaccagaaaatcagaaccgccgtcaaggaatggctgcacctgcccccttgcacatgcgacgctatcctgtacagcagcaccagggacggcggcttaggaatcaccaagttagccggcctcatccccagcgtgcaggctaggagactccacagaatcgcccagagcagcgacgacaccatgaagtgcttcatggagaaggaaaagatggagcagctgcacaagaagctgtggatccaagcgggcggagatcgtgagaacattcccagcatctgggaggcccctcccagctcagaacctcccaataacgtgtccaccaattctgaatgggaggctcccacccagaaggataagtttcccaagccctgcaactggcggaagaacgagttcaaaaaatggacaaagctggctagccagggcaggggcatcgtgaacttcgaaagggacaagattagcaaccactggatccagtactacagaagaatcccccacagaaagctcctcaccgccctccagttacgtgcaaacgtgtacccaaccagagaattcctggccagaggcagacaggaccagtacatcaaggcctgccggcactgcgatgccgatatcgagagctgtgctcacatcatcggcaactgccccgtcacccaggacgccagaatcaagagacacaactacatctgcgagttacttctggaggaagccaagaagaaggattgggttgtgttcaaggagccccacatcagagactccaacaaggagctgtacaagccagacctcatcttcgtgaaggacgctagagccctggtggtggacgtcaccgtcagatacgaggctgctaagtccagccttgaggaggctgccgccgagaaagtgcggaagtacaagcacctggaaacagaggtcagacacctcaccaacgccaaggacgttaccttcgtgggcttccccctaggtgctagaggcaaatggcaccaggacaacttcaagctgcttaccgagctgggcctctccaagagccgacaggttaagatggccgagaccttcagcaccgtcgccctgttctcttctgtggacattgtgcacatgttcgcctccagagccagaaagagcatggtgatgtgataataggctgccttctgcggggcttgccttctggccatgcccttcttctctcccttgcacctgtacctcttggtctttgaataaagcctgagtaggaaggaccggtaaaaaaaaaaaaaaaaaaaaaaaaaaaaaaacgttgactaaaaaaaaaaaaaaaaaaaaaaaaaaaaaaaaaaaaaaaaaaaaaaaaaaaaaaaaaaaaaaaaaaaaaa

SEQ ID NO: 11578 - DNA, 4564 bp, synthetic construct
  source 1..4564: mol_type = other DNA
ggtctagttacaactgggcatcgctgcagagatcgcacctcctcgtggtcccgctggtagcccttcgaagggtgactaagtcgatctctgccccaggtacggagccgttgggactcaccagtccaacgtaactcctgcctaaattcggtgaaacaaattcctcggtaaaaagccccatggcttcttgcccgaaacctggccccccggtttcagcaggggcaatgagtttggaaagtggactgaccacccactccgttctcgccatcgaacgtggtcccaattcgttggcaaattccggatcagactttgggggggggggtctggggctaccgttacgcctattgagggtatcggtcggcactcagacctcccgctccgactgggtagacctggtgtcctggagccacccaggacccacgtctaagtcccagcaggttgacctggtgtctttatttcctaaacaccgggttgacctgttatccaaaaacgaccaggtagacctggtggctcaatttttaccatctaaatttccccccaatttggcagaaaatgatttggctttgctggtgaacttagagttctacagatcggatttgcatgtgtatgagtgtgttcattttgctgcacattgggagggattaagtggtttgcctgaggtgtatgaacaacttgcaccacaaccgtgtgtgggagaaactttacattctagcctcccacgagacagtgaactgtttgtgcctgaagaggggagcagcgagaaggagagcgaggacgcgccaaaaacatctcctccgacgcctgggaaacatggtttggaacagactggggaggaaaaagtgatggtgactgttcctgacaaaaatccaccttgtccttgctgtggtacccgggtaaactctgtgttgaatctgattgaacatctgaaagtgtcacacgggaaaaggggggtttgttttcggtgtgcaaaatgtggaaaggaaaatagtaactatcacagtgttgtttgtcattttccaaaatgcaggggtccagagacggagaaagccccagctggggagtggatttgtgaggtatgcaacagagattttacaaccaaaattggcctgggacaacacaagagattggcacacccagcagtgagaaatcaggaaaggatcgttgcttcccaaccgaaagaaacatcaaatagaggtgctcacaaaaggtgctggacaaaggaggaggaagaattactaataagactggaggctcagttcgagggaaacaaaaatattaataagcttattgcagaacacataaccaccaaaacagctaagcagatcagtgacaaaaggcgattgctgtccagaaagccagcagaggagccacgtgaggagcctggaacgtgtcatcacaccaggagagcagctgcgagcctgagaacggagcctgagatgagtcatcacgcccaggcagaggacagagataatggacctgggagacgccctctgccaggcagggcagctgccggagggagaacaatggacgagataagacgccaccctgataagggcaacggacagcagagacccaccaagcaaaaatcagaagaacagctgcaggcttactataaaaagacactagaggaacgactttcagctggggcacttaacaccttcccccgagcattcaagcaggtaatggaaggccgggatataaagctagtaatcaatcagacagcgcaggactgcttcggatgcctggaatccataagccaaataagaacggcaacccgagataaaaaggacacggtgacccgggagaaacacccaaagaaaccttttcagaagtggatgaaggacagagcaatcaaaaaaggtaattatcttcggttccagcgtttattttatcttgatagagggaaactggctaaaatcattttagatgatattgaatgcttgtcttgtgacataccactcagtgaaatttattcggtttttaaaacaagatgggaaacaactggtagctttaaaagccttggggactttaaaacttacgggaaggctgacaacactgccttcagagaattaattacggctaaagaaattgagaaaaatgtgcaggaaatgagcaaaggctcggctcccggtccagacgggattactcttggggacgtcgtaaagatggatcccgagttttccctgaccatggagattttcaatttatggttaacaactggtaaaatcccggacatggtgagggggtgcagaaccgttttgattccaaaatcatcaaagccggatcgtttgaaagacattaataactggagacctatcacgatcggttccatcttgctgagactgttctccaggattgtaacagctaggctgagcaaagcgtgccccctgaacccaaggcaaagaggctttatcagagcggcgggatgctctgaaaacttaaaactcctgcaaactataatttggtcggccaaaagagaacacagaccactgggtgttgtattcgtggacatcgccaaggcttttgacaccgtaagccaccagcacatcattcatgctttgcagcaaagagaggtggatccccacatcgtcggtctggtgagcaatatgtacgagaacatcagtacgtatatcaccacaaagaggaacacacacacagacaaaatccagatccgggttggagtaaagcagggtgacccgatgtcgccccttttatttaacctggcaatggaccctctattatgcaagctggaagagagtggcaaaggataccaccgaggacagagcagcatcacagcgatggcatttgcagacgatctggttttgctgagcgactcctgggaaaatatgaatacaaatattagcatactggagaccttctgcaatctgaccggactcaaaacacaggggcaaaagtgccacggcttttacatcaagccgacaaaggactcttacaccatcaatgactgcgctgcctggactatcaacggcacacccctgaacatgatcgaccccggcgaatctgagaaatacctcggcctgcagtttgacccgtggattggaatagcaaggtccggtctctccacaaaactagatttttggcttcagcggatcgatcaagcaccacttaaacctctgcagaaaactgatattctcaaaacatacaccatccctcggctgatctacatagctgaccactcagaagtgaaaactgcactactcgaaacccttgaccagaagatccggacagcggtcaaggaatggcttcacctacctccgtgcacctgcgatgccatcctgtactcgagcacgagagacggcggtttgggcatcaccaaattggcaggactgatccccagcgtgcaggcccgtagactgcatcggatcgcacagtcatctgacgatacgatgaaatgcttcatggaaaaagagaaaatggaacagctgcataagaaattgtggattcaagctggaggggacagagagaacataccctcgatttgggaagcaccaccgtcgagtgaaccaccaaacaacgtgagcacaaattcggaatgggaagcaccgacccagaaacccaaatttccaaagccttgcaattggaggaaaaacgaattcaaaaaatggaccaaattggcatcccaaggccgcggaattgtaaattttgaaagagacaaaattagtaaccattggatccaatactacagacgcatacctcacaggaaactcctcactgcactacaactcagggccaacgtttaccccacgagagaatttctagccaggggtagacaagaccaatacatcaaggcgtgtaggcactgcgatgcggacattgaatcctgcgcccacatcatcggcaactgcccagtgacacaggacgcccgaatcaagaggcacaattacatctgcgaactgcttctcgaggaggcgaagaagaaggactgggtagtgttcaaggaaccgcacataagggattccaacaaggaactgtacaaacctgacctgatatttgtgaaggatgcccgtgcacttgtcgtggatgtgacagtacggtatgaagcagccaaatcatcgctggaggaagccgctgcagagaaagtgagaaagtacaaacacctggaaacggaagtaagacatctcacgaatgcaaaggacgttacttttgtgggctttcccctaggagcgcgggggaaatggcaccaagataactttaaacttttgactgagcttggcctctccaaatcgaggcaagtgaaaatggcagagactttttccacagtagcgctcttttcatctgtggacattgtacatatgtttgccagtagggccagaaaatctatggttatgtgataataggctgccttctgcggggcttgccttctggccatgcccttcttctctcccttgcacctgtacctcttggtctttgaataaagcctgagtaggaaggaccggtaaaaaaaaaaaaaaaaaaaaaaaaaaaaaaacgttgactaaaaaaaaaaaaaaaaaaaaaaaaaaaaaaaaaaaaaaaaaaaaaaaaaaaaaaaaaaaaaaaaaaaaaa

SEQ ID NO: 11579 - DNA, 4564 bp, synthetic construct
  source 1..4564: mol_type = other DNA
ggtctagttacaactgggcatcgctgcagagatcgcacctcctcgtggtcccgctggtagcccttcgaagggtgactaagtcgatctctgccccaggtacggagccgttgggactcaccagtccaacgtaactcctgcctaaattcggtgaaacaaattcctcggtaaaaagccccatggcttcttgcccgaaacctggccccccggtttcagcaggggcaatgagtttggaaagtggactgaccacccactccgttctcgccatcgaacgtggtcccaattcgttggcaaattccggatcagactttgggggggggggtctggggctaccgttacgcctattgagggtatcggtcggcactcagacctcccgctccgactgggtagacctggtgtcctggagccacccaggacccacgtctaagtcccagcaggttgacctggtgtctttatttcctaaacaccgggttgacctgttatccaaaaacgaccaggtagacctggtggctcaatttttaccatctaaatttccccccaatttggcagaaaatgatttggctttgctggtgaacttagagttctacagatcggatttgcatgtgtatgagtgtgttcattttgctgcacattgggagggattaagtggtttgcctgaggtgtatgaacaacttgcaccacaaccgtgtgtgggagaaactttacattctagcctcccacgagacagtgaactgtttgtgcctgaagaggggagcagcgagaaggagagcgaggacgcgccaaaaacatctcctccgacgcctgggaaacatggtttggaacagactggggaggaaaaagtgatggtgactgttcctgacaaaaatccaccttgtccttgctgtggtacccgggtaaactctgtgttgaatctgattgaacatctgaaagtgtcacacgggaaaaggggggtttgttttcggtgtgcaaaatgtggaaaggaaaatagtaactatcacagtgttgtttgtcattttccaaaatgcaggggtccagagacggagaaagccccagctggggagtggatttgtgaggtatgcaacagagattttacaaccaaaattggcctgggacaacacaagagattggcacacccagcagtgagaaatcaggaaaggatcgttgcttcccaaccgaaagaaacatcaaatagaggtgctcacaaaaggtgctggacaaaggaggaggaagaattactaataagactggaggctcagttcgagggaaacaaaaatattaataagcttattgcagaacacataaccaccaaaacagctaagcagatcagtgacaaaaggcgattgctgtccagaaagccagcagaggagccacgtgaggagcctggaacgtgtcatcacaccaggagagcagctgcgagcctgagaacggagcctgagatgagtcatcacgcccaggcagaggacagagataatggacctgggagacgccctctgccaggcagggcagctgccggagggagaacaatggacgagataagacgccaccctgataagggcaacggacagcagagacccaccaagcaaaaatcagaagaacagctgcaggcttactataaaaagacactagaggaacgactttcagctggggcacttaacaccttcccccgagcattcaagcaggtaatggaaggccgggatataaagctagtaatcaatcagacagcgcaggactgcttcggatgcctggaatccataagccaaataagaacggcaacccgagataaaaagtacacggtgacccgggagaaacacccaaagaaaccttttcagaagtggatgaaggacagagcaatcaaaaaaggtaattatcttcggttccagcgtttattttatcttgatagagggaaactggctaaaatcattttagatgatattgaatgcttgtcttgtgacataccactcagtgaaatttattcggtttttaaaacaagatgggaaacaactggtagctttaaaagccttggggactttaaaacttacgggaaggctgacaacactgccttcagagaattaattacggctaaagaaattgagaaaaatgtgcaggaaatgagcaaaggctcggctcccggtccagacgggattactcttggggacgtcgtaaagatggatcccgagttttccctgaccatggagattttcaatttatggttaacaactggtaaaatcccggacatggtgagggggtgcagaaccgttttgattccaaaatcatcaaagccggatcgtttgaaagacattaataactggagacctatcacgatcggttccatcttgctgagactgttctccaggattgtaacagctaggctgagcaaagcgtgccccctgaacccaaggcaaagaggctttatcagagcggcgggatgctctgaaaacttaaaactcctgcaaactataatttggtcggccaaaagagaacacagaccactgggtgttgtattcgtggacatcgccaaggcttttgacaccgtaagccaccagcacatcattcatgctttgcagcaaagagaggtggatccccacatcgtcggtctggtgagcaatatgtacgagaacatcagtacgtatatcaccacaaagaggaacacacacacagacaaaatccagatccgggttggagtaaagcagggtgacccgatgtcgccccttttatttaacctggcaatggaccctctattatgcaagctggaagagagtggcaaaggataccaccgaggacagagcagcatcacagcgatggcatttgcagacgatctggttttgctgagcgactcctgggaaaatatgaatacaaatattagcatactggagaccttctgcaatctgaccggactcaaaacacaggggcaaaagtgccacggcttttacatcaagccgacaaaggactcttacaccatcaatgactgcgctgcctggactatcaacggcacacccctgaacatgatcgaccccggcgaatctgagaaatacctcggcctgcagtttgacccgtggattggaatagcaaggtccggtctctccacaaaactagatttttggcttcagcggatcgatcaagcaccacttaaacctctgcagaaaactgatattctcaaaacatacaccatccctcggctgatctacatagctgaccactcagaagtgaaaactgcactactcgaaacccttgaccagaagatccggacagcggtcaaggaatggcttcacctacctccgtgcacctgcgatgccatcctgtactcgagcacgagagacggcggtttgggcatcaccaaattggcaggactgatccccagcgtgcaggcccgtagactgcatcggatcgcacagtcatctgacgatacgatgaaatgcttcatggaaaaagagaaaatggaacagctgcataagaaattgtggattcaagctggaggggacagagagaacataccctcgatttgggaagcaccaccgtcgagtgaaccaccaaacaacgtgagcacaaattcggaatgggaagcaccgacccagaaacccaaatttccaaagccttgcaattggaggaaaaacgaattcaaaaaatggaccaaattggcatcccaaggccgcggaattgtaaattttgaaagagacaaaattagtaaccattggatccaatactacagacgcatacctcacaggaaactcctcactgcactacaactcagggccaacgtttaccccacgagagaatttctagccaggggtagacaagaccaatacatcaaggcgtgtaggcactgcgatgcggacattgaatcctgcgcccacatcatcggcaactgcccagtgacacaggacgcccgaatcaagaggcacaattacatctgcgaactgcttctcgaggaggcgaagaagaaggactgggtagtgttcaaggaaccgcacataagggattccaacaaggaactgtacaaacctgacctgatatttgtgaaggatgcccgtgcacttgtcgtggatgtgacagtacggtatgaagcagccaaatcatcgctggaggaagccgctgcagagaaagtgagaaagtacaaacacctggaaacggaagtaagacatctcacgaatgcaaaggacgttacttttgtgggctttcccctaggagcgcgggggaaatggcaccaagataactttaaacttttgactgagcttggcctctccaaatcgaggcaagtgaaaatggcagagactttttccacagtagcgctcttttcatctgtggacattgtacatatgtttgccagtagggccagaaaatctatggttatgtgataataggctgccttctgcggggcttgccttctggccatgcccttcttctctcccttgcacctgtacctcttggtctttgaataaagcctgagtaggaaggaccggtaaaaaaaaaaaaaaaaaaaaaaaaaaaaaaacgttgactaaaaaaaaaaaaaaaaaaaaaaaaaaaaaaaaaaaaaaaaaaaaaaaaaaaaaaaaaaaaaaaaaaaaaa

SEQ ID NO: 11580 - DNA, 4564 bp, synthetic construct; identical to SEQ ID NO: 11375
  source 1..4564: mol_type = other DNA

SEQ ID NO: 11581 - DNA, 4564 bp, synthetic construct
  source 1..4564: mol_type = other DNA
ggtctagttacaactgggcatcgctgcagagatcgcacctcctcgtggtcccgctggtagcccttcgaagggtgactaagtcgatctctgccccaggtacggagccgttgggactcaccagtccaacgtaactcctgcctaaattcggtgaaacaaattcctcggtaaaaagccccatggcttcttgcccgaaacctggccccccggtttcagcaggggcaatgagtttggaaagtggactgaccacccactccgttctcgccatcgaacgtggtcccaattcgttggcaaattccggatcagactttgggggggggggtctggggctaccgttacgcctattgagggtatcggtcggcactcagacctcccgctccgactgggtagacctggtgtcctggagccacccaggacccacgtctaagtcccagcaggttgacctggtgtctttatttcctaaacaccgggttgacctgttatccaaaaacgaccaggtagacctggtggctcaatttttaccatctaaatttccccccaatttggcagaaaatgatttggctttgctggtgaacttagagttctacagatcggatttgcatgtgtatgagtgtgttcattttgctgcacattgggagggattaagtggtttgcctgaggtgtatgaacaacttgcaccacaaccgtgtgtgggagaaactttacattctagcctcccacgagacagtgaactgtttgtgcctgaagaggggagcagcgagaaggagagcgaggacgcgccaaaaacatctcctccgacgcctgggaaacatggtttggaacagactggggaggaaaaagtgatggtgactgttcctgacaaaaatccaccttgtccttgctgtggtacccgggtaaactctgtgttgaatctgattgaacatctgaaagtgtcacacgggaaaaggggggtttgttttcggtgtgcaaaatgtggaaaggaaaatagtaactatcacagtgttgtttgtcattttaagaaatgcaggggtccagagacggagaaagccccagctggggagtggatttgtgaggtatgcaacagagattttacaaccaaaattggcctgggacaacacaagagattggcacacccagcagtgagaaatcaggaaaggatcgttgcttcccaaccgaaagaaacatcaaatagaggtgctcacaaaaggtgctggacaaaggaggaggaagaattactaataagactggaggctcagttcgagggaaacaaaaatattaataagcttattgcagaacacataaccaccaaaacagctaagcagatcagtgacaaaaggcgattgctgtccagaaagccagcagaggagccacgtgaggagcctggaacgtgtcatcacaccaggagagcagctgcgagcctgagaacggagcctgagatgagtcatcacgcccaggcagaggacagagataatggacctgggagacgccctctgccaggcagggcagctgccggagggagaacaatggacgagataagacgccaccctgataagggcaacggacagcagagacccaccaagcaaaaatcagaagaacagctgcaggcttactataaaaagacactagaggaacgactttcagctggggcacttaacaccttcccccgagcattcaagcaggtaatggaaggccgggatataaagctagtaatcaatcagacagcgcaggactgcttcggatgcctggaatccataagccaaataagaacggcaacccgagataaaaaggacacggtgacccgggagaaacacccaaagaaaccttttcagaagtggatgaagaagagagcaatcaaaaaaggtaattatcttcggttccagcgtttattttatcttgatagagggaaactggctaaaatcattttagatgatattgaatgcttgtcttgtgacataccactcagtgaaatttattcggtttttaaaacaagatgggaaacaactggtagctttaaaagccttggggactttaaaacttacgggaaggctgacaacactgccttcagagaattaattacggctaaagaaattgagaaaaatgtgcaggaaatgagcaaaggctcggctcccggtccagacgggattactcttggggacgtcgtaaagatggatcccgagttttcccggaccatggagattttcaatttatggttaacaactggtaaaatcccggacatggtgagggggtgcagaaccgttttgattccaaaatcatcaaagccggatcgtttgaaagacattaataactggagacctatcacgatcggttccatcttgctgagactgttctccaggattgtaacagctaggctgagcaaagcgtgccccctgaacccaaggcaaagaggctttatcagagcggcgggatgctctgaaaacttaaaactcctgcaaactataatttggtcggccaaaagagaacacagaccactgggtgttgtattcgtggacatcgccaaggcttttgacaccgtaagccaccagcacatcattcatgctttgcagcaaagagaggtggatccccacatcgtcggtctggtgagcaatatgtacgagaacatcagtacgtatatcaccacaaagaggaacacacacacagacaaaatccagatccgggttggagtaaagcagggtgacccgatgtcgccccttttatttaacctggcaatggaccctctattatgcaagctggaagagagtggcaaaggataccaccgaggacagagcagcatcacagcgatggcatttgcagacgatctggttttgctgagcgactcctgggaaaatatgaatacaaatattagcatactggagaccttctgcaatctgaccggactcaaaacacaggggcaaaagtgccacggcttttacatcaagccgacaaaggactcttacaccatcaatgactgcgctgcctggactatcaacggcacacccctgaacatgatcgaccccggcgaatctgagaaatacctcggcctgcagtttgacccgtggattggaatagcaaggtccggtctctccacaaaactagatttttggcttcagcggatcgatcaagcaccacttaaacctctgcagaaaactgatattctcaaaacatacaccatccctcggctgatctacatagctgaccactcagaagtgaaaactgcactactcgaaacccttgaccagaagatccggacagcggtcaaggaatggcttcacctacctccgtgcacctgcgatgccatcctgtactcgagcacgagagacggcggtttgggcatcaccaaattggcaggactgatccccagcgtgcaggcccgtagactgcatcggatcgcacagtcatctgacgatacgatgaaatgcttcatggaaaaagagaaaatggaacagctgcataagaaattgtggattcaagctggaggggacagagagaacataccctcgatttgggaagcaccaccgtcgagtgaaccaccaaacaacgtgagcacaaattcggaatgggaagcaccgacccagaaagataaatttccaaagccttgcaattggaggaaaaacgaattcaaaaaatggaccaaattggcatcccaaggccgcggaattgtaaattttgaaagagacaaaattagtaaccattggatccaatactacagacgcatacctcacaggaaactcctcactgcactacaactcagggccaacgtttaccccacgagagaatttctagccaggggtagacaagaccaatacatcaaggcgtgtaggcactgcgatgcggacattgaatcctgcgcccacatcatcggcaactgcccagtgacacaggacgcccgaatcaagaggcacaattacatctgcgaactgcttctcgaggaggcgaagaagaaggactgggtagtgttcaaggaaccgcacataagggattccaacaaggaactgtacaaacctgacctgatatttgtgaaggatgcccgtgcacttgtcgtggatgtgacagtacggtatgaagcagccaaatcatcgctggaggaagccgctgcagagaaagtgagaaagtacaaacacctggaaacggaagtaagacatctcacgaatgcaaaggacgttacttttgtgggctttcccctaggagcgcgggggaaatggcaccaagataactttaaacttttgactgagcttggcctctccaaatcgaggcaagtgaaaatggcagagactttttccacagtagcgctcttttcatctgtggacattgtacatatgtttgccagtagggccagaaaatctatggttatgtgataataggctgccttctgcggggcttgccttctggccatgcccttcttctctcccttgcacctgtacctcttggtctttgaataaagcctgagtaggaaggaccggtaaaaaaaaaaaaaaaaaaaaaaaaaaaaaaacgttgactaaaaaaaaaaaaaaaaaaaaaaaaaaaaaaaaaaaaaaaaaaaaaaaaaaaaaaaaaaaaaaaaaaaaaa

SEQ ID NO: 11582 - DNA, 5407 bp, synthetic construct
  source 1..5407: mol_type = other DNA
ggtctagttacaactgggcatcgctgcagagatcgcacctcctcgtggtcccgctggtagcccttcgaagggtgactaagtcgatctctgccccaggtacggagccgttgggactcaccagtccaacgtaactcctgcctaaattcggtgaaacaaattcctcggtaaaaagccccatgggaactgcactaacaccgctcctgacgaagttcgccacgcgctacgagatgggtaccacgcctgaagaagtggcgaacacgctcaagcagacctgtttcaagggccaggtcaatgattcgcagatggtcgccctgctgatcgtggcagaccagtacaagcttaaccccttcaccaaggagttgtacgcattccccgacaagaacaacggcatcgtgccggttgttggtgtggatggctgggctcggatcatcaacgagaacccacagttcgatggcatggaattctcaatggaccagcagggaaccgaatgcacctgcaagatctatcggaaggaccgcagccatgccatcagcgcgactgagtacatggccgagtgcaagcggaacacccagccttggcagtcccatccgcgccggatgcttcgccacaaggcaatgatccagtgcgcacgcctcgcgttcgggttcgccggcatatacgaccaggacgaggccgagcggatcgttgaacgagacgtcactcccgcagagcagtacgaggacgtcagcgaggcgatctgcctgatcaaggactccccaacaatggaggacttgcaggcagcattcagcaatgcctggaaagcctataagacaaagggcgcgcgcgaccagcttacggcggccaaggaccagcggaagaaagaattgctggacgcccctatagacgttgaattcgaggagaccggcgatgatcgagcagcgtctggaggatctagcggaggatcctctggcagcgagacaccaggaacaagcgagtcagcaacaccagagagcagtggcggcagcagcggcggcagcagcatggcttcttgcccgaaacctggccccccggtttcagcaggggcaatgagtttggaaagtggactgaccacccactccgttctcgccatcgaacgtggtcccaattcgttggcaaattccggatcagactttgggggggggggtctggggctaccgttacgcctattgagggtatcggtcggcactcagacctcccgctccgactgggtagacctggtgtcctggagccacccaggacccacgtctaagtcccagcaggttgacctggtgtctttatttcctaaacaccgggttgacctgttatccaaaaacgaccaggtagacctggtggctcaatttttaccatctaaatttccccccaatttggcagaaaatgatttggctttgctggtgaacttagagttctacagatcggatttgcatgtgtatgagtgtgttcattttgctgcacattgggagggattaagtggtttgcctgaggtgtatgaacaacttgcaccacaaccgtgtgtgggagaaactttacattctagcctcccacgagacagtgaactgtttgtgcctgaagaggggagcagcgagaaggagagcgaggacgcgccaaaaacatctcctccgacgcctgggaaacatggtttggaacagactggggaggaaaaagtgatggtgactgttcctgacaaaaatccaccttgtccttgctgtggtacccgggtaaactctgtgttgaatctgattgaacatctgaaagtgtcacacgggaaaaggggggtttgttttcggtgtgcaaaatgtggaaaggaaaatagtaactatcacagtgttgtttgtcattttccaaaatgcaggggtccagagacggagaaagccccagctggggagtggatttgtgaggtatgcaacagagattttacaaccaaaattggcctgggacaacacaagagattggcacacccagcagtgagaaatcaggaaaggatcgttgcttcccaaccgaaagaaacatcaaatagaggtgctcacaaaaggtgctggacaaaggaggaggaagaattactaataagactggaggctcagttcgagggaaacaaaaatattaataagcttattgcagaacacataaccaccaaaacagctaagcagatcagtgacaaaaggcgattgctgtccagaaagccagcagaggagccacgtgaggagcctggaacgtgtcatcacaccaggagagcagctgcgagcctgagaacggagcctgagatgagtcatcacgcccaggcagaggacagagataatggacctgggagacgccctctgccaggcagggcagctgccggagggagaacaatggacgagataagacgccaccctgataagggcaacggacagcagagacccaccaagcaaaaatcagaagaacagctgcaggcttactataaaaagacactagaggaacgactttcagctggggcacttaacaccttcccccgagcattcaagcaggtaatggaaggccgggatataaagctagtaatcaatcagacagcgcaggactgcttcggatgcctggaatccataagccaaataagaacggcaacccgagataaaaaggacacggtgacccgggagaaacacccaaagaaaccttttcagaagtggatgaaggacagagcaatcaaaaaaggtaattatcttcggttccagcgtttattttatcttgatagagggaaactggctaaaatcattttagatgatattgaatgcttgtcttgtgacataccactcagtgaaatttattcggtttttaaaacaagatgggaaacaactggtagctttaaaagccttggggactttaaaacttacgggaaggctgacaacactgccttcagagaattaattacggctaaagaaattgagaaaaatgtgcaggaaatgagcaaaggctcggctcccggtccagacgggattactcttggggacgtcgtaaagatggatcccgagttttcccggaccatggagattttcaatttatggttaacaactggtaaaatcccggacatggtgagggggtgcagaaccgttttgattccaaaatcatcaaagccggatcgtttgaaagacattaataactggagacctatcacgatcggttccatcttgctgagactgttctccaggattgtaacagctaggctgagcaaagcgtgccccctgaacccaaggcaaagaggctttatcagagcggcgggatgctctgaaaacttaaaactcctgcaaactataatttggtcggccaaaagagaacacagaccactgggtgttgtattcgtggacatcgccaaggcttttgacaccgtaagccaccagcacatcattcatgctttgcagcaaagagaggtggatccccacatcgtcggtctggtgagcaatatgtacgagaacatcagtacgtatatcaccacaaagaggaacacacacacagacaaaatccagatccgggttggagtaaagcagggtgacccgatgtcgccccttttatttaacctggcaatggaccctctattatgcaagctggaagagagtggcaaaggataccaccgaggacagagcagcatcacagcgatggcatttgcagacgatctggttttgctgagcgactcctgggaaaatatgaatacaaatattagcatactggagaccttctgcaatctgaccggactcaaaacacaggggcaaaagtgccacggcttttacatcaagccgacaaaggactcttacaccatcaatgactgcgctgcctggactatcaacggcacacccctgaacatgatcgaccccggcgaatctgagaaatacctcggcctgcagtttgacccgtggattggaatagcaaggtccggtctctccacaaaactagatttttggcttcagcggatcgatcaagcaccacttaaacctctgcagaaaactgatattctcaaaacatacaccatccctcggctgatctacatagctgaccactcagaagtgaaaactgcactactcgaaacccttgaccagaagatccggacagcggtcaaggaatggcttcacctacctccgtgcacctgcgatgccatcctgtactcgagcacgagagacggcggtttgggcatcaccaaattggcaggactgatccccagcgtgcaggcccgtagactgcatcggatcgcacagtcatctgacgatacgatgaaatgcttcatggaaaaagagaaaatggaacagctgcataagaaattgtggattcaagctggaggggacagagagaacataccctcgatttgggaagcaccaccgtcgagtgaaccaccaaacaacgtgagcacaaattcggaatgggaagcaccgacccagaaacccaaatttccaaagccttgcaattggaggaaaaacgaattcaaaaaatggaccaaattggcatcccaaggccgcggaattgtaaattttgaaagagacaaaattagtaaccattggatccaatactacagacgcatacctcacaggaaactcctcactgcactacaactcagggccaacgtttaccccacgagagaatttctagccaggggtagacaagaccaatacatcaaggcgtgtaggcactgcgatgcggacattgaatcctgcgcccacatcatcggcaactgcccagtgacacaggacgcccgaatcaagaggcacaattacatctgcgaactgcttctcgaggaggcgaagaagaaggactgggtagtgttcaaggaaccgcacataagggattccaacaaggaactgtacaaacctgacctgatatttgtgaaggatgcccgtgcacttgtcgtggatgtgacagtacggtatgaagcagccaaatcatcgctggaggaagccgctgcagagaaagtgagaaagtacaaacacctggaaacggaagtaagacatctcacgaatgcaaaggacgttacttttgtgggctttcccctaggagcgcgggggaaatggcaccaagataactttaaacttttgactgagcttggcctctccaaatcgaggcaagtgaaaatggcagagactttttccacagtagcgctcttttcatctgtggacattgtacatatgtttgccagtagggccagaaaatctatggttatgtgataataggctgccttctgcggggcttgccttctggccatgcccttcttctctcccttgcacctgtacctcttggtctttgaataaagcctgagtaggaaggaccggtaaaaaaaaaaaaaaaaaaaaaaaaaaaaaaacgttgactaaaaaaaaaaaaaaaaaaaaaaaaaaaaaaaaaaaaaaaaaaaaaaaaaaaaaaaaaaaaaaaaaaaaaa

SEQ ID NO: 11583 - DNA, 5407 bp, synthetic construct
  source 1..5407: mol_type = other DNA
ggtctagttacaactgggcatcgctgcagagatcgcacctcctcgtggtcccgctggtagcccttcgaagggtgactaagtcgatctctgccccaggtacggagccgttgggactcaccagtccaacgtaactcctgcctaaattcggtgaaacaaattcctcggtaaaaagccccatgggaactgcactaacaccgctcctgacgaagttcgccacgcgctacgagatgggtaccacgcctgaagaagtggcgaacacgctcaagcagacctgtttcaagggccaggtcaatgattcgcagatggtcgccctgctgatcgtggcagaccagtacaagcttaaccccttcaccaaggagttgtacgcattccccgacaagaacaacggcatcgtgccggttgttggtgtggatggctgggctcggatcatcaacgagaacccacagttcgatggcatggaattctcaatggaccagcagggaaccgaatgcacctgcaagatctatcggaaggaccgcagccatgccatcagcgcgactgagtacatggccgagtgcaagcggaacacccagccttggcagtcccatccgcgccggatgcttcgccacaaggcaatgatccagtgcgcacgcctcgcgttcgggttcgccggcatatacgaccaggacgaggccgagcggatcgttgaacgagacgtcactcccgcagagcagtacgaggacgtcagcgaggcgatctgcctgatcaaggactccccaacaatggaggacttgcaggcagcattcagcaatgcctggaaagcctataagacaaagggcgcgcgcgaccagcttacggcggccaaggaccagcggaagaaagaattgctggacgcccctatagacgttgaattcgaggagaccggcgatgatcgagcagcgtctggaggatctagcggaggatcctctggcagcgagacaccaggaacaagcgagtcagcaacaccagagagcagtggcggcagcagcggcggcagcagcatggcttcttgcccgaaacctggccccccggtttcagcaggggcaatgagtttggaaagtggactgaccacccactccgttctcgccatcgaacgtggtcccaattcgttggcaaattccggatcagactttgggggggggggtctggggctaccgttacgcctattgagggtatcggtcggcactcagacctcccgctccgactgggtagacctggtgtcctggagccacccaggacccacgtctaagtcccagcaggttgacctggtgtctttatttcctaaacaccgggttgacctgttatccaaaaacgaccaggtagacctggtggctcaatttttaccatctaaatttccccccaatttggcagaaaatgatttggctttgctggtgaacttagagttctacagatcggatttgcatgtgtatgagtgtgttcattttgctgcacattgggagggattaagtggtttgcctgaggtgtatgaacaacttgcaccacaaccgtgtgtgggagaaactttacattctagcctcccacgagacagtgaactgtttgtgcctgaagaggggagcagcgagaaggagagcgaggacgcgccaaaaacatctcctccgacgcctgggaaacatggtttggaacagactggggaggaaaaagtgatggtgactgttcctgacaaaaatccaccttgtccttgctgtggtacccgggtaaactctgtgttgaatctgattgaacatctgaaagtgtcacacgggaaaaggggggtttgttttcggtgtgcaaaatgtggaaaggaaaatagtaactatcacagtgttgtttgtcattttccaaaatgcaggggtccagagacggagaaagccccagctggggagtggatttgtgaggtatgcaacagagattttacaaccaaaattggcctgggacaacacaagagattggcacacccagcagtgagaaatcaggaaaggatcgttgcttcccaaccgaaagaaacatcaaatagaggtgctcacaaaaggtgctggacaaaggaggaggaagaattactaataagactggaggctcagttcgagggaaacaaaaatattaataagcttattgcagaacacataaccaccaaaacagctaagcagatcagtgacaaaaggcgattgctgtccagaaagccagcagaggagccacgtgaggagcctggaacgtgtcatcacaccaggagagcagctgcgagcctgagaacggagcctgagatgagtcatcacgcccaggcagaggacagagataatggacctgggagacgccctctgccaggcagggcagctgccggagggagaacaatggacgagataagacgccaccctgataagggcaacggacagcagagacccaccaagcaaaaatcagaagaacagctgcaggcttactataaaaagacactagaggaacgactttcagctggggcacttaacaccttcccccgagcattcaagcaggtaatggaaggccgggatataaagctagtaatcaatcagacagcgcaggactgcttcggatgcctggaatccataagccaaataagaacggcaacccgagataaaaaggacacggtgacccgggagaaacacccaaagaaaccttttcagaagtggatgaagaagagagcaatcaaaaaaggtaattatcttcggttccagcgtttattttatcttgatagagggaaactggctaaaatcattttagatgatattgaatgcttgtcttgtgacataccactcagtgaaatttattcggtttttaaaacaagatgggaaacaactggtagctttaaaagccttggggactttaaaacttacgggaaggctgacaacactgccttcagagaattaattacggctaaagaaattgagaaaaatgtgcaggaaatgagcaaaggctcggctcccggtccagacgggattactcttggggacgtcgtaaagatggatcccgagttttcccggaccatggagattttcaatttatggttaacaactggtaaaatcccggacatggtgagggggtgcagaaccgttttgattccaaaatcatcaaagccggatcgtttgaaagacattaataactggagacctatcacgatcggttccatcttgctgagactgttctccaggattgtaacagctaggctgagcaaagcgtgccccctgaacccaaggcaaagaggctttatcagagcggcgggatgctctgaaaacttaaaactcctgcaaactataatttggtcggccaaaagagaacacagaccactgggtgttgtattcgtggacatcgccaaggcttttgacaccgtaagccaccagcacatcattcatgctttgcagcaaagagaggtggatccccacatcgtcggtctggtgagcaatatgtacgagaacatcagtacgtatatcaccacaaagaggaacacacacacagacaaaatccagatccgggttggagtaaagcagggtgacccgatgtcgccccttttatttaacctggcaatggaccctctattatgcaagctggaagagagtggcaaaggataccaccgaggacagagcagcatcacagcgatggcatttgcagacgatctggttttgctgagcgactcctgggaaaatatgaatacaaatattagcatactggagaccttctgcaatctgaccggactcaaaacacaggggcaaaagtgccacggcttttacatcaagccgacaaaggactcttacaccatcaatgactgcgctgcctggactatcaacggcacacccctgaacatgatcgaccccggcgaatctgagaaatacctcggcctgcagtttgacccgtggattggaatagcaaggtccggtctctccacaaaactagatttttggcttcagcggatcgatcaagcaccacttaaacctctgcagaaaactgatattctcaaaacatacaccatccctcggctgatctacatagctgaccactcagaagtgaaaactgcactactcgaaacccttgaccagaagatccggacagcggtcaaggaatggcttcacctacctccgtgcacctgcgatgccatcctgtactcgagcacgagagacggcggtttgggcatcaccaaattggcaggactgatccccagcgtgcaggcccgtagactgcatcggatcgcacagtcatctgacgatacgatgaaatgcttcatggaaaaagagaaaatggaacagctgcataagaaattgtggattcaagctggaggggacagagagaacataccctcgatttgggaagcaccaccgtcgagtgaaccaccaaacaacgtgagcacaaattcggaatgggaagcaccgacccagaaagataaatttccaaagccttgcaattggaggaaaaacgaattcaaaaaatggaccaaattggcatcccaaggccgcggaattgtaaattttgaaagagacaaaattagtaaccattggatccaatactacagacgcatacctcacaggaaactcctcactgcactacaactcagggccaacgtttaccccacgagagaatttctagccaggggtagacaagaccaatacatcaaggcgtgtaggcactgcgatgcggacattgaatcctgcgcccacatcatcggcaactgcccagtgacacaggacgcccgaatcaagaggcacaattacatctgcgaactgcttctcgaggaggcgaagaagaaggactgggtagtgttcaaggaaccgcacataagggattccaacaaggaactgtacaaacctgacctgatatttgtgaaggatgcccgtgcacttgtcgtggatgtgacagtacggtatgaagcagccaaatcatcgctggaggaagccgctgcagagaaagtgagaaagtacaaacacctggaaacggaagtaagacatctcacgaatgcaaaggacgttacttttgtgggctttcccctaggagcgcgggggaaatggcaccaagataactttaaacttttgactgagcttggcctctccaaatcgaggcaagtgaaaatggcagagactttttccacagtagcgctcttttcatctgtggacattgtacatatgtttgccagtagggccagaaaatctatggttatgtgataataggctgccttctgcggggcttgccttctggccatgcccttcttctctcccttgcacctgtacctcttggtctttgaataaagcctgagtaggaaggaccggtaaaaaaaaaaaaaaaaaaaaaaaaaaaaaaacgttgactaaaaaaaaaaaaaaaaaaaaaaaaaaaaaaaaaaaaaaaaaaaaaaaaaaaaaaaaaaaaaaaaaaaaaa

SEQ ID NO: 11584 - DNA, 5407 bp, synthetic construct
  source 1..5407: mol_type = other DNA
ggtctagttacaactgggcatcgctgcagagatcgcacctcctcgtggtcccgctggtagcccttcgaagggtgactaagtcgatctctgccccaggtacggagccgttgggactcaccagtccaacgtaactcctgcctaaattcggtgaaacaaattcctcggtaaaaagccccatgggaactgcactaacaccgctcctgacgaagttcgccacgcgctacgagatgggtaccacgcctgaagaagtggcgaacacgctcaagcagacctgtttcaagggccaggtcaatgattcgcagatggtcgccctgctgatcgtggcagaccagtacaagcttaaccccttcaccaaggagttgtacgcattccccgacaagaacaacggcatcgtgccggttgttggtgtggatggctgggctcggatcatcaacgagaacccacagttcgatggcatggaattctcaatggaccagcagggaaccgaatgcacctgcaagatctatcggaaggaccgcagccatgccatcagcgcgactgagtacatggccgagtgcaagcggaacacccagccttggcagtcccatccgcgccggatgcttcgccacaaggcaatgatccagtgcgcacgcctcgcgttcgggttcgccggcatatacgaccaggacgaggccgagcggatcgttgaacgagacgtcactcccgcagagcagtacgaggacgtcagcgaggcgatctgcctgatcaaggactccccaacaatggaggacttgcaggcagcattcagcaatgcctggaaagcctataagacaaagggcgcgcgcgaccagcttacggcggccaaggaccagcggaagaaagaattgctggacgcccctatagacgttgaattcgaggagaccggcgatgatcgagcagcgtctggaggatctagcggaggatcctctggcagcgagacaccaggaacaagcgagtcagcaacaccagagagcagtggcggcagcagcggcggcagcagcatggcttcttgcccgaaacctggccccccggtttcagcaggggcaatgagtttggaaagtggactgaccacccactccgttctcgccatcgaacgtggtcccaattcgttggcaaattccggatcagactttgggggggggggtctggggctaccgttacgcctattgagggtatcggtcggcactcagacctcccgctccgactgggtagacctggtgtcctggagccacccaggacccacgtctaagtcccagcaggttgacctggtgtctttatttcctaaacaccgggttgacctgttatccaaaaacgaccaggtagacctggtggctcaatttttaccatctaaatttccccccaatttggcagaaaatgatttggctttgctggtgaacttagagttctacagatcggatttgcatgtgtatgagtgtgttcattttgctgcacattgggagggattaagtggtttgcctgaggtgtatgaacaacttgcaccacaaccgtgtgtgggagaaactttacattctagcctcccacgagacagtgaactgtttgtgcctgaagaggggagcagcgagaaggagagcgaggacgcgccaaaaacatctcctccgacgcctgggaaacatggtttggaacagactggggaggaaaaagtgatggtgactgttcctgacaaaaatccaccttgtccttgctgtggtacccgggtaaactctgtgttgaatctgattgaacatctgaaagtgtcacacgggaaaaggggggtttgttttcggtgtgcaaaatgtggaaaggaaaatagtaactatcacagtgttgtttgtcattttaagaaatgcaggggtccagagacggagaaagccccagctggggagtggatttgtgaggtatgcaacagagattttacaaccaaaattggcctgggacaacacaagagattggcacacccagcagtgagaaatcaggaaaggatcgttgcttcccaaccgaaagaaacatcaaatagaggtgctcacaaaaggtgctggacaaaggaggaggaagaattactaataagactggaggctcagttcgagggaaacaaaaatattaataagcttattgcagaacacataaccaccaaaacagctaagcagatcagtgacaaaaggcgattgctgtccagaaagccagcagaggagccacgtgaggagcctggaacgtgtcatcacaccaggagagcagctgcgagcctgagaacggagcctgagatgagtcatcacgcccaggcagaggacagagataatggacctgggagacgccctctgccaggcagggcagctgccggagggagaacaatggacgagataagacgccaccctgataagggcaacggacagcagagacccaccaagcaaaaatcagaagaacagctgcaggcttactataaaaagacactagaggaacgactttcagctggggcacttaacaccttcccccgagcattcaagcaggtaatggaaggccgggatataaagctagtaatcaatcagacagcgcaggactgcttcggatgcctggaatccataagccaaataagaacggcaacccgagataaaaaggacacggtgacccgggagaaacacccaaagaaaccttttcagaagtggatgaagaagagagcaatcaaaaaaggtaattatcttcggttccagcgtttattttatcttgatagagggaaactggctaaaatcattttagatgatattgaatgcttgtcttgtgacataccactcagtgaaatttattcggtttttaaaacaagatgggaaacaactggtagctttaaaagccttggggactttaaaacttacgggaaggctgacaacactgccttcagagaattaattacggctaaagaaattgagaaaaatgtgcaggaaatgagcaaaggctcggctcccggtccagacgggattactcttggggacgtcgtaaagatggatcccgagttttcccggaccatggagattttcaatttatggttaacaactggtaaaatcccggacatggtgagggggtgcagaaccgttttgattccaaaatcatcaaagccggatcgtttgaaagacattaataactggagacctatcacgatcggttccatcttgctgagactgttctccaggattgtaacagctaggctgagcaaagcgtgccccctgaacccaaggcaaagaggctttatcagagcggcgggatgctctgaaaacttaaaactcctgcaaactataatttggtcggccaaaagagaacacagaccactgggtgttgtattcgtggacatcgccaaggcttttgacaccgtaagccaccagcacatcattcatgctttgcagcaaagagaggtggatccccacatcgtcggtctggtgagcaatatgtacgagaacatcagtacgtatatcaccacaaagaggaacacacacacagacaaaatccagatccgggttggagtaaagcagggtgacccgatgtcgccccttttatttaacctggcaatggaccctctattatgcaagctggaagagagtggcaaaggataccaccgaggacagagcagcatcacagcgatggcatttgcagacgatctggttttgctgagcgactcctgggaaaatatgaatacaaatattagcatactggagaccttctgcaatctgaccggactcaaaacacaggggcaaaagtgccacggcttttacatcaagccgacaaaggactcttacaccatcaatgactgcgctgcctggactatcaacggcacacccctgaacatgatcgaccccggcgaatctgagaaatacctcggcctgcagtttgacccgtggattggaatagcaaggtccggtctctccacaaaactagatttttggcttcagcggatcgatcaagcaccacttaaacctctgcagaaaactgatattctcaaaacatacaccatccctcggctgatctacatagctgaccactcagaagtgaaaactgcactactcgaaacccttgaccagaagatccggacagcggtcaaggaatggcttcacctacctccgtgcacctgcgatgccatcctgtactcgagcacgagagacggcggtttgggcatcaccaaattggcaggactgatccccagcgtgcaggcccgtagactgcatcggatcgcacagtcatctgacgatacgatgaaatgcttcatggaaaaagagaaaatggaacagctgcataagaaattgtggattcaagctggaggggacagagagaacataccctcgatttgggaagcaccaccgtcgagtgaaccaccaaacaacgtgagcacaaattcggaatgggaagcaccgacccagaaagataaatttccaaagccttgcaattggaggaaaaacgaattcaaaaaatggaccaaattggcatcccaaggccgcggaattgtaaattttgaaagagacaaaattagtaaccattggatccaatactacagacgcatacctcacaggaaactcctcactgcactacaactcagggccaacgtttaccccacgagagaatttctagccaggggtagacaagaccaatacatcaaggcgtgtaggcactgcgatgcggacattgaatcctgcgcccacatcatcggcaactgcccagtgacacaggacgcccgaatcaagaggcacaattacatctgcgaactgcttctcgaggaggcgaagaagaaggactgggtagtgttcaaggaaccgcacataagggattccaacaaggaactgtacaaacctgacctgatatttgtgaaggatgcccgtgcacttgtcgtggatgtgacagtacggtatgaagcagccaaatcatcgctggaggaagccgctgcagagaaagtgagaaagtacaaacacctggaaacggaagtaagacatctcacgaatgcaaaggacgttacttttgtgggctttcccctaggagcgcgggggaaatggcaccaagataactttaaacttttgactgagcttggcctctccaaatcgaggcaagtgaaaatggcagagactttttccacagtagcgctcttttcatctgtggacattgtacatatgtttgccagtagggccagaaaatctatggttatgtgataataggctgccttctgcggggcttgccttctggccatgcccttcttctctcccttgcacctgtacctcttggtctttgaataaagcctgagtaggaaggaccggtaaaaaaaaaaaaaaaaaaaaaaaaaaaaaaacgttgactaaaaaaaaaaaaaaaaaaaaaaaaaaaaaaaaaaaaaaaaaaaaaaaaaaaaaaaaaaaaaaaaaaaaaa

SEQ ID NO: 11585 - DNA, 4603 bp, synthetic construct; identical to SEQ ID NO: 10238
  source 1..4603: mol_type = other DNA

SEQ ID NO: 11586 - DNA, 5446 bp, synthetic construct; identical to SEQ ID NO: 10148
  source 1..5446: mol_type = other DNA

SEQ ID NO: 11587 - DNA, 4564 bp, synthetic construct
  source 1..4564: mol_type = other DNA
ggtctagttacaactgggcatcgctgcagagatcgcacctcctcgtggtcccgctggtagcccttcgaagggtgactaagtcgatctctgccccaggtacggagccgttgggactcaccagtccaacgtaactcctgcctaaattcggtgaaacaaattcctcggtaaaaagccccatggcttcttgcccgaaacctggccccccggtttcagcaggggcaatgagtttggaaagtggactgaccacccactccgttctcgccatcgaacgtggtcccaattcgttggcaaattccggatcagactttgggggggggggtctggggctaccgttacgcctattgagggtatcggtcggcactcagacctcccgctccgactgggtagacctggtgtcctggagccacccaggacccacgtctaagtcccagcaggttgacctggtgtctttatttcctaaacaccgggttgacctgttatccaaaaacgaccaggtagacctggtggctcaatttttaccatctaaatttccccccaatttggcagaaaatgatttggctttgctggtgaacttagagttctacagatcggatttgcatgtgtatgagtgtgttcattttgctgcacattgggagggattaagtggtttgcctgaggtgtatgaacaacttgcaccacaaccgtgtgtgggagaaactttacattctagcctcccacgagacagtgaactgtttgtgcctgaagaggggagcagcgagaaggagagcgaggacgcgccaaaaacatctcctccgacgcctgggaaacatggtttggaacagactggggaggaaaaagtgatggtgactgttcctgacaaaaatccaccttgtccttgctgtggtacccgggtaaactctgtgttgaatctgattgaacatctgaaagtgtcacacgggaaaaggggggtttgttttcggtgtgcaaaatgtggaaaggaaaatagtaactatcacagtgttgtttgtcattttccaaaatgcaggggtccagagacggagaaagccccagctggggagtggatttgtgaggtatgcaacagagattttacaaccaaaattggcctgggacaacacaagagattggcacacccagcagtgagaaatcaggaaaggatcgttgcttcccaaccgaaagaaacatcaaatagaggtgctcacaaaaggtgctggacaaaggaggaggaagaattactaataagactggaggctcagttcgagggaaacaaaaatattaataagcttattgcagaacacataaccaccaaaacagctaagcagatcagtgacaaaaggcgattgctgtccagaaagccagcagaggagccacgtgaggagcctggaacgtgtcatcacaccaggagagcagctgcgagcctgagaacggagcctgagatgagtcatcacgcccaggcagaggacagagataatggacctgggagacgccctctgccaggcagggcagctgccggagggagaacaatggacgagataagacgccaccctgataagggcaacggacagcagagacccaccaagcaaaaatcagaagaacagctgcaggcttactataaaaagacactagaggaacgactttcagctggggcacttaacaccttcccccgagcattcaagcaggtaatggaaggccgggatataaagctagtaatcaatcagacagcgcaggactgcttcggatgcctggaatccataagccaaataagaacggcaacccgagataaaaaggacacggtgacccggaagaaacacccaaagaaaccttttcagaagtggatgaagaagagagcaatcaaaaaaggtaattatcttcggttccagcgtttattttatcttgatagagggaaactggctaaaatcattttagatgatattgaatgcttgtcttgtgacataccactcagtgaaatttattcggtttttaaaacaagatgggaaacaactggtagctttaaaagccttggggactttaaaacttacgggaaggctgacaacactgccttcagagaattaattacggctaaagaaattgagaaaaatgtgcaggaaatgagcaaaggctcggctcccggtccagacgggattactcttggggacgtcgtaaagatggatcccgagttttcccggaccatggagattttcaatttatggttaacaactggtaaaatcccggacatggtgagggggtgcagaaccgttttgattccaaaatcatcaaagccggatcgtttgaaagacattaataactggagacctatcacgatcggttccatcttgctgagactgttctccaggattgtaacagctaggctgagcaaagcgtgccccctgaacccaaggcaaagaggctttatcagagcggcgggatgctctgaaaacttaaaactcctgcaaactataatttggtcggccaaaagagaacacagaccactgggtgttgtattcgtggacatcgccaaggcttttgacaccgtaagccaccagcacatcattcatgctttgcagcaaagagaggtggatccccacatcgtcggtctggtgagcaatatgtacgagaacatcagtacgtatatcaccacaaagaggaacacacacacagacaaaatccagatccgggttggagtaaagcagggtgacccgatgtcgccccttttatttaacctggcaatggaccctctattatgcaagctggaagagagtggcaaaggataccaccgaggacagagcagcatcacagcgatggcatttgcagacgatctggttttgctgagcgactcctgggaaaatatgaatacaaatattagcatactggagaccttctgcaatctgaccggactcaaaacacaggggcaaaagtgccacggcttttacatcaagccgacaaagaagtcttacaccatcaatgactgcgctgcctggactatcaacggcacacccctgaacatgatcgaccccggcgaatctgagaaatacctcggcctgcagtttgacccgtggattggaatagcaaggtccggtctctccacaaaactagatttttggcttcagcggatcgatcaagcaccacttaaacctctgcagaaactggatattctcaaaacatacaccatccctcggctgatctacatagctgaccactcagaagtgaaaagcgcactactcgaaacccttgaccagaagatccggacagcggtcaaggaatggcttcacctacctccgtgcacctgcgatgccatcctgtactcgagcacgagagacggcggtttgggcatcaccaaattggcaggactgatccccagcgtgcaggcccgtagactgcatcggatcgcacagtcatctgacgatacgatgaaatgcttcatggaaaaagagaaaatggaacagctgcataagaaattgtggattcaagctggaggggacagagagaacataccctcgatttgggaagcaccaccgtcgagtgaaccaccaaacaacgtgagcacaaattcggaatgggaagcaccgacccagaaagataaatttccaaagccttgcaattggaggaaaaacgaattcaaaaaatggaccaaattggcatcccaaggccgcggaattgtaaattttgaaagagacaaaattagtaaccattggatccaatactacagacgcatacctcacaggaaactcctcactgcactacaactcagggccaacgtttaccccacgagagaatttctagccaggggtagacaagaccaatacatcaaggcgtgtaggcactgcgatgcggacattgaatcctgcgcccacatcatcggcaactgcccagtgacacaggacgcccgaatcaagaggcacaattacatctgcgaactgcttctcgaggaggcgaagaagaaggactgggtagtgttcaaggaaccgcacataagggattccaacaaggaactgtacaaacctgacctgatatttgtgaaggatggccgtgcacttgtcgtggatgtgacagtacggtatgaagcagccaaatcatcgctggaggaagccgctgcagagaaagtgagaaagtacaaacacctggaaacggaagtaagacatctcacgaatgcaaaggacgttacttttgtgggctttcccctaggagcgcgggggaaatggcaccaagataactttaaacttttgactgagcttggcctctccaaatcgaggcaagtgaaaatggcagagactttttccacagtagcgctcttttcatctgtggacattgtacatatgtttgccagtagggccagaaaatctatggttatgtgataataggctgccttctgcggggcttgccttctggccatgcccttcttctctcccttgcacctgtacctcttggtctttgaataaagcctgagtaggaaggaccggtaaaaaaaaaaaaaaaaaaaaaaaaaaaaaaacgttgactaaaaaaaaaaaaaaaaaaaaaaaaaaaaaaaaaaaaaaaaaaaaaaaaaaaaaaaaaaaaaaaaaaaaaa

SEQ ID NO: 11588 - DNA, 4564 bp, synthetic construct
  source 1..4564: mol_type = other DNA
ggtctagttacaactgggcatcgctgcagagatcgcacctcctcgtggtcccgctggtagcccttcgaagggtgactaagtcgatctctgccccaggtacggagccgttgggactcaccagtccaacgtaactcctgcctaaattcggtgaaacaaattcctcggtaaaaagccccatggcttcttgcccgaaacctggccccccggtttcagcaggggcaatgagtttggaaagtggactgaccacccactccgttctcgccatcgaacgtggtcccaattcgttggcaaattccggatcagactttgggggggggggtctggggctaccgttacgcctattgagggtatcggtcggcactcagacctcccgctccgactgggtagacctggtgtcctggagccacccaggacccacgtctaagtcccagcaggttgacctggtgtctttatttcctaaacaccgggttgacctgttatccaaaaacgaccaggtagacctggtggctcaatttttaccatctaaatttccccccaatttggcagaaaatgatttggctttgctggtgaacttagagttctacagatcggatttgcatgtgtatgagtgtgttcattttgctgcacattgggagggattaagtggtttgcctgaggtgtatgaacaacttgcaccacaaccgtgtgtgggagaaactttacattctagcctcccacgagacagtgaactgtttgtgcctgaagaggggagcagcgagaaggagagcgaggacgcgccaaaaacatctcctccgacgcctgggaaacatggtttggaacagactggggaggaaaaagtgatggtgactgttcctgacaaaaatccaccttgtccttgctgtggtacccgggtaaactctgtgttgaatctgattgaacatctgaaagtgtcacacgggaaaaggggggtttgttttcggtgtgcaaaatgtggaaaggaaaatagtaactatcacagtgttgtttgtcattttccaaaatgcaggggtccagagacggagaaagccccagctggggagtggatttgtgaggtatgcaacagagattttacaaccaaaattggcctgggacaacacaagagattggcacacccagcagtgagaaatcaggaaaggatcgttgcttcccaaccgaaagaaacatcaaatagaggtgctcacaaaaggtgctggacaaaggaggaggaagaattactaataagactggaggctcagttcgagggaaacaaaaatattaataagcttattgcagaacacataaccaccaaaacagctaagcagatcagtgacaaaaggcgattgctgtccagaaagccagcagaggagccacgtgaggagcctggaacgtgtcatcacaccaggagagcagctgcgagcctgagaacggagcctgagatgagtcatcacgcccaggcagaggacagagataatggacctgggagacgccctctgccaggcagggcagctgccggagggagaacaatggacgagataagacgccaccctgataagggcaacggacagcagagacccaccaagcaaaaatcagaagaacagctgcaggcttactataaaaagacactagaggaacgactttcagctggggcacttaacaccttcccccgagcattcaagcaggtaatggaaggccgggatataaagctagtaatcaatcagacagcgcaggactgcttcggatgcctggaatccataagccaaataagaacggcaacccgagataaaaaggacacggtgacccggaagaaacacccaaagaaaccttttcagaagtggatgaagaagagagcaatcaaaaaaggtaattatcttcggttccagcgtttattttatcttgatagagggaaactggctaaaatcattttagatgatattgaatgcttgtcttgtgacataccactcagtgaaatttattcggtttttaaaacaagatgggaaacaactggtagctttaaaagccttggggactttaaaacttacgggaaggctgacaacactgccttcagagaattaattacggctaaagaaattgagaaaaatgtgcaggaaatgagcaaaggctcggctcccggtccagacgggattactcttggggacgtcgtaaagatggatcccgagttttcccggaccatggagattttcaatttatggttaacaactggtaaaatcccggacatggtgagggggtgcagaaccgttttgattccaaaatcatcaaagccggatcgtttgaaagacattaataactggagacctatcacgatcggttccatcttgctgagactgttctccaggattgtaacagctaggctgagcaaagcgtgccccctgaacccaaggcaaagaggctttatcagagcggcgggatgctctgaaaacttaaaactcctgcaaactataatttggtcggccaaaagagaacacagaccactgggtgttgtattcgtggacatcgccaaggcttttgacaccgtaagccaccagcacatcattcatgctttgcagcaaagagaggtggatccccacatcgtcggtctggtgagcaatatgtacgagaacatcagtacgtatatcaccacaaagaggaacacacacacagacaaaatccagatccgggttggagtaaagcagggtgacccgatgtcgccccttttatttaacctggcaatggaccctctattatgcaagctggaagagagtggcaaaggataccaccgaggacagagcagcatcacagcgatggcatttgcagacgatctggttttgctgagcgactcctgggaaaatatgaatacaaatattagcatactggagaccttctgcaatctgaccggactcaaaacacaggggcaaaagtgccacggcttttacatcaagccgacaaagaagtcttacaccatcaatgactgcgctgcctggactatcaacggcacacccctgaacatgatcgaccccggcgaatctgagaaatacctcggcctgcagtttgacccgtggattggaatagcaaggtccggtctctccacaaaactagatttttggcttcagcggatcgatcaagcaccacttaaacctctgcagaaactggatattctcaaaacatacaccatccctcggctgatctacatagctgaccactcagaagtgaaaagcgcactactcgaaacccttgaccagaagatccggacagcggtcaaggaatggcttcacctacctccgtgcacctgcgatgccatcctgtactcgagcacgagagacggcggtttgggcatcaccaaattggcaggactgatccccagcgtgcaggcccgtagactgcatcggatcgcacagtcatctgacgatacgatgaaatgcttcatggaaaaagagaaaatggaacagctgcataagaaattgtggattcaagctggaggggacagagagaacataccctcgatttgggaagcaccaccgtcgagtgaaccaccaaacaacgtgagcacaaattcggaatgggaagcaccgacccagaaagataaatttccaaagccttgcaattggaggaaaaacgaattcaaaaaatggaccaaattggcatcccaaggccgcggaattgtaaattttgaaagagacaaaattagtaaccattggatccaatactacagacgcatacctcacaggaaactcctcactgcactacaactcagggccaacgtttaccccacgagagaatttctagccaggggtagacaagaccaatacatcaaggcgtgtaggcactgcgatgcggacattgaatcctgcgcccacatcatcggcaactgcccagtgacacaggacgcccgaatcaagaggcacaattacatctgcgaactgcttctcgaggaggcgaagaagaaggactgggtagtgttcaaggaaccgcacataagggattccaacaaggaactgtacaaacctgacctgatatttgtgaaggatgcccgtgcacttgtcgtggatgtgacagtacggtatgaagcagccaaatcatcgctggaggaagccgctgcagagaaagtgagaaagtacaaacacctggaaacggaagtaagacatctcacgaatgcaaaggacgttacttttgtgggctttcccctaggagcgcgggggaaatggcaccaagataactttaaacttttgactgagcttggcctctccaaatcgaggcaagtgaaaatggcagagactttttccacagtagcgctcttttcatctgtggacattgtacatatgtttgccagtagggccagaaaatctatggttatgtgataataggctgccttctgcggggcttgccttctggccatgcccttcttctctcccttgcacctgtacctcttggtctttgaataaagcctgagtaggaaggaccggtaaaaaaaaaaaaaaaaaaaaaaaaaaaaaaacgttgactaaaaaaaaaaaaaaaaaaaaaaaaaaaaaaaaaaaaaaaaaaaaaaaaaaaaaaaaaaaaaaaaaaaaaa

SEQ ID NO: 11589 - DNA, 4564 bp, synthetic construct
  source 1..4564: mol_type = other DNA
ggtctagttacaactgggcatcgctgcagagatcgcacctcctcgtggtcccgctggtagcccttcgaagggtgactaagtcgatctctgccccaggtacggagccgttgggactcaccagtccaacgtaactcctgcctaaattcggtgaaacaaattcctcggtaaaaagccccatggcttcttgcccgaaacctggccccccggtttcagcaggggcaatgagtttggaaagtggactgaccacccactccgttctcgccatcgaacgtggtcccaattcgttggcaaattccggatcagactttgggggggggggtctggggctaccgttacgcctattgagggtatcggtcggcactcagacctcccgctccgactgggtagacctggtgtcctggagccacccaggacccacgtctaagtcccagcaggttgacctggtgtctttatttcctaaacaccgggttgacctgttatccaaaaacgaccaggtagacctggtggctcaatttttaccatctaaatttccccccaatttggcagaaaatgatttggctttgctggtgaacttagagttctacagatcggatttgcatgtgtatgagtgtgttcattttgctgcacattgggagggattaagtggtttgcctgaggtgtatgaacaacttgcaccacaaccgtgtgtgggagaaactttacattctagcctcccacgagacagtgaactgtttgtgcctgaagaggggagcagcgagaaggagagcgaggacgcgccaaaaacatctcctccgacgcctgggaaacatggtttggaacagactggggaggaaaaagtgatggtgactgttcctgacaaaaatccaccttgtccttgctgtggtacccgggtaaactctgtgttgaatctgattgaacatctgaaagtgtcacacgggaaaaggggggtttgttttcggtgtgcaaaatgtggaaaggaaaatagtaactatcacagtgttgtttgtcattttccaaaatgcaggggtccagagacggagaaagccccagctggggagtggatttgtgaggtatgcaacagagattttacaaccaaaattggcctgggacaacacaagagattggcacacccagcagtgagaaatcaggaaaggatcgttgcttcccaaccgaaagaaacatcaaatagaggtgctcacaaaaggtgctggacaaaggaggaggaagaattactaataagactggaggctcagttcgagggaaacaaaaatattaataagcttattgcagaacacataaccaccaaaacagctaagcagatcagtgacaaaaggcgattgctgtccagaaagccagcagaggagccacgtgaggagcctggaacgtgtcatcacaccaggagagcagctgcgagcctgagaacggagcctgagatgagtcatcacgcccaggcagaggacagagataatggacctgggagacgccctctgccaggcagggcagctgccggagggagaacaatggacgagataagacgccaccctgataagggcaacggacagcagagacccaccaagcaaaaatcagaagaacagctgcaggcttactataaaaagacactagaggaacgactttcagctggggcacttaacaccttcccccgagcattcaagcaggtaatggaaggccgggatataaagctagtaatcaatcagacagcgcaggactgcttcggatgcctggaatccataagccaaataagaacggcaacccgagataaaaaggacacggtgacccggaagaaacacccaaagaaaccttttcagaagtggatgaagaagagagcaatcaaaaaaggtaattatcttcggttccagcgtttattttatcttgatagagggaaactggctaaaatcattttagatgatattgaatgcttgtcttgtgacataccactcagtgaaatttattcggtttttaaaacaagatgggaaacaactggtagctttaaaagccttggggactttaaaacttacgggaaggctgacaacactgccttcagagaattaattacggctaaagaaattgagaaaaatgtgcaggaaatgagcaaaggctcggctcccggtccagacgggattactcttggggacgtcgtaaagatggatcccgagttttcccggaccatggagattttcaatttatggttaacaactggtaaaatcccggacatggtgagggggtgcagaaccgttttgattccaaaatcatcaaagccggatcgtttgaaagacattaataactggagacctatcacgatcggttccatcttgctgagactgttctccaggattgtaacagctaggctgagcaaagcgtgccccctgaacccaaggcaaagaggctttatcagagcggcgggatgctctgaaaacttaaaactcctgcaaactataatttggtcggccaaaagagaacacagaccactgggtgttgtattcgtggacatcgccaaggcttttgacaccgtaagccaccagcacatcattcatgctttgcagcaaagagaggtggatccccacatcgtcggtctggtgagcaatatgtacgagaacatcagtacgtatatcaccacaaagaggaacacacacacagacaaaatccagatccgggttggagtaaagcagggtgacccgatgtcgccccttttatttaacctggcaatggaccctctattatgcaagctggaagagagtggcaaaggataccaccgaggacagagcagcatcacagcgatggcatttgcagacgatctggttttgctgagcgactcctgggaaaatatgaatacaaatattagcatactggagaccttctgcaatctgaccggactcaaaacacaggggcaaaagtgccacggcttttacatcaagccgacaaagaagtcttacaccatcaatgactgcgctgcctggactatcaacggcacacccctgaacatgatcgaccccggcgaatctgagaaatacctcggcctgcagtttgacccgtggattggaatagcaaggtccggtctctccacaaaactagatttttggcttcagcggatcgatcaagcaccacttaaacctctgcagaaactggatattctcaaaacatacaccatccctcggctgatctacatagctgaccactcagaagtgaaaactgcactactcgaaacccttgaccagaagatccggacagcggtcaaggaatggcttcacctacctccgtgcacctgcgatgccatcctgtactcgagcacgagagacggcggtttgggcatcaccaaattggcaggactgatccccagcgtgcaggcccgtagactgcatcggatcgcacagtcatctgacgatacgatgaaatgcttcatggaaaaagagaaaatggaacagctgcataagaaattgtggattcaagctggaggggacagagagaacataccctcgatttgggaagcaccaccgtcgagtgaaccaccaaacaacgtgagcacaaattcggaatgggaagcaccgacccagaaagataaatttccaaagccttgcaattggaggaaaaacgaattcaaaaaatggaccaaattggcatcccaaggccgcggaattgtaaattttgaaagagacaaaattagtaaccattggatccaatactacagacgcatacctcacaggaaactcctcactgcactacaactcagggccaacgtttaccccacgagagaatttctagccaggggtagacaagaccaatacatcaaggcgtgtaggcactgcgatgcggacaacgaatcctgcgcccacatcatcggcaactgcccagtgacacaggacgcccgaatcaagaggcacaattacatctgcgaactgcttctcgaggaggcgaagaagaaggactgggtagtgttcaaggaaccgcacataagggattccaacaaggaactgtacaaacctgacctgatatttgtgaaggatggccgtgcacttgtcgtggatgtgacagtacggtatgaagcagccaaatcatcgctggaggaagccgctgcagagaaagtgagaaagtacaaacacctggaaacggaagtaagacatctcacgaatgcaaaggacgttacttttgtgggctttcccctaggagcgcgggggaaatggcaccaagataactttaaacttttgactgagcttggcctctccaaatcgaggcaagtgaaaatggcagagactttttccacagtagcgctcttttcatctgtggacattgtacatatgtttgccagtagggccagaaaatctatggttatgtgataataggctgccttctgcggggcttgccttctggccatgcccttcttctctcccttgcacctgtacctcttggtctttgaataaagcctgagtaggaaggaccggtaaaaaaaaaaaaaaaaaaaaaaaaaaaaaaacgttgactaaaaaaaaaaaaaaaaaaaaaaaaaaaaaaaaaaaaaaaaaaaaaaaaaaaaaaaaaaaaaaaaaaaaaa

SEQ ID NO: 11590 - DNA, 4564 bp, synthetic construct
  source 1..4564: mol_type = other DNA
ggtctagttacaactgggcatcgctgcagagatcgcacctcctcgtggtcccgctggtagcccttcgaagggtgactaagtcgatctctgccccaggtacggagccgttgggactcaccagtccaacgtaactcctgcctaaattcggtgaaacaaattcctcggtaaaaagccccatggcttcttgcccgaaacctggccccccggtttcagcaggggcaatgagtttggaaagtggactgaccacccactccgttctcgccatcgaacgtggtcccaattcgttggcaaattccggatcagactttgggggggggggtctggggctaccgttacgcctattgagggtatcggtcggcactcagacctcccgctccgactgggtagacctggtgtcctggagccacccaggacccacgtctaagtcccagcaggttgacctggtgtctttatttcctaaacaccgggttgacctgttatccaaaaacgaccaggtagacctggtggctcaatttttaccatctaaatttccccccaatttggcagaaaatgatttggctttgctggtgaacttagagttctacagatcggatttgcatgtgtatgagtgtgttcattttgctgcacattgggagggattaagtggtttgcctgaggtgtatgaacaacttgcaccacaaccgtgtgtgggagaaactttacattctagcctcccacgagacagtgaactgtttgtgcctgaagaggggagcagcgagaaggagagcgaggacgcgccaaaaacatctcctccgacgcctgggaaacatggtttggaacagactggggaggaaaaagtgatggtgactgttcctgacaaaaatccaccttgtccttgctgtggtacccgggtaaactctgtgttgaatctgattgaacatctgaaagtgtcacacgggaaaaggggggtttgttttcggtgtgcaaaatgtggaaaggaaaatagtaactatcacagtgttgtttgtcattttccaaaatgcaggggtccagagacggagaaagccccagctggggagtggatttgtgaggtatgcaacagagattttacaaccaaaattggcctgggacaacacaagagattggcacacccagcagtgagaaatcaggaaaggatcgttgcttcccaaccgaaagaaacatcaaatagaggtgctcacaaaaggtgctggacaaaggaggaggaagaattactaataagactggaggctcagttcgagggaaacaaaaatattaataagcttattgcagaacacataaccaccaaaacagctaagcagatcagtgacaaaaggcgattgctgtccagaaagccagcagaggagccacgtgaggagcctggaacgtgtcatcacaccaggagagcagctgcgagcctgagaacggagcctgagatgagtcatcacgcccaggcagaggacagagataatggacctgggagacgccctctgccaggcagggcagctgccggagggagaacaatggacgagataagacgccaccctgataagggcaacggacagcagagacccaccaagcaaaaatcagaagaacagctgcaggcttactataaaaagacactagaggaacgactttcagctggggcacttaacaccttcccccgagcattcaagcaggtaatggaaggccgggatataaagctagtaatcaatcagacagcgcaggactgcttcggatgcctggaatccataagccaaataagaacggcaacccgagataaaaaggacacggtgacccggaagaaacacccaaagaaaccttttcagaagtggatgaagaagagagcaatcaaaaaaggtaattatcttcggttccagcgtttattttatcttgatagagggaaactggctaaaatcattttagatgatattgaatgcttgtcttgtgacataccactcagtgaaatttattcggtttttaaaacaagatgggaaacaactggtagctttaaaagccttggggactttaaaacttacgggaaggctgacaacactgccttcagagaattaattacggctaaagaaattgagaaaaatgtgcaggaaatgagcaaaggctcggctcccggtccagacgggattactcttggggacgtcgtaaagatggatcccgagggctcccggaccatggagattttcaatttatggttaacaactggtaaaatcccggacatggtgagggggtgcagaaccgttttgattccaaaatcatcaaagccggatcgtttgaaagacattaataactggagacctatcacgatcggttccatcttgctgagactgttctccaggattgtaacagctaggctgagcaaagcgtgccccctgaacccaaggcaaagaggctttatcagagcggcgggatgctctgaaaacttaaaactcctgcaaactataatttggtcggccaaaagagaacacagaccactgggtgttgtattcgtggacatcgccaaggcttttgacaccgtaagccaccagcacatcattcatgctttgcagcaaagagaggtggatccccacatcgtcggtctggtgagcaatatgtacgagaacatcagtacgtatatcaccacaaagaggaacacacacacagacaaaatccagatccgggttggagtaaagcagggtgacccgatgtcgccccttttatttaacctggcaatggaccctctattatgcaagctggaagagagtggcaaaggataccaccgaggacagagcagcatcacagcgatggcatttgcagacgatctggttttgctgagcgactcctgggaaaatatgaatacaaatattagcatactggagaccttctgcaatctgaccggactcaaaacacaggggcaaaagtgccacggcttttacatcaagccgacaaagaagtcttacaccatcaatgactgcgctgcctggactatcaacggcacacccctgaacatgatcgaccccggcgaatctgagaaatacctcggcctgcagtttgacccgtggattggaatagcaaggtccggtctctccacaaaactagatttttggcttcagcggatcgatcaagcaccacttaaacctctgcagaaactggatattctcaaaacatacaccatccctcggctgatctacatagctgaccactcagaagtgaaaactgcactactcgaaacccttgaccagaagatccggacagcggtcaaggaatggcttcacctacctccgtgcacctgcgatgccatcctgtactcgagcacgagagacggcggtttgggcatcaccaaattggcaggactgatccccagcgtgcaggcccgtagactgcatcggatcgcacagtcatctgacgatacgatgaaatgcttcatggaaaaagagaaaatggaacagctgcataagaaattgtggattcaagctggaggggacagagagaacataccctcgatttgggaagcaccaccgtcgagtgaaccaccaaacaacgtgagcacaaattcggaatgggaagcaccgacccagaaagataaatttccaaagccttgcaattggaggaaaaacgaattcaaaaaatggaccaaattggcatcccaaggccgcggaattgtaaattttgaaagagacaaaattagtaaccattggatccaatactacagacgcatacctcacaggaaactcctcactgcactacaactcagggccaacgtttaccccacgagagaatttctagccaggggtagacaagaccaatacatcaaggcgtgtaggcactgcgatgcggacaacgaatcctgcgcccacatcatcggcaactgcccagtgacacaggacgcccgaatcaagaggcacaataagatctgcgaactgcttctcgaggaggcgaagaagaaggactgggtagtgttcaaggaaccgcacataagggattccaacaaggaactgtacaaacctgacctgatatttgtgaaggatggccgtgcacttgtcgtggatgtgacagtacggtatgaagcagccaaatcatcgctggaggaagccgctgcagagaaagtgagaaagtacaaacacctggaaacggaagtaagacatctcacgaatgcaaaggacgttacttttgtgggctttcccctaggagcgcgggggaaatggcaccaagataactttaaacttttgactgagcttggcctctccaaatcgaggcaagtgaaaatggcagagactttttccacagtagcgctcttttcatctgtggacattgtacatatgtttgccagtagggccagaaaatctatggttatgtgataataggctgccttctgcggggcttgccttctggccatgcccttcttctctcccttgcacctgtacctcttggtctttgaataaagcctgagtaggaaggaccggtaaaaaaaaaaaaaaaaaaaaaaaaaaaaaaacgttgactaaaaaaaaaaaaaaaaaaaaaaaaaaaaaaaaaaaaaaaaaaaaaaaaaaaaaaaaaaaaaaaaaaaaaa

SEQ ID NO: 11591 - DNA, 4564 bp, synthetic construct
  source 1..4564: mol_type = other DNA
ggtctagttacaactgggcatcgctgcagagatcgcacctcctcgtggtcccgctggtagcccttcgaagggtgactaagtcgatctctgccccaggtacggagccgttgggactcaccagtccaacgtaactcctgcctaaattcggtgaaacaaattcctcggtaaaaagccccatggcttcttgcccgaaacctggccccccggtttcagcaggggcaatgagtttggaaagtggactgaccacccactccgttctcgccatcgaacgtggtcccaattcgttggcaaattccggatcagactttgggggggggggtctggggctaccgttacgcctattgagggtatcggtcggcactcagacctcccgctccgactgggtagacctggtgtcctggagccacccaggacccacgtctaagtcccagcaggttgacctggtgtctttatttcctaaacaccgggttgacctgttatccaaaaacgaccaggtagacctggtggctcaatttttaccatctaaatttccccccaatttggcagaaaatgatttggctttgctggtgaacttagagttctacagatcggatttgcatgtgtatgagtgtgttcattttgctgcacattgggagggattaagtggtttgcctgaggtgtatgaacaacttgcaccacaaccgtgtgtgggagaaactttacattctagcctcccacgagacagtgaactgtttgtgcctgaagaggggagcagcgagaaggagagcgaggacgcgccaaaaacatctcctccgacgcctgggaaacatggtttggaacagactggggaggaaaaagtgatggtgactgttcctgacaaaaatccaccttgtccttgctgtggtacccgggtaaactctgtgttgaatctgattgaacatctgaaagtgtcacacgggaaaaggggggtttgttttcggtgtgcaaaatgtggaaaggaaaatagtaactatcacagtgttgtttgtcattttccaaaatgcaggggtccagagacggagaaagccccagctggggagtggatttgtgaggtatgcaacagagattttacaaccaaaattggcctgggacaacacaagagattggcacacccagcagtgagaaatcaggaaaggatcgttgcttcccaaccgaaagaaacatcaaatagaggtgctcacaaaaggtgctggacaaaggaggaggaagaattactaataagactggaggctcagttcgagggaaacaaaaatattaataagcttattgcagaacacataaccaccaaaacagctaagcagatcagtgacaaaaggcgattgctgtccagaaagccagcagaggagccacgtgaggagcctggaacgtgtcatcacaccaggagagcagctgcgagcctgagaacggagcctgagatgagtcatcacgcccaggcagaggacagagataatggacctgggagacgccctctgccaggcagggcagctgccggagggagaacaatggacgagataagacgccaccctgataagggcaacggacagcagagacccaccaagcaaaaatcagaagaacagctgcaggcttactataaaaagacactagaggaacgactttcagctggggcacttaacaccttcccccgagcattcaagcaggtaatggaaggccgggatataaagctagtaatcaatcagacagcgcaggactgcttcggatgcctggaatccataagccaaataagaacggcaacccgagataaaaaggacacggtgacccggaagaaacacccaaagaaaccttttcagaagtggatgaagaagagagcaatcaaaaaaggtaattatcttcggttccagcgtttattttatcttgatagagggaaactggctaaaatcattttagatgatattgaatgcttgtcttgtgacataccactcagtgaaatttattcggtttttaaaacaagatgggaaacaactggtagctttaaaagccttggggactttaaaacttacgggaaggctgacaacactgccttcagagaattaattacggctaaagaaattgagaaaaatgtgcaggaaatgagcaaaggctcggctcccggtccagacgggattactcttggggacgtcgtaaagatggatcccgagttttcccggaccatggagattttcaatttatggttaacaactggtaaaatcccggacatggtgagggggtgcagaaccgttttgattccaaaatcatcaaagccggatcgtttgaaagacattaataactggagacctatcacgatcggttccatcttgctgagactgttctccaggattgtaacagctaggctgagcaaagcgtgccccctgaacccaaggcaaagaggctttatcagagcggcgggatgctctgaaaacttaaaactcctgcaaactataatttggtcggccaaaagagaacacagaccactgggtgttgtattcgtggacatcgccaaggcttttgacaccgtaagccaccagcacatcattcatgctttgcagcaaagagaggtggatccccacatcgtcggtctggtgagcaatatgtacgagaacatcagtacgtatatcaccacaaagaggaacacacacacagacaaaatccagatccgggttggagtaaagcagggtgacccgatgtcgccccttttatttaacctggcaatggaccctctattatgcaagctggaagagagtggcaaaggataccaccgaggacagagcagcatcacagcgatggcatttgcagacgatctggttttgctgagcgactcctgggaaaatatgaatacaaatattagcatactggagaccttctgcaatctgaccggactcaaaacacaggggcaaaagtgccacggcttttacatcaagccgacaaagaagtcttacaccatcaatgactgcgctgcctggactatcaacggcacacccctgaacatgatcgaccccggcgaatctgagaaatacctcggcctgcagtttgacccgtggattggaatagcaaggtccggtctctccacaaaactagatttttggcttcagcggatcgatcaagcaccacttaaacctctgcagaaactggatattctcaaaacatacaccatccctcggctgatctacatagctgaccactcagaagtgaaaactgcactactcgaaacccttgaccagaagatccggacagcggtcaaggaatggcttcacctacctccgtgcacctgcgatgccatcctgtactcgagcacgagagacggcggtttgggcatcaccaaattggcaggactgatccccagcgtgcaggcccgtagactgcatcggatcgcacagtcatctgacgatacgatgaaatgcttcatggaaaaagagaaaatggaacagctgcataagaaattgtggattcaagctggaggggacagagagaacataccctcgatttgggaagcaccaccgtcgagtgaaccaccaaacaacgtgagcacaaattcggaatgggaagcaccgacccagaaagataaatttccaaagccttgcaattggaggaaaaacgaattcaaaaaatggaccaaattggcatcccaaggccgcggaattgtaaattttgaaagagacaaaattagtaaccattggatccaatactacagacgcatacctcacaggaaactcctcactgcactacaactcagggccaacgtttaccccacgagagaatttctagccaggggtagacaagaccaatacatcaaggcgtgtaggcactgcgatgcggacaacgaatcctgcgcccacatcatcggcaactgcccagtgacacaggacgcccgaatcaagaggcacaataagatctgcgaactgcttctcgaggaggcgaagaagaaggactgggtagtgttcaaggaaccgcacataagggattccaacaaggaactgtacaaacctgacctgatatttgtgaaggatggccgtgcacttgtcgtggatgtgacagtacggtatgaagcagccaaatcatcgctggaggaagccgctgcagagaaagtgagaaagtacaaacacctggaaacggaagtaagacatctcacgaatgcaaaggacgttacttttgtgggctttcccctaggagcgcgggggaaatggcaccaagataactttaaacttttgactgagcttggcctctccaaatcgaggcaagtgaaaatggcagagactttttccacagtagcgctcttttcatctgtggacattgtacatatgtttgccagtagggccagaaaatctatggttatgtgataataggctgccttctgcggggcttgccttctggccatgcccttcttctctcccttgcacctgtacctcttggtctttgaataaagcctgagtaggaaggaccggtaaaaaaaaaaaaaaaaaaaaaaaaaaaaaaacgttgactaaaaaaaaaaaaaaaaaaaaaaaaaaaaaaaaaaaaaaaaaaaaaaaaaaaaaaaaaaaaaaaaaaaaaa

SEQ ID NO: 11592 - DNA, 4564 bp, synthetic construct
  source 1..4564: mol_type = other DNA
ggtctagttacaactgggcatcgctgcagagatcgcacctcctcgtggtcccgctggtagcccttcgaagggtgactaagtcgatctctgccccaggtacggagccgttgggactcaccagtccaacgtaactcctgcctaaattcggtgaaacaaattcctcggtaaaaagccccatggcttcttgcccgaaacctggccccccggtttcagcaggggcaatgagtttggaaagtggactgaccacccactccgttctcgccatcgaacgtggtcccaattcgttggcaaattccggatcagactttgggggggggggtctggggctaccgttacgcctattgagggtatcggtcggcactcagacctcccgctccgactgggtagacctggtgtcctggagccacccaggacccacgtctaagtcccagcaggttgacctggtgtctttatttcctaaacaccgggttgacctgttatccaaaaacgaccaggtagacctggtggctcaatttttaccatctaaatttccccccaatttggcagaaaatgatttggctttgctggtgaacttagagttctacagatcggatttgcatgtgtatgagtgtgttcattttgctgcacattgggagggattaagtggtttgcctgaggtgtatgaacaacttgcaccacaaccgtgtgtgggagaaactttacattctagcctcccacgagacagtgaactgtttgtgcctgaagaggggagcagcgagaaggagagcgaggacgcgccaaaaacatctcctccgacgcctgggaaacatggtttggaacagactggggaggaaaaagtgatggtgactgttcctgacaaaaatccaccttgtccttgctgtggtacccgggtaaactctgtgttgaatctgattgaacatctgaaagtgtcacacgggaaaaggggggtttgttttcggtgtgcaaaatgtggaaaggaaaatagtaactatcacagtgttgtttgtcattttccaaaatgcaggggtccagagacggagaaagccccagctggggagtggatttgtgaggtatgcaacagagattttacaaccaaaattggcctgggacaacacaagagattggcacacccagcagtgagaaatcaggaaaggatcgttgcttcccaaccgaaagaaacatcaaatagaggtgctcacaaaaggtgctggacaaaggaggaggaagaattactaataagactggaggctcagttcgagggaaacaaaaatattaataagcttattgcagaacacataaccaccaaaacagctaagcagatcagtgacaaaaggcgattgctgtccagaaagccagcagaggagccacgtgaggagcctggaacgtgtcatcacaccaggagagcagctgcgagcctgagaacggagcctgagatgagtcatcacgcccaggcagaggacagagataatggacctgggagacgccctctgccaggcagggcagctgccggagggagaacaatggacgagataagacgccaccctgataagggcaacggacagcagagacccaccaagcaaaaatcagaagaacagctgcaggcttactataaaaagacactagaggaacgactttcagctggggcacttaacaccttcccccgagcattcaagcaggtaatggaaggccgggatataaagctagtaatcaatcagacagcgcaggactgcttcggatgcctggaatccataagccaaataagaacggcaacccgagataaaaagtacacggtgacccgggagaaacacccaaagaaaccttttcagaagtggatgaaggacagagcaatcaaaaaaggtaattatcttcggttccagcgtttattttatcttgatagagggaaactggctaaaatcattttagatgatattgaatgcttgtcttgtgacataccactcagtgaaatttattcggtttttaaaacaagatgggaaacaactggtagctttaaaagccttggggactttaaaacttacgggaaggctgacaacactgccttcagagaattaattacggctaaagaaattgagaaaaatgtgcaggaaatgagcaaaggctcggctcccggtccagacgggattactcttggggacgtcgtaaagatggatcccgagttttccctgaccatggagattttcaatttatggttaacaactggtaaaatcccggacatggtgagggggtgcagaaccgttttgattccaaaatcatcaaagccggatcgtttgaaagacattaataactggagacctatcacgatcggttccatcttgctgagactgttctccaggattgtaacagctaggctgagcaaagcgtgccccctgaacccaaggcaaagaggctttatcagagcggcgggatgctctgaaaacttaaaactcctgcaaactataatttggtcggccaaaagagaacacagaccactgggtgttgtattcgtggacatcgccaaggcttttgacaccgtaagccaccagcacatcattcatgctttgcagcaaagagaggtggatccccacatcgtcggtctggtgagcaatatgtacgagaacatcagtacgtatatcaccacaaagaggaacacacacacagacaaaatccagatccgggttggagtaaagcagggtgacccgatgtcgccccttttatttaacctggcaatggaccctctattatgcaagctggaagagagtggcaaaggataccaccgaggacagagcagcatcacagcgatggcatttgcagacgatctggttttgctgagcgactcctgggaaaatatgaatacaaatattagcatactggagaccttctgcaatctgaccggactcaaaacacaggggcaaaagtgccacggcttttacatcaagccgacaaaggactcttacaccatcaatgactgcgctgcctggactatcaacggcacacccctgaacatgatcgaccccggcgaatctgagaaatacctcggcctgcagtttgacccgtggattggaatagcaaggtccggtctctccacaaaactagatttttggcttcagcggatcgatcaagcaccacttaaacctctgcagaaaactgatattctcaaaacatacaccatccctcggctgatctacatagctgaccactcagaagtgaaagccgcactactcgaaacccttgaccagaagatccggacagcggtcaaggaatggcttcacctacctccgtgcacctgcgatgccatcctgtactcgagcacgagagacggcggtttgggcatcaccaaattggcaggactgatccccagcgtgcaggcccgtagactgcatcggatcgcacagtcatctgacgatacgatgaaatgcttcatggaaaaagagaaaatggaacagctgcataagaaattgtggattcaagctggaggggacagagagaacataccctcgatttgggaagcaccaccgtcgagtgaaccaccaaacaacgtgagcacaaattcggaatgggaagcaccgacccagaaacccaaatttccaaagccttgcaattggaggaaaaacgaattcaaaaaatggaccaaattggcatcccaaggccgcggaattgtaaattttgaaagagacaaaattagtaaccattggatccaatactacagacgcatacctcacaggaaactcctcactgcactacaactcagggccaacgtttaccccacgagagaatttctagccaggggtagacaagaccaatacatcaaggcgtgtaggcactgcgatgcggacattgaatcctgcgcccacatcatcggcaactgcccagtgacacaggacgcccgaatcaagaggcacaattacatctgcgaactgcttctcgaggaggcgaagaagaaggactgggtagtgttcaaggaaccgcacataagggattccaacaaggaactgtacaaacctgacctgatatttgtgaaggatgcccgtgcacttgtcgtggatgtgacagtacggtatgaagcagccaaatcatcgctggaggaagccgctgcagagaaagtgagaaagtacaaacacctggaaacggaagtaagacatctcacgaatgcaaaggacgttacttttgtgggctttcccctaggagcgcgggggaaatggcaccaagataactttaaacttttgactgagcttggcctctccaaatcgaggcaagtgaaaatggcagagactttttccacagtagcgctcttttcatctgtggacattgtacatatgtttgccagtagggccagaaaatctatggttatgtgataataggctgccttctgcggggcttgccttctggccatgcccttcttctctcccttgcacctgtacctcttggtctttgaataaagcctgagtaggaaggaccggtaaaaaaaaaaaaaaaaaaaaaaaaaaaaaaacgttgactaaaaaaaaaaaaaaaaaaaaaaaaaaaaaaaaaaaaaaaaaaaaaaaaaaaaaaaaaaaaaaaaaaaaaa

SEQ ID NO: 11593 - DNA, 4564 bp, synthetic construct
  source 1..4564: mol_type = other DNA
ggtctagttacaactgggcatcgctgcagagatcgcacctcctcgtggtcccgctggtagcccttcgaagggtgactaagtcgatctctgccccaggtacggagccgttgggactcaccagtccaacgtaactcctgcctaaattcggtgaaacaaattcctcggtaaaaagccccatggcttcttgcccgaaacctggccccccggtttcagcaggggcaatgagtttggaaagtggactgaccacccactccgttctcgccatcgaacgtggtcccaattcgttggcaaattccggatcagactttgggggggggggtctggggctaccgttacgcctattgagggtatcggtcggcactcagacctcccgctccgactgggtagacctggtgtcctggagccacccaggacccacgtctaagtcccagcaggttgacctggtgtctttatttcctaaacaccgggttgacctgttatccaaaaacgaccaggtagacctggtggctcaatttttaccatctaaatttccccccaatttggcagaaaatgatttggctttgctggtgaacttagagttctacagatcggatttgcatgtgtatgagtgtgttcattttgctgcacattgggagggattaagtggtttgcctgaggtgtatgaacaacttgcaccacaaccgtgtgtgggagaaactttacattctagcctcccacgagacagtgaactgtttgtgcctgaagaggggagcagcgagaaggagagcgaggacgcgccaaaaacatctcctccgacgcctgggaaacatggtttggaacagactggggaggaaaaagtgatggtgactgttcctgacaaaaatccaccttgtccttgctgtggtacccgggtaaactctgtgttgaatctgattgaacatctgaaagtgtcacacgggaaaaggggggtttgttttcggtgtgcaaaatgtggaaaggaaaatagtaactatcacagtgttgtttgtcattttaagaaatgcaggggtccagagacggagaaagccccagctggggagtggatttgtgaggtatgcaacagagattttacaaccaaaattggcctgggacaacacaagagattggcacacccagcagtgagaaatcaggaaaggatcgttgcttcccaaccgaaagaaacatcaaatagaggtgctcacaaaaggtgctggacaaaggaggaggaagaattactaataagactggaggctcagttcgagggaaacaaaaatattaataagcttattgcagaacacataaccaccaaaacagctaagcagatcagtgacaaaaggcgattgctgtccagaaagccagcagaggagccacgtgaggagcctggaacgtgtcatcacaccaggagagcagctgcgagcctgagaacggagcctgagatgagtcatcacgcccaggcagaggacagagataatggacctgggagacgccctctgccaggcagggcagctgccggagggagaacaatggacgagataagacgccaccctgataagggcaacggacagcagagacccaccaagcaaaaatcagaagaacagctgcaggcttactataaaaagacactagaggaacgactttcagctggggcacttaacaccttcccccgagcattcaagcaggtaatggaaggccgggatataaagctagtaatcaatcagacagcgcaggactgcttcggatgcctggaatccataagccaaataagaacggcaacccgagataaaaaggacacggtgacccgggagaaacacccaaagaaaccttttcagaagtggatgaagaagagagcaatcaaaaaaggtaattatcttcggttccagcgtttattttatcttgatagagggaaactggctaaaatcattttagatgatattgaatgcttgtcttgtgacataccactcagtgaaatttattcggtttttaaaacaagatgggaaacaactggtagctttaaaagccttggggactttaaaacttacgggaaggctgacaacactgccttcagagaattaattacggctaaagaaattgagaaaaatgtgcaggaaatgagcaaaggctcggctcccggtccagacgggattactcttggggacgtcgtaaagatggatcccgagttttcccggaccatggagattttcaatttatggttaacaactggtaaaatcccggacatggtgagggggtgcagaaccgttttgattccaaaatcatcaaagccggatcgtttgaaagacattaataactggagacctatcacgatcggttccatcttgctgagactgttctccaggattgtaacagctaggctgagcaaagcgtgccccctgaacccaaggcaaagaggctttatcagagcggcgggatgctctgaaaacttaaaactcctgcaaactataatttggtcggccaaaagagaacacagaccactgggtgttgtattcgtggacatcgccaaggcttttgacaccgtaagccaccagcacatcattcatgctttgcagcaaagagaggtggatccccacatcgtcggtctggtgagcaatatgtacgagaacatcagtacgtatatcaccacaaagaggaacacacacacagacaaaatccagatccgggttggagtaaagcagggtgacccgatgtcgccccttttatttaacctggcaatggaccctctattatgcaagctggaagagagtggcaaaggataccaccgaggacagagcagcatcacagcgatggcatttgcagacgatctggttttgctgagcgactcctgggaaaatatgaatacaaatattagcatactggagaccttctgcaatctgaccggactcaaaacacaggggcaaaagtgccacggcttttacatcaagccgacaaaggactcttacaccatcaatgactgcgctgcctggactatcaacggcacacccctgaacatgatcgaccccggcgaatctgagaaatacctcggcctgcagtttgacccgtggattggaatagcaaggtccggtctctccacaaaactagatttttggcttcagcggatcgatcaagcaccacttaaacctctgcagaaaactgatattctcaaaacatacaccatccctcggctgatctacatagctgaccactcagaagtgaaaactgcactactcgaaacccttgaccagaagatccggacagcggtcaaggaatggcttcacctacctccgtgcacctgcgatgccatcctgtactcgagcacgagagacggcggtttgggcatcaccaaattggcaggactgatccccagcgtgcaggcccgtagactgcatcggatcgcacagtcatctgacgatacgatgaaatgcttcatggaaaaagagaaaatggaacagctgcataagaaattgtggattcaagctggaggggacagagagaacataccctcgatttgggaagcaccaccgtcgagtgaaccaccaaacaacgtgagcacaaattcggaatgggaagcaccgacccagaaacccaaatttccaaagccttgcaattggaggaaaaacgaattcaaaaaatggaccaaattggcatcccaaggccgcggaattgtaaattttgaaagagacaaaattagtaaccattggatccaatactacagacgcatacctcacaggaaactcctcactgcactacaactcagggccaacgtttaccccacgagagaatttctagccaggggtagacaagaccaatacatcaaggcgtgtaggcactgcgatgcggacattgaatcctgcgcccacatcatcggcaactgcccagtgacacaggacgcccgaatcaagaggcacaattacatctgcgaactgcttctcgaggaggcgaagaagaaggactgggtagtgttcaaggaaccgcacataagggattccaacaaggaactgtacaaacctgacctgatatttgtgaaggatgcccgtgcacttgtcgtggatgtgacagtacggtatgaagcagccaaatcatcgctggaggaagccgctgcagagaaagtgagaaagtacaaacacctggaaacggaagtaagacatctcacgaatgcaaaggacgttacttttgtgggctttcccctaggagcgcgggggaaatggcaccaagataactttaaacttttgactgagcttggcctctccaaatcgaggcaagtgaaaatggcagagactttttccacagtagcgctcttttcatctgtggacattgtacatatgtttgccagtagggccagaaaatctatggttatgtgataataggctgccttctgcggggcttgccttctggccatgcccttcttctctcccttgcacctgtacctcttggtctttgaataaagcctgagtaggaaggaccggtaaaaaaaaaaaaaaaaaaaaaaaaaaaaaaacgttgactaaaaaaaaaaaaaaaaaaaaaaaaaaaaaaaaaaaaaaaaaaaaaaaaaaaaaaaaaaaaaaaaaaaaaa

SEQ ID NO: 11594 - DNA, 4564 bp, synthetic construct
  source 1..4564: mol_type = other DNA
ggtctagttacaactgggcatcgctgcagagatcgcacctcctcgtggtcccgctggtagcccttcgaagggtgactaagtcgatctctgccccaggtacggagccgttgggactcaccagtccaacgtaactcctgcctaaattcggtgaaacaaattcctcggtaaaaagccccatggcttcttgcccgaaacctggccccccggtttcagcaggggcaatgagtttggaaagtggactgaccacccactccgttctcgccatcgaacgtggtcccaattcgttggcaaattccggatcagactttgggggggggggtctggggctaccgttacgcctattgagggtatcggtcggcactcagacctcccgctccgactgggtagacctggtgtcctggagccacccaggacccacgtctaagtcccagcaggttgacctggtgtctttatttcctaaacaccgggttgacctgttatccaaaaacgaccaggtagacctggtggctcaatttttaccatctaaatttccccccaatttggcagaaaatgatttggctttgctggtgaacttagagttctacagatcggatttgcatgtgtatgagtgtgttcattttgctgcacattgggagggattaagtggtttgcctgaggtgtatgaacaacttgcaccacaaccgtgtgtgggagaaactttacattctagcctcccacgagacagtgaactgtttgtgcctgaagaggggagcagcgagaaggagagcgaggacgcgccaaaaacatctcctccgacgcctgggaaacatggtttggaacagactggggaggaaaaagtgatggtgactgttcctgacaaaaatccaccttgtccttgctgtggtacccgggtaaactctgtgttgaatctgattgaacatctgaaagtgtcacacgggaaaaggggggtttgttttcggtgtgcaaaatgtggaaaggaaaatagtaactatcacagtgttgtttgtcattttaagaaatgcaggggtccagagacggagaaagccccagctggggagtggatttgtgaggtatgcaacagagattttacaaccaaaattggcctgggacaacacaagagattggcacacccagcagtgagaaatcaggaaaggatcgttgcttcccaaccgaaagaaacatcaaatagaggtgctcacaaaaggtgctggacaaaggaggaggaagaattactaataagactggaggctcagttcgagggaaacaaaaatattaataagcttattgcagaacacataaccaccaaaacagctaagcagatcagtgacaaaaggcgattgctgtccagaaagccagcagaggagccacgtgaggagcctggaacgtgtcatcacaccaggagagcagctgcgagcctgagaacggagcctgagatgagtcatcacgcccaggcagaggacagagataatggacctgggagacgccctctgccaggcagggcagctgccggagggagaacaatggacgagataagacgccaccctgataagggcaacggacagcagagacccaccaagcaaaaatcagaagaacagctgcaggcttactataaaaagacactagaggaacgactttcagctggggcacttaacaccttcccccgagcattcaagcaggtaatggaaggccgggatataaagctagtaatcaatcagacagcgcaggactgcttcggatgcctggaatccataagccaaataagaacggcaacccgagataaaaagtacacggtgacccgggagaaacacccaaagaaaccttttcagaagtggatgaagaagagagcaatcaaaaaaggtaattatcttcggttccagcgtttattttatcttgatagagggaaactggctaaaatcattttagatgatattgaatgcttgtcttgtgacataccactcagtgaaatttattcggtttttaaaacaagatgggaaacaactggtagctttaaaagccttggggactttaaaacttacgggaaggctgacaacactgccttcagagaattaattacggctaaagaaattgagaaaaatgtgcaggaaatgagcaaaggctcggctcccggtccagacgggattactcttggggacgtcgtaaagatggatcccgagttttccctgaccatggagattttcaatttatggttaacaactggtaaaatcccggacatggtgagggggtgcagaaccgttttgattccaaaatcatcaaagccggatcgtttgaaagacattaataactggagacctatcacgatcggttccatcttgctgagactgttctccaggattgtaacagctaggctgagcaaagcgtgccccctgaacccaaggcaaagaggctttatcagagcggcgggatgctctgaaaacttaaaactcctgcaaactataatttggtcggccaaaagagaacacagaccactgggtgttgtattcgtggacatcgccaaggcttttgacaccgtaagccaccagcacatcattcatgctttgcagcaaagagaggtggatccccacatcgtcggtctggtgagcaatatgtacgagaacatcagtacgtatatcaccacaaagaggaacacacacacagacaaaatccagatccgggttggagtaaagcagggtgacccgatgtcgccccttttatttaacctggcaatggaccctctattatgcaagctggaagagagtggcaaaggataccaccgaggacagagcagcatcacagcgatggcatttgcagacgatctggttttgctgagcgactcctgggaaaatatgaatacaaatattagcatactggagaccttctgcaatctgaccggactcaaaacacaggggcaaaagtgccacggcttttacatcaagccgacaaaggactcttacaccatcaatgactgcgctgcctggactatcaacggcacacccctgaacatgatcgaccccggcgaatctgagaaatacctcggcctgcagtttgacccgtggattggaatagcaaggtccggtctctccacaaaactagatttttggcttcagcggatcgatcaagcaccacttaaacctctgcagaaaactgatattctcaaaacatacaccatccctcggctgatctacatagctgaccactcagaagtgaaaactgcactactcgaaacccttgaccagaagatccggacagcggtcaaggaatggcttcacctacctccgtgcacctgcgatgccatcctgtactcgagcacgagagacggcggtttgggcatcaccaaattggcaggactgatccccagcgtgcaggcccgtagactgcatcggatcgcacagtcatctgacgatacgatgaaatgcttcatggaaaaagagaaaatggaacagctgcataagaaattgtggattcaagctggaggggacagagagaacataccctcgatttgggaagcaccaccgtcgagtgaaccaccaaacaacgtgagcacaaattcggaatgggaagcaccgacccagaaacccaaatttccaaagccttgcaattggaggaaaaacgaattcaaaaaatggaccaaattggcatcccaaggccgcggaattgtaaattttgaaagagacaaaattagtaaccattggatccaatactacagacgcatacctcacaggaaactcctcactgcactacaactcagggccaacgtttaccccacgagagaatttctagccaggggtagacaagaccaatacatcaaggcgtgtaggcactgcgatgcggacattgaatcctgcgcccacatcatcggcaactgcccagtgacacaggacgcccgaatcaagaggcacaattacatctgcgaactgcttctcgaggaggcgaagaagaaggactgggtagtgttcaaggaaccgcacataagggattccaacaaggaactgtacaaacctgacctgatatttgtgaaggatgcccgtgcacttgtcgtggatgtgacagtacggtatgaagcagccaaatcatcgctggaggaagccgctgcagagaaagtgagaaagtacaaacacctggaaacggaagtaagacatctcacgaatgcaaaggacgttacttttgtgggctttcccctaggagcgcgggggaaatggcaccaagataactttaaacttttgactgagcttggcctctccaaatcgaggcaagtgaaaatggcagagactttttccacagtagcgctcttttcatctgtggacattgtacatatgtttgccagtagggccagaaaatctatggttatgtgataataggctgccttctgcggggcttgccttctggccatgcccttcttctctcccttgcacctgtacctcttggtctttgaataaagcctgagtaggaaggaccggtaaaaaaaaaaaaaaaaaaaaaaaaaaaaaaacgttgactaaaaaaaaaaaaaaaaaaaaaaaaaaaaaaaaaaaaaaaaaaaaaaaaaaaaaaaaaaaaaaaaaaaaaa

SEQ ID NO: 11595 - DNA, 5407 bp, synthetic construct
  source 1..5407: mol_type = other DNA
ggtctagttacaactgggcatcgctgcagagatcgcacctcctcgtggtcccgctggtagcccttcgaagggtgactaagtcgatctctgccccaggtacggagccgttgggactcaccagtccaacgtaactcctgcctaaattcggtgaaacaaattcctcggtaaaaagccccatgggaactgcactaacaccgctcctgacgaagttcgccacgcgctacgagatgggtaccacgcctgaagaagtggcgaacacgctcaagcagacctgtttcaagggccaggtcaatgattcgcagatggtcgccctgctgatcgtggcagaccagtacaagcttaaccccttcaccaaggagttgtacgcattccccgacaagaacaacggcatcgtgccggttgttggtgtggatggctgggctcggatcatcaacgagaacccacagttcgatggcatggaattctcaatggaccagcagggaaccgaatgcacctgcaagatctatcggaaggaccgcagccatgccatcagcgcgactgagtacatggccgagtgcaagcggaacacccagccttggcagtcccatccgcgccggatgcttcgccacaaggcaatgatccagtgcgcacgcctcgcgttcgggttcgccggcatatacgaccaggacgaggccgagcggatcgttgaacgagacgtcactcccgcagagcagtacgaggacgtcagcgaggcgatctgcctgatcaaggactccccaacaatggaggacttgcaggcagcattcagcaatgcctggaaagcctataagacaaagggcgcgcgcgaccagcttacggcggccaaggaccagcggaagaaagaattgctggacgcccctatagacgttgaattcgaggagaccggcgatgatcgagcagcgtctggaggatctagcggaggatcctctggcagcgagacaccaggaacaagcgagtcagcaacaccagagagcagtggcggcagcagcggcggcagcagcatggcttcttgcccgaaacctggccccccggtttcagcaggggcaatgagtttggaaagtggactgaccacccactccgttctcgccatcgaacgtggtcccaattcgttggcaaattccggatcagactttgggggggggggtctggggctaccgttacgcctattgagggtatcggtcggcactcagacctcccgctccgactgggtagacctggtgtcctggagccacccaggacccacgtctaagtcccagcaggttgacctggtgtctttatttcctaaacaccgggttgacctgttatccaaaaacgaccaggtagacctggtggctcaatttttaccatctaaatttccccccaatttggcagaaaatgatttggctttgctggtgaacttagagttctacagatcggatttgcatgtgtatgagtgtgttcattttgctgcacattgggagggattaagtggtttgcctgaggtgtatgaacaacttgcaccacaaccgtgtgtgggagaaactttacattctagcctcccacgagacagtgaactgtttgtgcctgaagaggggagcagcgagaaggagagcgaggacgcgccaaaaacatctcctccgacgcctgggaaacatggtttggaacagactggggaggaaaaagtgatggtgactgttcctgacaaaaatccaccttgtccttgctgtggtacccgggtaaactctgtgttgaatctgattgaacatctgaaagtgtcacacgggaaaaggggggtttgttttcggtgtgcaaaatgtggaaaggaaaatagtaactatcacagtgttgtttgtcattttccaaaatgcaggggtccagagacggagaaagccccagctggggagtggatttgtgaggtatgcaacagagattttacaaccaaaattggcctgggacaacacaagagattggcacacccagcagtgagaaatcaggaaaggatcgttgcttcccaaccgaaagaaacatcaaatagaggtgctcacaaaaggtgctggacaaaggaggaggaagaattactaataagactggaggctcagttcgagggaaacaaaaatattaataagcttattgcagaacacataaccaccaaaacagctaagcagatcagtgacaaaaggcgattgctgtccagaaagccagcagaggagccacgtgaggagcctggaacgtgtcatcacaccaggagagcagctgcgagcctgagaacggagcctgagatgagtcatcacgcccaggcagaggacagagataatggacctgggagacgccctctgccaggcagggcagctgccggagggagaacaatggacgagataagacgccaccctgataagggcaacggacagcagagacccaccaagcaaaaatcagaagaacagctgcaggcttactataaaaagacactagaggaacgactttcagctggggcacttaacaccttcccccgagcattcaagcaggtaatggaaggccgggatataaagctagtaatcaatcagacagcgcaggactgcttcggatgcctggaatccataagccaaataagaacggcaacccgagataaaaaggacacggtgacccgggagaaacacccaaagaaaccttttcagaagtggatgaaggacagagcaatcaaaaaaggtaattatcttcggttccagcgtttattttatcttgatagagggaaactggctaaaatcattttagatgatattgaatgcttgtcttgtgacataccactcagtgaaatttattcggtttttaaaacaagatgggaaacaactggtagctttaaaagccttggggactttaaaacttacgggaaggctgacaacactgccttcagagaattaattacggctaaagaaattgagaaaaatgtgcaggaaatgagcaaaggctcggctcccggtccagacgggattactcttggggacgtcgtaaagatggatcccgagttttcccggaccatggagattttcaatttatggttaacaactggtaaaatcccggacatggtgagggggtgcagaaccgttttgattccaaaatcatcaaagccggatcgtttgaaagacattaataactggagacctatcacgatcggttccatcttgctgagactgttctccaggattgtaacagctaggctgagcaaagcgtgccccctgaacccaaggcaaagaggctttatcagagcggcgggatgctctgaaaacttaaaactcctgcaaactataatttggtcggccaaaagagaacacagaccactgggtgttgtattcgtggacatcgccaaggcttttgacaccgtaagccaccagcacatcattcatgctttgcagcaaagagaggtggatccccacatcgtcggtctggtgagcaatatgtacgagaacatcagtacgtatatcaccacaaagaggaacacacacacagacaaaatccagatccgggttggagtaaagcagggtgacccgatgtcgccccttttatttaacctggcaatggaccctctattatgcaagctggaagagagtggcaaaggataccaccgaggacagagcagcatcacagcgatggcatttgcagacgatctggttttgctgagcgactcctgggaaaatatgaatacaaatattagcatactggagaccttctgcaatctgaccggactcaaaacacaggggcaaaagtgccacggcttttacatcaagccgacaaaggactcttacaccatcaatgactgcgctgcctggactatcaacggcacacccctgaacatgatcgaccccggcgaatctgagaaatacctcggcctgcagtttgacccgtggattggaatagcaaggtccggtctctccacaaaactagatttttggcttcagcggatcgatcaagcaccacttaaacctctgcagaaaactgatattctcaaaacatacaccatccctcggctgatctacatagctgaccactcagaagtgaaaactgcactactcgaaacccttgaccagaagatccggacagcggtcaaggaatggcttcacctacctccgtgcacctgcgatgccatcctgtactcgagcacgagagacggcggtttgggcatcaccaaattggcaggactgatccccagcgtgcaggcccgtagactgcatcggatcgcacagtcatctgacgatacgatgaaatgcttcatggaaaaagagaaaatggaacagctgcataagaaattgtggattcaagctggaggggacagagagaacataccctcgatttgggaagcaccaccgtcgagtgaaccaccaaacaacgtgagcacaaattcggaatgggaagcaccgacccagaaagataaatttccaaagccttgcaattggaggaaaaacgaattcaaaaaatggaccaaattggcatcccaaggccgcggaattgtaaattttgaaagagacaaaattagtaaccattggatccaatactacagacgcatacctcacaggaaactcctcactgcactacaactcagggccaacgtttaccccacgagagaatttctagccaggggtagacaagaccaatacatcaaggcgtgtaggcactgcgatgcggacattgaatcctgcgcccacatcatcggcaactgcccagtgacacaggacgcccgaatcaagaggcacaattacatctgcgaactgcttctcgaggaggcgaagaagaaggactgggtagtgttcaaggaaccgcacataagggattccaacaaggaactgtacaaacctgacctgatatttgtgaaggatgcccgtgcacttgtcgtggatgtgacagtacggtatgaagcagccaaatcatcgctggaggaagccgctgcagagaaagtgagaaagtacaaacacctggaaacggaagtaagacatctcacgaatgcaaaggacgttacttttgtgggctttcccctaggagcgcgggggaaatggcaccaagataactttaaacttttgactgagcttggcctctccaaatcgaggcaagtgaaaatggcagagactttttccacagtagcgctcttttcatctgtggacattgtacatatgtttgccagtagggccagaaaatctatggttatgtgataataggctgccttctgcggggcttgccttctggccatgcccttcttctctcccttgcacctgtacctcttggtctttgaataaagcctgagtaggaaggaccggtaaaaaaaaaaaaaaaaaaaaaaaaaaaaaaacgttgactaaaaaaaaaaaaaaaaaaaaaaaaaaaaaaaaaaaaaaaaaaaaaaaaaaaaaaaaaaaaaaaaaaaaaa

SEQ ID NO: 11596 - DNA, 4439 bp, synthetic construct
  source 1..4439: mol_type = other DNA
gaaataagagagaaaagaagagtaagaagaaatataagagaattcgccaccatggcttcttgcccgaaacctggccccccggtttcagcaggggcaatgagtttggaaagtggactgaccacccactccgttctcgccatcgaacgtggtcccaattcgttggcaaattccggatcagactttgggggggggggtctggggctaccgttacgcctattgagggtatcggtcggcactcagacctcccgctccgactgggtagacctggtgtcctggagccacccaggacccacgtctaagtcccagcaggttgacctggtgtctttatttcctaaacaccgggttgacctgttatccaaaaacgaccaggtagacctggtggctcaatttttaccatctaaatttccccccaatttggcagaaaatgatttggctttgctggtgaacttagagttctacagatcggatttgcatgtgtatgagtgtgttcataaggctgcacattgggagggattaagtggtttgcctgaggtgtatgaacaacttgcaccacaaccgtgtgtgggagaaactttacattctagcctcccacgagacagtgaactgtttgtgcctgaagaggggagcagcgagaaggagagcgaggacgcgccaaaaacatctcctccgacgcctgggaaacatggtttgaggcagactggggaggaaaaagtgatggtgactgttcctgacaaaaatccaccttgtccttgctgtggtacccgggtaaactctgtgttgaatctgattgaacatctgaaagtgtcacacgggaaaaggggggtttgttttcggtgtgcaaaatgtggaaaggaaaatagtaactatcacagtgttgtttgtcattttaagaaatgcaggggtccagagacggagaaagccccagctggggagtggatttgtgaggtatgcaacagagattttacaaccaaaattggcctgggacaacacaagagattggcacacccagcagtgagaaatcaggaaaggatcgttgcttcccaaccgaaagaaacatcaaatagaggtgctcacaaaaggtgctggacaaaggaggaggaagaattactaataagactggaggctcagttcgagggaaacaaaaatattaataagcttattgcagaacacataaccaccaaaacagctaagcagatcagtgacaaaaggcgattgctgtccagaaagccagcagaggagccacgtgaggagcctggaacgtgtcatcacaccaggagagcagctgcgagcctgagaacggagcctgagatgagtcatcacgcccaggcagaggacagagataatggacctgggagacgccctctgccaggcagggcagctgccggagggagaacaatggacgagataagacgccaccctgataagggcaacggacagcagagacccaccaagcaaaaatcagaagaacagctgcaggcttactataaaaagacactagaggaacgactttcagctggggcacttaacaccttcccccgagcattcaagcaggtaatggaaggccgggatataaagctagtaatcaatcagacagcgcaggactgcttcggatgcctggaatccataagccaaataagaacggcaacccgagataaaaaggacacggtgacccgggagaaacacccaaagaaaccttttcagaagtggatgaagaagagagcaatcaaaaaaggtaattatcttcggttccagcgtttattttatcttgatagagggaaactggctaaaatcattttagatgatattgaatgcttgtcttgtgacataccactcagtgaaatttattcggtttttaaaacaagatgggaaacaactggtagctttaaaagccttggggactttaaaacttacgggaaggctgacaacactgccttcagagaattaattacggctaaagaaattgagaaaaatgtgcaggaaatgagcaaaggctcggctcccggtccagacgggattactcttggggacgtcgtaaagatggatcccgagttttcccggaccatggagattttcaatttatggttaacaactggtaaaatcccggacatggtgagggggtgcagaaccgttttgattccaaaatcatcaaagccggatcgtttgaaagacattaataactggagacctatcacgatcggttccatcttgctgagactgttctccaggattgtaacagctaggctgagcaaagcgtgccccctgaacccaaggcaaagaggctttatcagagcggcgggatgctctgaaaacttaaaactcctgcaaactataatttggtcggccaaaagagaacacagaccactgggtgttgtattcgtggacatcgccaaggcttttgacaccgtaagccaccagcacatcattcatgctttgcagcaaagagaggtggatccccacatcgtcggtctggtgagcaatatgtacgagaacatcagtacgtatatcaccacaaagaggaacacacacacagacaaaatccagatccgggttggagtaaagcagggtgacccgatgtcgccccttttatttaacctggcaatggaccctctattatgcaagctggaagagagtggcaaaggataccaccgaggacagagcagcatcacagcgatggcatttgcagacgatctggttttgctgagcgactcctgggaaaatatgaatacaaatattagcatactggagaccttctgcaatctgaccggactcaaaacacaggggcaaaagtgccacggcttttacatcaagccgacaaaggactcttacaccatcaatgactgcgctgcctggactatcaacggcacacccctgaacatgatcgaccccggcgaatctgagaaatacctcggcctgcagtttgacccgtggattggaatagcaaggtccggtctctccacaaaactagatttttggcttcagcggatcgatcaagcaccacttaaacctctgcagaaaactgatattctcaaaacatacaccatccctcggctgatctacatagctgaccactcagaagtgaaaagcgcactactcgaaacccttgaccagaagatccggacagcggtcaaggaatggcttcacctacctccgtgcacctgcgatgccatcctgtactcgagcacgagagacggcggtttgggcatcaccaaattggcaggactgatccccagcgtgcaggcccgtagactgcatcggatcgcacagtcatctgacgatacgatgaaatgcttcatggaaaaagagaaaatggaacagctgcataagaaattgtggattcaagctggaggggacagagagaacataccctcgatttgggaagcaccaccgtcgagtgaaccaccaaacaacgtgagcacaaattcggaatgggaagcaccgacccagaaagataaatttccaaagccttgcaattggaggaaaaacgaattcaaaaaatggaccaaattggcatcccaaggccgcggaattgtaaattttgaaagagacaaaattagtaaccattggatccaatactacagacgcatacctcacaggaaactcctcactgcactacaactcagggccaacgtttaccccacgagagaatttctagccaggggtagacaagaccaatacatcaaggcgtgtaggcactgcgatgcggacaacgaatcctgcgcccacatcatcggcaactgcccagtgacacaggacgcccgaatcaagaggcacaattacatctgcgaactgcttctcgaggaggcgaagaagaaggactgggtagtgttcaaggaaccgcacataagggattccaacaaggaactgtacaaacctgacctgatatttgtgaaggatgggcgtgcacttgtcgtggatgtgacagtacggtatgaagcagccaaatcatcgctggaggaagccgctgcagagaaagtgagaaagtacaaacacctggaaacggaagtaagacatctcacgaatgcaaaggacgttacttttgtgggctttcccctaggagcgcgggggaaatggcaccaagataactttaaacttttgactgagcttggcctctccaaatcgaggcaagtgaaaatggcagagactttttccacagtagcgctcttttcatctgtggacattgtacatatgtttgccagtagggccagaaaatctatggttatgtgataataggctgccttctgcggggcttgccttctggccatgcccttcttctctcccttgcacctgtacctcttggtctttgaataaagcctgagtaggaaggaccggtaaaaaaaaaaaaaaaaaaaaaaaaaaaaaaacgttgactaaaaaaaaaaaaaaaaaaaaaaaaaaaaaaaaaaaaaaaaaaaaaaaaaaaaaaaaaaaaaaaaaaaaaa

SEQ ID NO: 11597 - DNA, 4688 bp, synthetic construct
  source 1..4688: mol_type = other DNA
gaaataagagagaaaagaagagtaagaagaaatataagagaattcgccaccatggcttcttgcccgaaacctggccccccggtttcagcaggggcaatgagtttggaaagtggactgaccacccactccgttctcgccatcgaacgtggtcccaattcgttggcaaattccggatcagactttgggggggggggtctggggctaccgttacgcctattgagggtatcggtcggcactcagacctcccgctccgactgggtagacctggtgtcctggagccacccaggacccacgtctaagtcccagcaggttgacctggtgtctttatttcctaaacaccgggttgacctgttatccaaaaacgaccaggtagacctggtggctcaatttttaccatctaaatttccccccaatttggcagaaaatgatttggctttgctggtgaacttagagttctacagatcggatttgcatgtgtatgagtgtgttcataaggctgcacattgggagggattaagtggtttgcctgaggtgtatgaacaacttgcaccacaaccgtgtgtgggagaaactttacattctagcctcccacgagacagtgaactgtttgtgcctgaagaggggagcagcgagaaggagagcgaggacgcgccaaaaacatctcctccgacgcctgggaaacatggtttggaacagactggggaggaaaaagtgatggtgactgttcctgacaaaaatccaccttgtccttgctgtggtacccgggtaaactctgtgttgaatctgattgaacatctgaaagtgtcacacgggaaaaggggggtttgttttcggtgtgcaaaatgtggaaaggaaaatagtaactatcacagtgttgtttgtcattttaagaaatgcaggggtccagagacggagaaagccccagctggggagtggatttgtgaggtatgcaacagagattttacaaccaaaattggcctgggacaacacaagagattggcacacccagcagtgagaaatcaggaaaggatcgttgcttcccaaccgaaagaaacatcaaatagaggtgctcacaaaaggtgctggacaaaggaggaggaagaattactaataagactggaggctcagttcgagggaaacaaaaatattaataagcttattgcagaacacataaccaccaaaacagctaagcagatcagtgacaaaaggcgattgctgtccagaaagccagcagaggagccacgtgaggagcctggaacgtgtcatcacaccaggagagcagctgcgagcctgagaacggagcctgagatgagtcatcacgcccaggcagaggacagagataatggacctgggagacgccctctgccaggcagggcagctgccggagggagaacaatggacgagataagacgccaccctgataagggcaacggacagcagagacccaccaagcaaaaatcagaagaacagctgcaggcttactataaaaagacactagaggaacgactttcagctggggcacttaacaccttcccccgagcattcaagcaggtaatggaaggccgggatataaagctagtaatcaatcagacagcgcaggactgcttcggatgcctggaatccataagccaaataagaacggcaacccgagataaaaaggacacggtgacccgggagaaacacccaaagaaaccttttcagaagtggatgaagaagagagcaatcaaaaaaggtaattatcttcggttccagcgtttattttatcttgatagagggaaactggctaaaatcattttagatgatattgaatgcttgtcttgtgacataccactcagtgaaatttattcggtttttaaaacaagatgggaaacaactggtagctttaaaagccttggggactttaaaacttacgggaaggctgacaacactgccgacacttcaaacctcatggagcagatcctttcatctgacaacctcaacagggcttacttgcaagtggttcgcaacaaaggggctgagggcgtggacggaatgaagtacacggagttgaaggagcatctcgcgaagaacggagagacaataaagggacaactcagaactgctgcttataagcctcaaccggcgagacgggtagagatacccaagcccgacggtggcgtgaggaacctcggcgtccctacagtcacggaccgcttcatccaacaagccatcgctcaagtcctcactccaatctacgaggagcaattccacgaccattcctacgggttccggccaaaccggtgcgcccaacaagctatacttacagctttgaacataatgaacgacggaaacgactggattgtcgacatagatctcgagaagttcttcgacacagtcaatcatgacaagttgatgactctcatcgggcgcaccattgcagacggcgacgtaatctccattgttcgaaagtacctcgtgtccggaatcatgatagacgacgagtacgaggactcaatcgtgggaaccccacaaggcggcaacttgtctccccttcttgcaaacatcatgcttaacgagttggataaggaaatggaagctgcaggccttaacttcgtcaggtacgcagacgactgtatcatcatggtgggatctgagatgtctgccaaccgggtcatgaggaacatctcaagatttattgaggagaagttggggcttaaggtgaatatgacgaagtctaaggtggaccggcccagcggacttaagtatctcggattcggcttttacttcgaccccagagctcatcaattcaaggccaagcctcacgcgaagagtgtcgcgaagtttaagaagagaatgaaggagctcacgtgcaggagttggggcgtgtctaactcctacaaggtcgagaagctcaatcaattgatccgtggctggattaattactttaagatcgggagtatgaaaacactctgtaaggaacttgactcacgcatcagatacaggctccggatgtgcatctggaagcaatggaaaactccacaaaaccaggagaagaacttggtaaagctcgggatcgaccgcaacacggccaggcgggtggcgtacactggcaagcgaatcgcctacgtctgtaacaagggagctgtgaacgtcgcgataagtaacaagaggctcgcttcattccagtttgacccgtggattggaatagcaaggtccggtctctccacaaaactagatttttggcttcagcggatcgatcaagcaccacttaaacctctgcagaaaactgatattctcaaaacatacaccatccctcggctgatctacatagctgaccactcagaagtgaaaagcgcactactcgaaacccttgaccagaagatccggacagcggtcaaggaatggcttcacctacctccgtgcacctgcgatgccatcctgtactcgagcacgagagacggcggtttgggcatcaccaaattggcaggactgatccccagcgtgcaggcccgtagactgcatcggatcgcacagtcatctgacgatacgatgaaatgcttcatggaaaaagagaaaatggaacagctgcataagaaattgtggattcaagctggaggggacagagagaacataccctcgatttgggaagcaccaccgtcgagtgaaccaccaaacaacgtgagcacaaattcggaatgggaagcaccgacccagaaagataaatttccaaagccttgcaattggaggaaaaacgaattcaaaaaatggaccaaattggcatcccaaggccgcggaattgtaaattttgaaagagacaaaattagtaaccattggatccaatactacagacgcatacctcacaggaaactcctcactgcactacaactcagggccaacgtttaccccacgagagaatttctagccaggggtagacaagaccaatacatcaaggcgtgtaggcactgcgatgcggacaacgaatcctgcgcccacatcatcggcaactgcccagtgacacaggacgcccgaatcaagaggcacaattacatctgcgaactgcttctcgaggaggcgaagaagaaggactgggtagtgttcaaggaaccgcacataagggattccaacaaggaactgtacaaacctgacctgatatttgtgaaggatgggcgtgcacttgtcgtggatgtgacagtacggtatgaagcagccaaatcatcgctggaggaagccgctgcagagaaagtgagaaagtacaaacacctggaaacggaagtaagacatctcacgaatgcaaaggacgttacttttgtgggctttcccctaggagcgcgggggaaatggcaccaagataactttaaacttttgactgagcttggcctctccaaatcgaggcaagtgaaaatggcagagactttttccacagtagcgctcttttcatctgtggacattgtacatatgtttgccagtagggccagaaaatctatggttatgtgataataggctgccttctgcggggcttgccttctggccatgcccttcttctctcccttgcacctgtacctcttggtctttgaataaagcctgagtaggaaggaccggtaaaaaaaaaaaaaaaaaaaaaaaaaaaaaaacgttgactaaaaaaaaaaaaaaaaaaaaaaaaaaaaaaaaaaaaaaaaaaaaaaaaaaaaaaaaaaaaaaaaaaaaaa

SEQ ID NO: 11598 - DNA, 5399 bp, synthetic construct
  source 1..5399: mol_type = other DNA
gaaataagagagaaaagaagagtaagaagaaatataagagaattcgccaccatggcccctaagaaaaagcggaaggtgaatatcagcggctctagctgcggcagccccaacagcgccgacaccagcagcgacttcaaggacctgtggaccaagctgaaggaatgccacgaccgggaagtgcagggactccaggtgaaggtcaccaaactcaagcaagaaagaatcctggacgcccagagactggaagaattcttcaccaagaaccagcagctgagagagcagcagaaagtgctgcacgagacaatcaaggttctggaagatagactgcgggccggcctgtgcgacagatgcgccgtgaccgaggaacacatgcgcaaaaagcagcaggagttcgagaacattagacagcaaaatctgaaattgatcacagagctgatgaacgagagaaacacactgcaggaggagaacaagaagctgagcgagcagctgcaacagaagatcgagaatgatcagcaacaccaggccgctgagctggaatgtgaagaggacgtgatccccgacagcccaatcacagctttcagcttttctggcgtgaacagactgaggcggaaggaaaacccccacgtgcggtacatcgagcagacccataccaagctggaacacagcgtgtgtgccaacgagatgagaaaggtgtccaagtcctccacccatccccagcacaaccctaacgaaaatgagatcctggtggctgatacctacgaccagtctcagagccctatggccaaggcccacggcaccagctcttatacccctgataagagctccttcaacctggccaccgtggtggccgagacactgggcctgggcgtgcaggaggaaagcgagacacagggcccaatgagccctctgggagatgagctgtaccactgcctggaaggcaaccacaagaaacagccttttgagtccggctccgagactcctggaacaagcgagagcgctacacctgagggcagcgcttcttgcccgaaacctggccccccggtttcagcaggggcaatgagtttggaaagtggactgaccacccactccgttctcgccatcgaacgtggtcccaattcgttggcaaattccggatcagactttgggggggggggtctggggctaccgttacgcctattgagggtatcggtcggcactcagacctcccgctccgactgggtagacctggtgtcctggagccacccaggacccacgtctaagtcccagcaggttgacctggtgtctttatttcctaaacaccgggttgacctgttatccaaaaacgaccaggtagacctggtggctcaatttttaccatctaaatttccccccaatttggcagaaaatgatttggctttgctggtgaacttagagttctacagatcggatttgcatgtgtatgagtgtgttcataaggctgcacattgggagggattaagtggtttgcctgaggtgtatgaacaacttgcaccacaaccgtgtgtgggagaaactttacattctagcctcccacgagacagtgaactgtttgtgcctgaagaggggagcagcgagaaggagagcgaggacgcgccaaaaacatctcctccgacgcctgggaaacatggtttggaacagactggggaggaaaaagtgatggtgactgttcctgacaaaaatccaccttgtccttgctgtggtacccgggtaaactctgtgttgaatctgattgaacatctgaaagtgtcacacgggaaaaggggggtttgttttcggtgtgcaaaatgtggaaaggaaaatagtaactatcacagtgttgtttgtcattttaagaaatgcaggggtccagagacggagaaagccccagctggggagtggatttgtgaggtatgcaacagagattttacaaccaaaattggcctgggacaacacaagagattggcacacccagcagtgagaaatcaggaaaggatcgttgcttcccaaccgaaagaaacatcaaatagaggtgctcacaaaaggtgctggacaaaggaggaggaagaattactaataagactggaggctcagttcgagggaaacaaaaatattaataagcttattgcagaacacataaccaccaaaacagctaagcagatcagtgacaaaaggcgattgctgtccagaaagccagcagaggagccacgtgaggagcctggaacgtgtcatcacaccaggagagcagctgcgagcctgagaacggagcctgagatgagtcatcacgcccaggcagaggacagagataatggacctgggagacgccctctgccaggcagggcagctgccggagggagaacaatggacgagataagacgccaccctgataagggcaacggacagcagagacccaccaagcaaaaatcagaagaacagctgcaggcttactataaaaagacactagaggaacgactttcagctggggcacttaacaccttcccccgagcattcaagcaggtaatggaaggccgggatataaagctagtaatcaatcagacagcgcaggactgcttcggatgcctggaatccataagccaaataagaacggcaacccgagataaaaaggacacggtgacccgggagaaacacccaaagaaaccttttcagaagtggatgaagaagagagcaatcaaaaaaggtaattatcttcggttccagcgtttattttatcttgatagagggaaactggctaaaatcattttagatgatattgaatgcttgtcttgtgacataccactcagtgaaatttattcggtttttaaaacaagatgggaaacaactggtagctttaaaagccttggggactttaaaacttacgggaaggctgacaacactgccttcagagaattaattacggctaaagaaattgagaaaaatgtgcaggaaatgagcaaaggctcggctcccggtccagacgggattactcttggggacgtcgtaaagatggatcccgagttttcccggaccatggagattttcaatttatggttaacaactggtaaaatcccggacatggtgagggggtgcagaaccgttttgattccaaaatcatcaaagccggatcgtttgaaagacattaataactggagacctatcacgatcggttccatcttgctgagactgttctccaggattgtaacagctaggctgagcaaagcgtgccccctgaacccaaggcaaagaggctttatcagagcggcgggatgctctgaaaacttaaaactcctgcaaactataatttggtcggccaaaagagaacacagaccactgggtgttgtattcgtggacatcgccaaggcttttgacaccgtaagccaccagcacatcattcatgctttgcagcaaagagaggtggatccccacatcgtcggtctggtgagcaatatgtacgagaacatcagtacgtatatcaccacaaagaggaacacacacacagacaaaatccagatccgggttggagtaaagcagggtgacccgatgtcgccccttttatttaacctggcaatggaccctctattatgcaagctggaagagagtggcaaaggataccaccgaggacagagcagcatcacagcgatggcatttgcagacgatctggttttgctgagcgactcctgggaaaatatgaatacaaatattagcatactggagaccttctgcaatctgaccggactcaaaacacaggggcaaaagtgccacggcttttacatcaagccgacaaaggactcttacaccatcaatgactgcgctgcctggactatcaacggcacacccctgaacatgatcgaccccggcgaatctgagaaatacctcggcctgcagtttgacccgtggattggaatagcaaggtccggtctctccacaaaactagatttttggcttcagcggatcgatcaagcaccacttaaacctctgcagaaaactgatattctcaaaacatacaccatccctcggctgatctacatagctgaccactcagaagtgaaaagcgcactactcgaaacccttgaccagaagatccggacagcggtcaaggaatggcttcacctacctccgtgcacctgcgatgccatcctgtactcgagcacgagagacggcggtttgggcatcaccaaattggcaggactgatccccagcgtgcaggcccgtagactgcatcggatcgcacagtcatctgacgatacgatgaaatgcttcatggaaaaagagaaaatggaacagctgcataagaaattgtggattcaagctggaggggacagagagaacataccctcgatttgggaagcaccaccgtcgagtgaaccaccaaacaacgtgagcacaaattcggaatgggaagcaccgacccagaaagataaatttccaaagccttgcaattggaggaaaaacgaattcaaaaaatggaccaaattggcatcccaaggccgcggaattgtaaattttgaaagagacaaaattagtaaccattggatccaatactacagacgcatacctcacaggaaactcctcactgcactacaactcagggccaacgtttaccccacgagagaatttctagccaggggtagacaagaccaatacatcaaggcgtgtaggcactgcgatgcggacaacgaatcctgcgcccacatcatcggcaactgcccagtgacacaggacgcccgaatcaagaggcacaattacatctgcgaactgcttctcgaggaggcgaagaagaaggactgggtagtgttcaaggaaccgcacataagggattccaacaaggaactgtacaaacctgacctgatatttgtgaaggatgggcgtgcacttgtcgtggatgtgacagtacggtatgaagcagccaaatcatcgctggaggaagccgctgcagagaaagtgagaaagtacaaacacctggaaacggaagtaagacatctcacgaatgcaaaggacgttacttttgtgggctttcccctaggagcgcgggggaaatggcaccaagataactttaaacttttgactgagcttggcctctccaaatcgaggcaagtgaaaatggcagagactttttccacagtagcgctcttttcatctgtggacattgtacatatgtttgccagtagggccagaaaatctatggttatgtgataataggctgccttctgcggggcttgccttctggccatgcccttcttctctcccttgcacctgtacctcttggtctttgaataaagcctgagtaggaaggaccggtaaaaaaaaaaaaaaaaaaaaaaaaaaaaaaacgttgactaaaaaaaaaaaaaaaaaaaaaaaaaaaaaaaaaaaaaaaaaaaaaaaaaaaaaaaaaaaaaaaaaaaaaa

SEQ ID NO: 11599 - DNA, 4919 bp, synthetic construct
  source 1..4919: mol_type = other DNA
gaaataagagagaaaagaagagtaagaagaaatataagagaattcgccaccatggcccctaagaaaaagcggaaggtgaatatcagcggctctagctgcggcagccccaacagcgccgacaccagcagcgacttcaaggacctgtggaccaagctgaaggaatgccacgaccgggaagtgcagggactccaggtgaaggtcaccaaactcaagcaagaaagaatcctggacgcccagagactggaagaattcttcaccaagaaccagcagctgagagagcagcagaaagtgctgcacgagacaatcaaggttctggaagatagactgcgggccggcctgtgcgacagatgcgccgtgaccgaggaacacatgcgcaaaaagcagcaggagttcgagaacattagacagcaaaatctgaaattgatcacagagctgatgaacgagagaaacacactgcaggaggagaacaagaagctgagcgagcagctgcaacagaagatcgagaatgatcagcaacaccaggccgctgagctggaatgtgaagaggacgtgatccccgacagcccaatcacagctttcagcttttctggcgtgaacagactgaggcggaaggaaaacccccacgtgcggtacatcgagcagacccataccaagctggaacacagcgtgtgtgccaacgagatgagaaaggtgtccaagtcctccacccatccccagcacaaccctaacgaaaatgagatcctggtggctgatacctacgaccagtctcagagccctatggccaaggcccacggcaccagctcttatacccctgataagagctccttcaacctggccaccgtggtggccgagacactgggcctgggcgtgcaggaggaaagcgagacacagggcccaatgagccctctgggagatgagctgtaccactgcctggaaggcaaccacaagaaacagccttttgagtccggctccgagactcctggaacaagcgagagcgctacacctgagggcagctatgaacaacttgcaccacaaccgtgtgtgggagaaactttacattctagcctcccacgagacagtgaactgtttgtgcctgaagaggggagcagcgagaaggagagcgaggacgcgccaaaaacatctcctccgacgcctgggaaacatggtttggaacagactggggaggaaaaagtgatggtgactgttcctgacaaaaatccaccttgtccttgctgtggtacccgggtaaactctgtgttgaatctgattgaacatctgaaagtgtcacacgggaaaaggggggtttgttttcggtgtgcaaaatgtggaaaggaaaatagtaactatcacagtgttgtttgtcattttaagaaatgcaggggtccagagacggagaaagccccagctggggagtggatttgtgaggtatgcaacagagattttacaaccaaaattggcctgggacaacacaagagattggcacacccagcagtgagaaatcaggaaaggatcgttgcttcccaaccgaaagaaacatcaaatagaggtgctcacaaaaggtgctggacaaaggaggaggaagaattactaataagactggaggctcagttcgagggaaacaaaaatattaataagcttattgcagaacacataaccaccaaaacagctaagcagatcagtgacaaaaggcgattgctgtccagaaagccagcagaggagccacgtgaggagcctggaacgtgtcatcacaccaggagagcagctgcgagcctgagaacggagcctgagatgagtcatcacgcccaggcagaggacagagataatggacctgggagacgccctctgccaggcagggcagctgccggagggagaacaatggacgagataagacgccaccctgataagggcaacggacagcagagacccaccaagcaaaaatcagaagaacagctgcaggcttactataaaaagacactagaggaacgactttcagctggggcacttaacaccttcccccgagcattcaagcaggtaatggaaggccgggatataaagctagtaatcaatcagacagcgcaggactgcttcggatgcctggaatccataagccaaataagaacggcaacccgagataaaaaggacacggtgacccgggagaaacacccaaagaaaccttttcagaagtggatgaagaagagagcaatcaaaaaaggtaattatcttcggttccagcgtttattttatcttgatagagggaaactggctaaaatcattttagatgatattgaatgcttgtcttgtgacatccctcttagcgagatctacagcgttttcaagaccagatgggagaccaccggcagcttcaagagcctgggcgacttcaagacatacggcaaggccgacaacaccgccttcagagagctcatcaccgccaaggagatcgagaagaatgtgcaggagatgagcaagggctccgcgccagggcccgatggaattacattaggcgatgtggtgaagatggaccccgagttcagcagaaccatggagatcttcaacctgtggctcaccaccgggaagatccccgacatggttagaggctgcagaaccgttctcatccccaagagcagcaagcccgacagactgaaggacatcaacaactggagacccatcaccatcggcagcatcctgctgagactgttctccagaatcgtgaccgccagactgtccaaggcctgccctctgaaccctagacagagaggcttcatcagagctgccggctgcagcgagaacctgaagcttctgcagaccatcatctggagcgccaagagagagcacagacccctgggcgttgtgttcgtggacatcgccaaggctttcgacactgtgagccaccagcacatcatccacgccctgcaacagcgagaggtcgaccctcacatcgtgggccttgtgagcaacatgtacgagaacatcagcacctacatcaccaccaagagaaacacccacaccgacaagatccagatacgtgtgggcgtcaagcagggcgaccctatgagccctcttctgttcaacctcgccatggaccctctgctgtgcaagctggaggagtctggcaagggataccacagaggccagagctcgattactgccatggccttcgccgacgacctggtgcttctgagcgattcttgggagaacatgaacaccaacatctccatcctcgagaccttctgcaacctcaccggcctgaaaacccagggccaaaagtgccacggcttctacatcaagcccaccaaggacagctacaccatcaacgactgcgctgcctggaccatcaatggcacccctctcaacatgatcgaccccggcgagagcgagaagtacctgggcttacagttcgacccttggatcggcatcgccagaagcggccttagcacaaagttggacttctggctccagagaatcgaccaggcccccctgaagcctcttcagaaaaccgacatcctgaaaacctacacaatccccagactcatctacatcgccgaccacagcgaggtcaagagcgcactactcgaaacccttgaccagaagatccggacagcggtcaaggaatggcttcacctacctccgtgcacctgcgatgccatcctgtactcgagcacgagagacggcggtttgggcatcaccaaattggcaggactgatccccagcgtgcaggcccgtagactgcatcggatcgcacagtcatctgacgatacgatgaaatgcttcatggaaaaagagaaaatggaacagctgcataagaaattgtggattcaagctggaggggacagagagaacataccctcgatttgggaagcaccaccgtcgagtgaaccaccaaacaacgtgagcacaaattcggaatgggaagcaccgacccagaaagataaatttccaaagccttgcaattggaggaaaaacgaattcaaaaaatggaccaaattggcatcccaaggccgcggaattgtaaattttgaaagagacaaaattagtaaccattggatccaatactacagacgcatacctcacaggaaactcctcactgcactacaactcagggccaacgtttaccccacgagagaatttctagccaggggtagacaagaccaatacatcaaggcgtgtaggcactgcgatgcggacaacgaatcctgcgcccacatcatcggcaactgcccagtgacacaggacgcccgaatcaagaggcacaattacatctgcgaactgcttctcgaggaggcgaagaagaaggactgggtagtgttcaaggaaccgcacataagggattccaacaaggaactgtacaaacctgacctgatatttgtgaaggatgggcgtgcacttgtcgtggatgtgacagtacggtatgaagcagccaaatcatcgctggaggaagccgctgcagagaaagtgagaaagtacaaacacctggaaacggaagtaagacatctcacgaatgcaaaggacgttacttttgtgggctttcccctaggagcgcgggggaaatggcaccaagataactttaaacttttgactgagcttggcctctccaaatcgaggcaagtgaaaatggcagagactttttccacagtagcgctcttttcatctgtggacattgtacatatgtttgccagtagggccagaaaatctatggttatgtgataataggctgccttctgcggggcttgccttctggccatgcccttcttctctcccttgcacctgtacctcttggtctttgaataaagcctgagtaggaaggaccggtaaaaaaaaaaaaaaaaaaaaaaaaaaaaaaacgttgactaaaaaaaaaaaaaaaaaaaaaaaaaaaaaaaaaaaaaaaaaaaaaaaaaaaaaaaaaaaaaaaaaaaaaa

SEQ ID NO: 11600 - DNA, 4919 bp, synthetic construct
  source 1..4919: mol_type = other DNA
gaaataagagagaaaagaagagtaagaagaaatataagagaattcgccaccatggcccctaagaaaaagcggaaggtgaatatcagcggctctagctgcggcagccccaacagcgccgacaccagcagcgacttcaaggacctgtggaccaagctgaaggaatgccacgaccgggaagtgcagggactccaggtgaaggtcaccaaactcaagcaagaaagaatcctggacgcccagagactggaagaattcttcaccaagaaccagcagctgagagagcagcagaaagtgctgcacgagacaatcaaggttctggaagatagactgcgggccggcctgtgcgacagatgcgccgtgaccgaggaacacatgcgcaaaaagcagcaggagttcgagaacattagacagcaaaatctgaaattgatcacagagctgatgaacgagagaaacacactgcaggaggagaacaagaagctgagcgagcagctgcaacagaagatcgagaatgatcagcaacaccaggccgctgagctggaatgtgaagaggacgtgatccccgacagcccaatcacagctttcagcttttctggcgtgaacagactgaggcggaaggaaaacccccacgtgcggtacatcgagcagacccataccaagctggaacacagcgtgtgtgccaacgagatgagaaaggtgtccaagtcctccacccatccccagcacaaccctaacgaaaatgagatcctggtggctgatacctacgaccagtctcagagccctatggccaaggcccacggcaccagctcttatacccctgataagagctccttcaacctggccaccgtggtggccgagacactgggcctgggcgtgcaggaggaaagcgagacacagggcccaatgagccctctgggagatgagctgtaccactgcctggaaggcaaccacaagaaacagccttttgagtccggctccgagactcctggaacaagcgagagcgctacacctgagggcagctatgaacaacttgcaccacaaccgtgtgtgggagaaactttacattctagcctcccacgagacagtgaactgtttgtgcctgaagaggggagcagcgagaaggagagcgaggacgcgccaaaaacatctcctccgacgcctgggaaacatggtttggaacagactggggaggaaaaagtgatggtgactgttcctgacaaaaatccaccttgtccttgctgtggtacccgggtaaactctgtgttgaatctgattgaacatctgaaagtgtcacacgggaaaaggggggtttgttttcggtgtgcaaaatgtggaaaggaaaatagtaactatcacagtgttgtttgtcattttaagaaatgcaggggtccagagacggagaaagccccagctggggagtggatttgtgaggtatgcaacagagattttacaaccaaaattggcctgggacaacacaagagattggcacacccagcagtgagaaatcaggaaaggatcgttgcttcccaaccgaaagaaacatcaaatagaggtgctcacaaaaggtgctggacaaaggaggaggaagaattactaataagactggaggctcagttcgagggaaacaaaaatattaataagcttattgcagaacacataaccaccaaaacagctaagcagatcagtgacaaaaggcgattgctgtccagaaagccagcagaggagccacgtgaggagcctggaacgtgtcatcacaccaggagagcagctgcgagcctgagaacggagcctgagatgagtcatcacgcccaggcagaggacagagataatggacctgggagacgccctctgccaggcagggcagctgccggagggagaacaatggacgagataagacgccaccctgataagggcaacggacagcagagacccaccaagcaaaaatcagaagaacagctgcaggcttactataaaaagacactagaggaacgactttcagctggggcacttaacaccttcccccgagcattcaagcaggtaatggaaggccgggatataaagctagtaatcaatcagacagcgcaggactacttcggatgcctggaatccataagccaaataagaacggcaacccgagataaaaaggacacggtgacccgggagaaacacccaaagaaaccttttcagaagtggatgaagaagagagcaatcaaaaaaggtaattatcttcggttccagcgtttattttatcttgatagagggaaactggctaaaatcattttagatgatattgaatgcttgtcttgtgacataccactcagtgaaatttattcggtttttaaaacaagatgggaaacaactggtagctttaaaagccttggggactttaaaacttacgggaaggctgacaacactgccttcagagaattaattacggctaaagaaattgagaaaaatgtgcaggaaatgagcaaaggctcggctcccggtccagacgggattactcttggggacgtcgtaaagatggatcccgagttttcccggaccatggagattttcaatttatggttaacaactggtaaaatcccggacatggtgagggggtgcagaaccgttttgattccaaaatcatcaaagccggatcgtttgaaagacattaataactggagacctatcacgatcggttccatcttgctgagactgttctccaggattgtaacagctaggctgagcaaagcgtgccccctgaacccaaggcaaagaggctttatcagagcggcgggatgctctgaaaacttaaaactcctgcaaactataatttggtcggccaaaagagaacacagaccactgggtgttgtattcgtggacatcgccaaggcttttgacaccgtaagccaccagcacatcattcatgctttgcagcaaagagaggtggatccccacatcgtcggtctggtgagcaatatgtacgagaacatcagtacgtatatcaccacaaagaggaacacacacacagacaaaatccagatccgggttggagtaaagcagggtgacccgatgtcgccccttttatttaacctggcaatggaccctctattatgcaagctggaagagagtggcaaaggataccaccgaggacagagcagcatcacagcgatggcatttgcagacgatctggttttgctgagcgactcctgggaaaatatgaatacaaatattagcatactggagaccttctgcaatctgaccggactcaaaacacaggggcaaaagtgccacggcttttacatcaagccgacaaaggactcttacaccatcaatgactgcgctgcctggactatcaacggcacacccctgaacatgatcgaccccggcgaatctgagaaatacctcggcctgcagtttgacccgtggattggaatagcaaggtccggtctctccacaaaactagatttttggcttcagcggatcgatcaagcaccacttaaacctctgcagaaaactgatattctcaaaacatacaccatccctcggctgatctacatagctgaccactcagaagtgaaaagcgcactactcgaaacccttgaccagaagatccggacagcggtcaaggaatggcttcacctacctccgtgcacctgcgatgccatcctgtactcgagcacgagagacggcggtttgggcatcaccaaattggcaggactgatccccagcgtgcaggcccgtagactgcatcggatcgcacagtcatctgacgatacgatgaaatgcttcatggaaaaagagaaaatggaacagctgcataagaaattgtggattcaagctggaggggacagagagaacataccctcgatttgggaagcaccaccgtcgagtgaaccaccaaacaacgtgagcacaaattcggaatgggaagcaccgacccagaaagataaatttccaaagccttgcaattggaggaaaaacgaattcaaaaaatggaccaaattggcatcccaaggccgcggaattgtaaattttgaaagagacaaaattagtaaccattggatccaatactacagacgcatacctcacaggaaactcctcactgcactacaactcagggccaacgtttaccccacgagagaatttctagccaggggtagacaagaccaatacatcaaggcgtgtaggcactgcgatgcggacaacgaatcctgcgcccacatcatcggcaactgcccagtgacacaggacgcccgaatcaagaggcacaattacatctgcgaactgcttctcgaggaggcgaagaagaaggactgggtagtgttcaaggaaccgcacataagggattccaacaaggaactgtacaaacctgacctgatatttgtgaaggatgggcgtgcacttgtcgtggatgtgacagtacggtatgaagcagccaaatcatcgctggaggaagccgctgcagagaaagtgagaaagtacaaacacctggaaacggaagtaagacatctcacgaatgcaaaggacgttacttttgtgggctttcccctaggagcgcgggggaaatggcaccaagataactttaaacttttgactgagcttggcctctccaaatcgaggcaagtgaaaatggcagagactttttccacagtagcgctcttttcatctgtggacattgtacatatgtttgccagtagggccagaaaatctatggttatgtgataataggctgccttctgcggggcttgccttctggccatgcccttcttctctcccttgcacctgtacctcttggtctttgaataaagcctgagtaggaaggaccggtaaaaaaaaaaaaaaaaaaaaaaaaaaaaaaacgttgactaaaaaaaaaaaaaaaaaaaaaaaaaaaaaaaaaaaaaaaaaaaaaaaaaaaaaaaaaaaaaaaaaaaaaa

SEQ ID NO: 11601 - skipped

SEQ ID NO: 11602 - DNA, 4982 bp, synthetic construct
  source 1..4982: mol_type = other DNA
gaaataagagagaaaagaagagtaagaagaaatataagagaattcgccaccatggcccctaagaaaaagcggaaggtgaatatcagcggctctagctgcggcagccccaacagcgccgacaccagcagcgacttcaaggacctgtggaccaagctgaaggaatgccacgaccgggaagtgcagggactccaggtgaaggtcaccaaactcaagcaagaaagaatcctggacgcccagagactggaagaattcttcaccaagaaccagcagctgagagagcagcagaaagtgctgcacgagacaatcaaggttctggaagatagactgcgggccggcctgtgcgacagatgcgccgtgaccgaggaacacatgcgcaaaaagcagcaggagttcgagaacattagacagcaaaatctgaaattgatcacagagctgatgaacgagagaaacacactgcaggaggagaacaagaagctgagcgagcagctgcaacagaagatcgagaatgatcagcaacaccaggccgctgagctggaatgtgaagaggacgtgatccccgacagcccaatcacagctttcagcttttctggcgtgaacagactgaggcggaaggaaaacccccacgtgcggtacatcgagcagacccataccaagctggaacacagcgtgtgtgccaacgagatgagaaaggtgtccaagtcctccacccatccccagcacaaccctaacgaaaatgagatcctggtggctgatacctacgaccagtctcagagccctatggccaaggcccacggcaccagctcttatacccctgataagagctccttcaacctggccaccgtggtggccgagacactgggcctgggcgtgcaggaggaaagcgagacacagggcccaatgagccctctgggagatgagctgtaccactgcctggaaggcaaccacaagaaacagccttttgagtccggctccgagactcctggaacaagcgagagcgctacacctgagggcagctatgaacaacttgcaccacaaccgtgtgtgggagaaactttacattctagcctcccacgagacagtgaactgtttgtgcctgaagaggggagcagcgagaaggagagcgaggacgcgccaaaaacatctcctccgacgcctgggaaacatggtttggaacagactggggaggaaaaagtgatggtgactgttcctgacaaaaatccaccttgtccttgctgtggtacccgggtaaactctgtgttgaatctgattgaacatctgaaagtgtcacacgggaaaaggggggtttgttttcggtgtgcaaaatgtggaaaggaaaatagtaactatcacagtgttgtttgtcattttaagaaatgcaggggtccagagacggagaaagccccagctggggagtggatttgtgaggtatgcaacagagattttacaaccaaaattggcctgggacaacacaagagattggcacacccagcagtgagaaatcaggaaaggatcgttgcttcccaaccgaaagaaacatcaaatagaggtgctcacaaaaggtgctggacaaaggaggaggaagaattactaataagactggaggctcagttcgagggaaacaaaaatattaataagcttattgcagaacacataaccaccaaaacagctaagcagatcagtgacaaaaggcgattgctgtccagaaagccagcagaggagccacgtgaggagcctggaacgtgtcatcacaccaggagagcagctgcgagcctgagaacggagcctgagatgagtcatcacgcccaggcagaggacagagataatggacctgggagacgccctctgccaggcagggcagctgccggagggagaacaatggacgagataagacgccaccctgataagggcaacggacagcagagacccaccaagcaaaaatcagaagaacagctgcaggcttactataaaaagacactagaggaacgactttcagctggggcacttaacaccttcccccgagcattcaagcaggtaatggaaggccgggatataaagctagtaatcaatcagacagcgcaggactgcttcggatgcctggaatccataagccaaataagaacggcaacccgagataaaaaggacacggtgacccgggagaaacacccaaagaaaccttttcagaagtggatgaagaagagagcaatcaaaaaaggtaattatcttcggttccagcgtttattttatcttgatagagggaaactggctaaaatcattttagatgatattgaatgcttgtcttgtgacataccactcagtgaaatttattcggtttttaaaacaagatgggaaacaactggtagctttaaaagccttggggactttaaaacttacgggaaggctgacaacactgccttcagagaattaattacggctaaagaaattgagaaaaatgtgcaggaaatgagcaaaggctcggctcccggtccagacgggattactcttggggacgtcgtaaagatggatcccgagttttcccggaccatggagattttcaatttatggttaacaactggtaaaatcccggacatggtgagggggtgcagaaccgttttgattccaaaatcatcaaagccggatcgtttgaaagacattaataactggagacctatcacgatcggttccatcttgctgagactgttctccaggattgtaacagctaggctgagcaaagcgtgccccctgaacccaaggcaaagaggctttatcagagcggcgggatgctctgaaaacttaaaactcctgcaaactataatttggtcggccaaaagagaacacagaccactgggtgttgtattcgtggacatcgccaaggcttttgacaccgtaagccaccagcacatcattcatgctttgcagcaaagagaggtggatccccacatcgtcggtctggtgagcaatatgtacgagaacatcagtacgtatatcaccacaaagaggaacacacacacagacaaaatccagatccgggttggagtaaagcagggtgacccgatgtcgccccttttatttaacctggcaatggaccctctattatgcaagctggaagagagtggcaaaggataccaccgaggacagagcagcatcacagcgatggcatttgcagacgatctggttttgctgagcgactcctgggaaaatatgaatacaaatattagcatactggagaccttctgcaatctgaccggactcaaaacacaggggcaaaagtgccacggcttttacatcaagccgacaaaggactcttacaccatcaatgactgcgctgcctggactatcaacggcacacccctgaacatgatcgaccccggcgaatctgagaaatacctcggcctgcagtttgacccgtggattggaatagcaaggtccggtctctccacaaaactagatttttggcttcagcggatcgatcaagcaccacttaaacctctgcagaaaactgatattctcaaaacatacaccatccctcggctgatctacatagctgaccactcagaagtgaaaagcgcactactcgaaacccttgaccagaagatccggacagcggtcaaggaatggcttcacctacctccgtgcacctgcgatgccatcctgtactcgagcacgagagacggcggtttgggcatcaccaaattggcaggactgatccccagcgtgcaggcccgtagactgcatcggatcgcacagtcatctgacgatacgatgaaatgcttcatggaaaaagagaaaatggaacagctgcataagaaattgtggattcaagctggaggggacagagagaacataccctcgatttgggaagcaccaccgtcgagtgaaccaccaaacaacgtgagcacaaattcggaatgggaagcaccgacccagaaagataaatttccaaagccttgcaattggaggaaaaacgaattcaaaaaatggaccaaattggcatcccaaggccgcggaattgtaaattttgaaagagacaaaattagtaaccattggatccaatactacagacgcatacctcacaggaaactcctcactgcactacaactcagggccaacgtttaccccacgagagaatttctagccaggggtagacaagaccaatacatcaaggcgtgtaggcactgcgatgcggacaacgaatcctgcgcccacatcatcggcaactgcccagtgacacaggacgcccgaatcaagaggcacaattacatctgcgaactgcttctcgaggaggcgaagaagaaggactgggtagtgttcaaggaaccgcacataagggattccaacaaggaactgtacaaacctgacctgatatttgtgaaggatgggcgtgcacttgtcgtggatgtgacagtacggtatgaagcagccaaatcatcgctggaggaagccgctgcagagaaagtgagaaagtacaaacacctggaaacggaagtaagacatctcacgaatgcaaaggacgttacttttgtgggctttcccctaggagcgcgggggaaatggcaccaagataactttaaacttttgactgagcttggcctctccaaatcgaggcaagtgaaaatggcagagactttttccacagtagcgctcttttcatctgtggacattgtacatatgtttgccagtagggccagaaaatctatggttatgtctggcggctcaaaaagaaccgccgacggcagcgaattcgagcccaagaagaagaggaaagtctgataataggctgccttctgcggggcttgccttctggccatgcccttcttctctcccttgcacctgtacctcttggtctttgaataaagcctgagtaggaaggaccggtaaaaaaaaaaaaaaaaaaaaaaaaaaaaaaacgttgactaaaaaaaaaaaaaaaaaaaaaaaaaaaaaaaaaaaaaaaaaaaaaaaaaaaaaaaaaaaaaaaaaaaaaa

SEQ ID NO: 11603 - DNA, 4264 bp, synthetic construct; identical to SEQ ID NO: 10256
  source 1..4264: mol_type = other DNA

SEQ ID NO: 11604 - DNA, 4952 bp, synthetic construct
  source 1..4952: mol_type = other DNA
gaaataagagagaaaagaagagtaagaagaaatataagagaattcgccaccatggccaaacggacagccgacggaagcgagttcgagtcaccaaagaagaagcggaaagtcaatatcagcggctctagctgcggcagccccaacagcgccgacaccagcagcgacttcaaggacctgtggaccaagctgaaggaatgccacgaccgggaagtgcagggactccaggtgaaggtcaccaaactcaagcaagaaagaatcctggacgcccagagactggaagaattcttcaccaagaaccagcagctgagagagcagcagaaagtgctgcacgagacaatcaaggttctggaagatagactgcgggccggcctgtgcgacagatgcgccgtgaccgaggaacacatgcgcaaaaagcagcaggagttcgagaacattagacagcaaaatctgaaattgatcacagagctgatgaacgagagaaacacactgcaggaggagaacaagaagctgagcgagcagctgcaacagaagatcgagaatgatcagcaacaccaggccgctgagctggaatgtgaagaggacgtgatccccgacagcccaatcacagctttcagcttttctggcgtgaacagactgaggcggaaggaaaacccccacgtgcggtacatcgagcagacccataccaagctggaacacagcgtgtgtgccaacgagatgagaaaggtgtccaagtcctccacccatccccagcacaaccctaacgaaaatgagatcctggtggctgatacctacgaccagtctcagagccctatggccaaggcccacggcaccagctcttatacccctgataagagctccttcaacctggccaccgtggtggccgagacactgggcctgggcgtgcaggaggaaagcgagacacagggcccaatgagccctctgggagatgagctgtaccactgcctggaaggcaaccacaagaaacagccttttgagtccggctccgagactcctggaacaagcgagagcgctacacctgagggcagctatgaacaacttgcaccacaaccgtgtgtgggagaaactttacattctagcctcccacgagacagtgaactgtttgtgcctgaagaggggagcagcgagaaggagagcgaggacgcgccaaaaacatctcctccgacgcctgggaaacatggtttggaacagactggggaggaaaaagtgatggtgactgttcctgacaaaaatccaccttgtccttgctgtggtacccgggtaaactctgtgttgaatctgattgaacatctgaaagtgtcacacgggaaaaggggggtttgttttcggtgtgcaaaatgtggaaaggaaaatagtaactatcacagtgttgtttgtcattttaagaaatgcaggggtccagagacggagaaagccccagctggggagtggatttgtgaggtatgcaacagagattttacaaccaaaattggcctgggacaacacaagagattggcacacccagcagtgagaaatcaggaaaggatcgttgcttcccaaccgaaagaaacatcaaatagaggtgctcacaaaaggtgctggacaaaggaggaggaagaattactaataagactggaggctcagttcgagggaaacaaaaatattaataagcttattgcagaacacataaccaccaaaacagctaagcagatcagtgacaaaaggcgattgctgtccagaaagccagcagaggagccacgtgaggagcctggaacgtgtcatcacaccaggagagcagctgcgagcctgagaacggagcctgagatgagtcatcacgcccaggcagaggacagagataatggacctgggagacgccctctgccaggcagggcagctgccggagggagaacaatggacgagataagacgccaccctgataagggcaacggacagcagagacccaccaagcaaaaatcagaagaacagctgcaggcttactataaaaagacactagaggaacgactttcagctggggcacttaacaccttcccccgagcattcaagcaggtaatggaaggccgggatataaagctagtaatcaatcagacagcgcaggactgcttcggatgcctggaatccataagccaaataagaacggcaacccgagataaaaaggacacggtgacccgggagaaacacccaaagaaaccttttcagaagtggatgaagaagagagcaatcaaaaaaggtaattatcttcggttccagcgtttattttatcttgatagagggaaactggctaaaatcattttagatgatattgaatgcttgtcttgtgacataccactcagtgaaatttattcggtttttaaaacaagatgggaaacaactggtagctttaaaagccttggggactttaaaacttacgggaaggctgacaacactgccttcagagaattaattacggctaaagaaattgagaaaaatgtgcaggaaatgagcaaaggctcggctcccggtccagacgggattactcttggggacgtcgtaaagatggatcccgagttttcccggaccatggagattttcaatttatggttaacaactggtaaaatcccggacatggtgagggggtgcagaaccgttttgattccaaaatcatcaaagccggatcgtttgaaagacattaataactggagacctatcacgatcggttccatcttgctgagactgttctccaggattgtaacagctaggctgagcaaagcgtgccccctgaacccaaggcaaagaggctttatcagagcggcgggatgctctgaaaacttaaaactcctgcaaactataatttggtcggccaaaagagaacacagaccactgggtgttgtattcgtggacatcgccaaggcttttgacaccgtaagccaccagcacatcattcatgctttgcagcaaagagaggtggatccccacatcgtcggtctggtgagcaatatgtacgagaacatcagtacgtatatcaccacaaagaggaacacacacacagacaaaatccagatccgggttggagtaaagcagggtgacccgatgtcgccccttttatttaacctggcaatggaccctctattatgcaagctggaagagagtggcaaaggataccaccgaggacagagcagcatcacagcgatggcatttgcagacgatctggttttgctgagcgactcctgggaaaatatgaatacaaatattagcatactggagaccttctgcaatctgaccggactcaaaacacaggggcaaaagtgccacggcttttacatcaagccgacaaaggactcttacaccatcaatgactgcgctgcctggactatcaacggcacacccctgaacatgatcgaccccggcgaatctgagaaatacctcggcctgcagtttgacccgtggattggaatagcaaggtccggtctctccacaaaactagatttttggcttcagcggatcgatcaagcaccacttaaacctctgcagaaaactgatattctcaaaacatacaccatccctcggctgatctacatagctgaccactcagaagtgaaaagcgcactactcgaaacccttgaccagaagatccggacagcggtcaaggaatggcttcacctacctccgtgcacctgcgatgccatcctgtactcgagcacgagagacggcggtttgggcatcaccaaattggcaggactgatccccagcgtgcaggcccgtagactgcatcggatcgcacagtcatctgacgatacgatgaaatgcttcatggaaaaagagaaaatggaacagctgcataagaaattgtggattcaagctggaggggacagagagaacataccctcgatttgggaagcaccaccgtcgagtgaaccaccaaacaacgtgagcacaaattcggaatgggaagcaccgacccagaaagataaatttccaaagccttgcaattggaggaaaaacgaattcaaaaaatggaccaaattggcatcccaaggccgcggaattgtaaattttgaaagagacaaaattagtaaccattggatccaatactacagacgcatacctcacaggaaactcctcactgcactacaactcagggccaacgtttaccccacgagagaatttctagccaggggtagacaagaccaatacatcaaggcgtgtaggcactgcgatgcggacaacgaatcctgcgcccacatcatcggcaactgcccagtgacacaggacgcccgaatcaagaggcacaattacatctgcgaactgcttctcgaggaggcgaagaagaaggactgggtagtgttcaaggaaccgcacataagggattccaacaaggaactgtacaaacctgacctgatatttgtgaaggatgggcgtgcacttgtcgtggatgtgacagtacggtatgaagcagccaaatcatcgctggaggaagccgctgcagagaaagtgagaaagtacaaacacctggaaacggaagtaagacatctcacgaatgcaaaggacgttacttttgtgggctttcccctaggagcgcgggggaaatggcaccaagataactttaaacttttgactgagcttggcctctccaaatcgaggcaagtgaaaatggcagagactttttccacagtagcgctcttttcatctgtggacattgtacatatgtttgccagtagggccagaaaatctatggttatgtgataataggctgccttctgcggggcttgccttctggccatgcccttcttctctcccttgcacctgtacctcttggtctttgaataaagcctgagtaggaaggaccggtaaaaaaaaaaaaaaaaaaaaaaaaaaaaaaacgttgactaaaaaaaaaaaaaaaaaaaaaaaaaaaaaaaaaaaaaaaaaaaaaaaaaaaaaaaaaaaaaaaaaaaaaa

SEQ ID NO: 11605 - skipped

SEQ ID NO: 11606 - DNA, 4439 bp, synthetic construct
  source 1..4439: mol_type = other DNA
gaaataagagagaaaagaagagtaagaagaaatataagagaattcgccaccatggcttcttgcccgaaacctggccccccggtttcagcaggggcaatgagtttggaaagtggactgaccacccactccgttctcgccatcgaacgtggtcccaattcgttggcaaattccggatcagactttgggggggggggtctggggctaccgttacgcctattgagggtatcggtcggcactcagacctcccgctccgactgggtagacctggtgtcctggagccacccaggacccacgtctaagtcccagcaggttgacctggtgtctttatttcctaaacaccgggttgacctgttatccaaaaacgaccaggtagacctggtggctcaatttttaccatctaaatttccccccaatttggcagaaaatgatttggctttgctggtgaacttagagttctacagatcggatttgcatgtgtatgagtgtgttcataaggctgcacattgggagggattaagtggtttgcctgaggtgtatgaacaacttgcaccacaaccgtgtgtgggagaaactttacattctagcctcccacgagacagtgaactgtttgtgcctgaagaggggagcagcgagaaggagagcgaggacgcgccaaaaacatctcctccgacgcctgggaaacatggtttggaacagactggggaggaaaaagtgatggtgactgttcctgacaaaaatccaccttgtccttgctgtggtacccgggtaaactctgtgttgaatctgattgaacatctgaaagtgtcacacgggaaaaggggggtttgttttcggtgtgcaaaatgtggaaaggaaaatagtaactatcacagtgttgtttgtcattttaagaaatgcaggggtccagagacggagaaagccccagctggggagtggatttgtgaggtatgcaacagagattttacaaccaaaattggcctgggacaacacaagagattggcacacccagcagtgagaaatcaggaaaggatcgttgcttcccaaccgaaagaaacatcaaatagaggtgctcacaaaaggtgctggacaaaggaggaggaagaattactaataagactggaggctcagttcgagggaaacaaaaatattaataagcttattgcagaacacataaccaccaaaacagctaagcagatcagtgacaaaaggcgattgctgtccagaaagccagcagaggagccacgtgaggagcctggaacgtgtcatcacaccaggagagcagctgcgagcctgagaacggagcctgagatgagtcatcacgcccaggcagaggacagagataatggacctgggagacgccctctgccaggcagggcagctgccggagggagaacaatggacgagataagacgccaccctgataagggcaacggacagcagagacccaccaagcaaaaatcagaagaacagctgcaggcttactataaaaagacactagaggaacgactttcagctggggcacttaacaccttcccccgagcattcaagcaggtaatggaaggccgggatataaagctagtaatcaatcagacagcgcaggactgcttcggatgcctggaatccataagccaaataagaacggcaacccgagataaaaaggacacggtgacccgggagaaacacccaaagaaaccttttcagaagtggatgaagaagagagcaatcaaaaaaggtaattatcttcggttccagcgtttattttatcttgatagagggaaactggctaaaatcattttagatgatattgaatgcttgtcttgtgacataccactcagtgaaatttattcggtttttaaaacaagatgggaaacaactggtagctttaaaagccttggggactttaaaacttacgggaaggctgacaacactgccttcagagaattaattacggctaaagaaattgagaaaaatgtgagagaaatgagcaaaggctcggctcccggtccagacgggattactcttggggacgtcgtaaagatggatcccgagttttcccggaccatggagattttcaatttatggttaacaactggtaaaatcccggacatggtgagggggtgcagaaccgttttgattccaaaatcatcaaagccggatcgtttgaaagacattaataactggagacctatcacgatcggttccatcttgctgagactgttctccaggattgtaacagctaggctgagcaaagcgtgccccctgaacccaaggcaaagaggctttatcagagcggcgggatgctctgaaaacttaaaactcctgcaaactataatttggtcggccaaaagagaacacagaccactgggtgttgtattcgtggacatcgccaaggcttttgacaccgtaagccaccagcacatcattcatgctttgcagcaaagagaggtggatccccacatcgtcggtctggtgagcaatatgtacgagaacatcagtacgtatatcaccacaaagaggaacacacacacagacaaaatccagatccgggttggagtaaagcagggtgacccgatgtcgccccttttatttaacctggcaatggaccctctattatgcaagctggaagagagtggcaaaggataccaccgaggacagagcagcatcacagcgatggcatttgcagacgatctggttttgctgagcgactcctgggaaaatatgaatacaaatattagcatactggagaccttctgcaatctgaccggactcaaaacacaggggcaaaagtgccacggcttttacatcaagccgacaaaggactcttacaccatcaatgactgcgctgcctggactatcaacggcacacccctgaacatgatcgaccccggcgaatctgagaaatacctcggcctgcagtttgacccgtggattggaatagcaaggtccggtctctccacaaaactagatttttggcttcagcggatcgatcaagcaccacttaaacctctgcagaaaactgatattctcaaaacatacaccatccctcggctgatctacatagctgaccactcagaagtgaaaagcgcactactcgaaacccttgaccagaagatccggacagcggtcaaggaatggcttcacctacctccgtgcacctgcgatgccatcctgtactcgagcacgagagacggcggtttgggcatcaccaaattggcaggactgatccccagcgtgcaggcccgtagactgcatcggatcgcacagtcatctgacgatacgatgaaatgcttcatggaaaaagagaaaatggaacagctgcataagaaattgtggattcaagctggaggggacagagagaacataccctcgatttgggaagcaccaccgtcgagtgaaccaccaaacaacgtgagcacaaattcggaatgggaagcaccgacccagaaagataaatttccaaagccttgcaattggaggaaaaacgaattcaaaaaatggaccaaattggcatcccaaggccgcggaattgtaaattttgaaagagacaaaattagtaaccattggatccaatactacagacgcatacctcacaggaaactcctcactgcactacaactcagggccaacgtttaccccacgagagaatttctagccaggggtagacaagaccaatacatcaaggcgtgtaggcactgcgatgcggacaacgaatcctgcgcccacatcatcggcaactgcccagtgacacaggacgcccgaatcaagaggcacaattacatctgcgaactgcttctcgaggaggcgaagaagaaggactgggtagtgttcaaggaaccgcacataagggattccaacaaggaactgtacaaacctgacctgatatttgtgaaggatgggcgtgcacttgtcgtggatgtgacagtacggtatgaagcagccaaatcatcgctggaggaagccgctgcagagaaagtgagaaagtacaaacacctggaaacggaagtaagacatctcacgaatgcaaaggacgttacttttgtgggctttcccctaggagcgcgggggaaatggcaccaagataactttaaacttttgactgagcttggcctctccaaatcgaggcaagtgaaaatggcagagactttttccacagtagcgctcttttcatctgtggacattgtacatatgtttgccagtagggccagaaaatctatggttatgtgataataggctgccttctgcggggcttgccttctggccatgcccttcttctctcccttgcacctgtacctcttggtctttgaataaagcctgagtaggaaggaccggtaaaaaaaaaaaaaaaaaaaaaaaaaaaaaaacgttgactaaaaaaaaaaaaaaaaaaaaaaaaaaaaaaaaaaaaaaaaaaaaaaaaaaaaaaaaaaaaaaaaaaaaaa

SEQ ID NO: 11607 - DNA, 4439 bp, synthetic construct
  source 1..4439: mol_type = other DNA
gaaataagagagaaaagaagagtaagaagaaatataagagaattcgccaccatggcttcttgcccgaaacctggccccccggtttcagcaggggcaatgagtttggaaagtggactgaccacccactccgttctcgccatcgaacgtggtcccaattcgttggcaaattccggatcagactttgggggggggggtctggggctaccgttacgcctattgagggtatcggtcggcactcagacctcccgctccgactgggtagacctggtgtcctggagccacccaggacccacgtctaagtcccagcaggttgacctggtgtctttatttcctaaacaccgggttgacctgttatccaaaaacgaccaggtagacctggtggctcaatttttaccatctaaatttccccccaatttggcagaaaatgatttggctttgctggtgaacttagagttctacagatcggatttgcatgtgtatgagtgtgttcataaggctgcacattgggagggattaagtggtttgcctgaggtgtatgaacaacttgcaccacaaccgtgtgtgggagaaactttacattctagcctcccacgagacagtgaactgtttgtgcctgaagaggggagcagcgagaaggagagcgaggacgcgccaaaaacatctcctccgacgcctgggaaacatggtttggaacagactggggaggaaaaagtgatggtgactgttcctgacaaaaatccaccttgtccttgctgtggtacccgggtaaactctgtgttgaatctgattgaacatctgaaagtgtcacacgggaaaaggggggtttgttttcggtgtgcaaaatgtggaaaggaaaatagtaactatcacagtgttgtttgtcattttaagaaatgcaggggtccagagacggagaaagccccagctggggagtggatttgtgaggtatgcaacagagattttacaaccaaaattggcctgggacaacacaagagattggcacacccagcagtgagaaatcaggaaaggatcgttgcttcccaaccgaaagaaacatcaaatagaggtgctcacaaaaggtgctggacaaaggaggaggaagaattactaataagactggaggctcagttcgagggaaacaaaaatattaataagcttattgcagaacacataaccaccaaaacagctaagcagatcagtgacaaaaggcgattgctgtccagaaagccagcagaggagccacgtgaggagcctggaacgtgtcatcacaccaggagagcagctgcgagcctgagaacggagcctgagatgagtcatcacgcccaggcagaggacagagataatggacctgggagacgccctctgccaggcagggcagctgccggagggagaacaatggacgagataagacgccaccctgataagggcaacggacagcagagacccaccaagcaaaaatcagaagaacagctgcaggcttactataaaaagacactagaggaacgactttcagctggggcacttaacaccttcccccgagcattcaagcaggtaatggaaggccgggatataaagctagtaatcaatcagacagcgcaggactgcttcggatgcctggaatccataagccaaataagaacggcaacccgagataaaaaggacacggtgacccgggagaaacacccaaagaaaccttttcagaagtggatgaagaagagagcaatcaaaaaaggtaattatcttcggttccagcgtttattttatcttgatagagggaaactggctaaaatcattttagatgatattgaatgcttgtcttgtgacataccactcagtgaaatttattcggtttttaaaacaagatgggaaacaactggtagctttaaaagccttggggactttaaaacttacgggaaggctgacaacactgccttcagagaattaattacggctaaagaaattgagaaaaatgtgcagaggatgagcaaaggctcggctcccggtccagacgggattactcttggggacgtcgtaaagatggatcccgagttttcccggaccatggagattttcaatttatggttaacaactggtaaaatcccggacatggtgagggggtgcagaaccgttttgattccaaaatcatcaaagccggatcgtttgaaagacattaataactggagacctatcacgatcggttccatcttgctgagactgttctccaggattgtaacagctaggctgagcaaagcgtgccccctgaacccaaggcaaagaggctttatcagagcggcgggatgctctgaaaacttaaaactcctgcaaactataatttggtcggccaaaagagaacacagaccactgggtgttgtattcgtggacatcgccaaggcttttgacaccgtaagccaccagcacatcattcatgctttgcagcaaagagaggtggatccccacatcgtcggtctggtgagcaatatgtacgagaacatcagtacgtatatcaccacaaagaggaacacacacacagacaaaatccagatccgggttggagtaaagcagggtgacccgatgtcgccccttttatttaacctggcaatggaccctctattatgcaagctggaagagagtggcaaaggataccaccgaggacagagcagcatcacagcgatggcatttgcagacgatctggttttgctgagcgactcctgggaaaatatgaatacaaatattagcatactggagaccttctgcaatctgaccggactcaaaacacaggggcaaaagtgccacggcttttacatcaagccgacaaaggactcttacaccatcaatgactgcgctgcctggactatcaacggcacacccctgaacatgatcgaccccggcgaatctgagaaatacctcggcctgcagtttgacccgtggattggaatagcaaggtccggtctctccacaaaactagatttttggcttcagcggatcgatcaagcaccacttaaacctctgcagaaaactgatattctcaaaacatacaccatccctcggctgatctacatagctgaccactcagaagtgaaaagcgcactactcgaaacccttgaccagaagatccggacagcggtcaaggaatggcttcacctacctccgtgcacctgcgatgccatcctgtactcgagcacgagagacggcggtttgggcatcaccaaattggcaggactgatccccagcgtgcaggcccgtagactgcatcggatcgcacagtcatctgacgatacgatgaaatgcttcatggaaaaagagaaaatggaacagctgcataagaaattgtggattcaagctggaggggacagagagaacataccctcgatttgggaagcaccaccgtcgagtgaaccaccaaacaacgtgagcacaaattcggaatgggaagcaccgacccagaaagataaatttccaaagccttgcaattggaggaaaaacgaattcaaaaaatggaccaaattggcatcccaaggccgcggaattgtaaattttgaaagagacaaaattagtaaccattggatccaatactacagacgcatacctcacaggaaactcctcactgcactacaactcagggccaacgtttaccccacgagagaatttctagccaggggtagacaagaccaatacatcaaggcgtgtaggcactgcgatgcggacaacgaatcctgcgcccacatcatcggcaactgcccagtgacacaggacgcccgaatcaagaggcacaattacatctgcgaactgcttctcgaggaggcgaagaagaaggactgggtagtgttcaaggaaccgcacataagggattccaacaaggaactgtacaaacctgacctgatatttgtgaaggatgggcgtgcacttgtcgtggatgtgacagtacggtatgaagcagccaaatcatcgctggaggaagccgctgcagagaaagtgagaaagtacaaacacctggaaacggaagtaagacatctcacgaatgcaaaggacgttacttttgtgggctttcccctaggagcgcgggggaaatggcaccaagataactttaaacttttgactgagcttggcctctccaaatcgaggcaagtgaaaatggcagagactttttccacagtagcgctcttttcatctgtggacattgtacatatgtttgccagtagggccagaaaatctatggttatgtgataataggctgccttctgcggggcttgccttctggccatgcccttcttctctcccttgcacctgtacctcttggtctttgaataaagcctgagtaggaaggaccggtaaaaaaaaaaaaaaaaaaaaaaaaaaaaaaacgttgactaaaaaaaaaaaaaaaaaaaaaaaaaaaaaaaaaaaaaaaaaaaaaaaaaaaaaaaaaaaaaaaaaaaaaa

SEQ ID NO: 11608 - DNA, 4439 bp, synthetic construct
  source 1..4439: mol_type = other DNA
gaaataagagagaaaagaagagtaagaagaaatataagagaattcgccaccatggcttcttgcccgaaacctggccccccggtttcagcaggggcaatgagtttggaaagtggactgaccacccactccgttctcgccatcgaacgtggtcccaattcgttggcaaattccggatcagactttgggggggggggtctggggctaccgttacgcctattgagggtatcggtcggcactcagacctcccgctccgactgggtagacctggtgtcctggagccacccaggacccacgtctaagtcccagcaggttgacctggtgtctttatttcctaaacaccgggttgacctgttatccaaaaacgaccaggtagacctggtggctcaatttttaccatctaaatttccccccaatttggcagaaaatgatttggctttgctggtgaacttagagttctacagatcggatttgcatgtgtatgagtgtgttcataaggctgcacattgggagggattaagtggtttgcctgaggtgtatgaacaacttgcaccacaaccgtgtgtgggagaaactttacattctagcctcccacgagacagtgaactgtttgtgcctgaagaggggagcagcgagaaggagagcgaggacgcgccaaaaacatctcctccgacgcctgggaaacatggtttggaacagactggggaggaaaaagtgatggtgactgttcctgacaaaaatccaccttgtccttgctgtggtacccgggtaaactctgtgttgaatctgattgaacatctgaaagtgtcacacgggaaaaggggggtttgttttcggtgtgcaaaatgtggaaaggaaaatagtaactatcacagtgttgtttgtcattttaagaaatgcaggggtccagagacggagaaagccccagctggggagtggatttgtgaggtatgcaacagagattttacaaccaaaattggcctgggacaacacaagagattggcacacccagcagtgagaaatcaggaaaggatcgttgcttcccaaccgaaagaaacatcaaatagaggtgctcacaaaaggtgctggacaaaggaggaggaagaattactaataagactggaggctcagttcgagggaaacaaaaatattaataagcttattgcagaacacataaccaccaaaacagctaagcagatcagtgacaaaaggcgattgctgtccagaaagccagcagaggagccacgtgaggagcctggaacgtgtcatcacaccaggagagcagctgcgagcctgagaacggagcctgagatgagtcatcacgcccaggcagaggacagagataatggacctgggagacgccctctgccaggcagggcagctgccggagggagaacaatggacgagataagacgccaccctgataagggcaacggacagcagagacccaccaagcaaaaatcagaagaacagctgcaggcttactataaaaagacactagaggaacgactttcagctggggcacttaacaccttcccccgagcattcaagcaggtaatggaaggccgggatataaagctagtaatcaatcagacagcgcaggactgcttcggatgcctggaatccataagccaaataagaacggcaacccgagataaaaaggacacggtgacccgggagaaacacccaaagaaaccttttcagaagtggatgaagaagagagcaatcaaaaaaggtaattatcttcggttccagcgtttattttatcttgatagagggaaactggctaaaatcattttagatgatattgaatgcttgtcttgtgacataccactcagtgaaatttattcggtttttaaaacaagatgggaaacaactggtagctttaaaagccttggggactttaaaacttacgggaaggctgacaacactgccttcagagaattaattacggctaaagaaattgagaaaaatgtgcaggaaatgaagaaaggctcggctcccggtccagacgggattactcttggggacgtcgtaaagatggatcccgagttttcccggaccatggagattttcaatttatggttaacaactggtaaaatcccggacatggtgagggggtgcagaaccgttttgattccaaaatcatcaaagccggatcgtttgaaagacattaataactggagacctatcacgatcggttccatcttgctgagactgttctccaggattgtaacagctaggctgagcaaagcgtgccccctgaacccaaggcaaagaggctttatcagagcggcgggatgctctgaaaacttaaaactcctgcaaactataatttggtcggccaaaagagaacacagaccactgggtgttgtattcgtggacatcgccaaggcttttgacaccgtaagccaccagcacatcattcatgctttgcagcaaagagaggtggatccccacatcgtcggtctggtgagcaatatgtacgagaacatcagtacgtatatcaccacaaagaggaacacacacacagacaaaatccagatccgggttggagtaaagcagggtgacccgatgtcgccccttttatttaacctggcaatggaccctctattatgcaagctggaagagagtggcaaaggataccaccgaggacagagcagcatcacagcgatggcatttgcagacgatctggttttgctgagcgactcctgggaaaatatgaatacaaatattagcatactggagaccttctgcaatctgaccggactcaaaacacaggggcaaaagtgccacggcttttacatcaagccgacaaaggactcttacaccatcaatgactgcgctgcctggactatcaacggcacacccctgaacatgatcgaccccggcgaatctgagaaatacctcggcctgcagtttgacccgtggattggaatagcaaggtccggtctctccacaaaactagatttttggcttcagcggatcgatcaagcaccacttaaacctctgcagaaaactgatattctcaaaacatacaccatccctcggctgatctacatagctgaccactcagaagtgaaaagcgcactactcgaaacccttgaccagaagatccggacagcggtcaaggaatggcttcacctacctccgtgcacctgcgatgccatcctgtactcgagcacgagagacggcggtttgggcatcaccaaattggcaggactgatccccagcgtgcaggcccgtagactgcatcggatcgcacagtcatctgacgatacgatgaaatgcttcatggaaaaagagaaaatggaacagctgcataagaaattgtggattcaagctggaggggacagagagaacataccctcgatttgggaagcaccaccgtcgagtgaaccaccaaacaacgtgagcacaaattcggaatgggaagcaccgacccagaaagataaatttccaaagccttgcaattggaggaaaaacgaattcaaaaaatggaccaaattggcatcccaaggccgcggaattgtaaattttgaaagagacaaaattagtaaccattggatccaatactacagacgcatacctcacaggaaactcctcactgcactacaactcagggccaacgtttaccccacgagagaatttctagccaggggtagacaagaccaatacatcaaggcgtgtaggcactgcgatgcggacaacgaatcctgcgcccacatcatcggcaactgcccagtgacacaggacgcccgaatcaagaggcacaattacatctgcgaactgcttctcgaggaggcgaagaagaaggactgggtagtgttcaaggaaccgcacataagggattccaacaaggaactgtacaaacctgacctgatatttgtgaaggatgggcgtgcacttgtcgtggatgtgacagtacggtatgaagcagccaaatcatcgctggaggaagccgctgcagagaaagtgagaaagtacaaacacctggaaacggaagtaagacatctcacgaatgcaaaggacgttacttttgtgggctttcccctaggagcgcgggggaaatggcaccaagataactttaaacttttgactgagcttggcctctccaaatcgaggcaagtgaaaatggcagagactttttccacagtagcgctcttttcatctgtggacattgtacatatgtttgccagtagggccagaaaatctatggttatgtgataataggctgccttctgcggggcttgccttctggccatgcccttcttctctcccttgcacctgtacctcttggtctttgaataaagcctgagtaggaaggaccggtaaaaaaaaaaaaaaaaaaaaaaaaaaaaaaacgttgactaaaaaaaaaaaaaaaaaaaaaaaaaaaaaaaaaaaaaaaaaaaaaaaaaaaaaaaaaaaaaaaaaaaaaa

SEQ ID NO: 11609 - DNA, 4439 bp, synthetic construct
  source 1..4439: mol_type = other DNA
gaaataagagagaaaagaagagtaagaagaaatataagagaattcgccaccatggcttcttgcccgaaacctggccccccggtttcagcaggggcaatgagtttggaaagtggactgaccacccactccgttctcgccatcgaacgtggtcccaattcgttggcaaattccggatcagactttgggggggggggtctggggctaccgttacgcctattgagggtatcggtcggcactcagacctcccgctccgactgggtagacctggtgtcctggagccacccaggacccacgtctaagtcccagcaggttgacctggtgtctttatttcctaaacaccgggttgacctgttatccaaaaacgaccaggtagacctggtggctcaatttttaccatctaaatttccccccaatttggcagaaaatgatttggctttgctggtgaacttagagttctacagatcggatttgcatgtgtatgagtgtgttcataaggctgcacattgggagggattaagtggtttgcctgaggtgtatgaacaacttgcaccacaaccgtgtgtgggagaaactttacattctagcctcccacgagacagtgaactgtttgtgcctgaagaggggagcagcgagaaggagagcgaggacgcgccaaaaacatctcctccgacgcctgggaaacatggtttggaacagactggggaggaaaaagtgatggtgactgttcctgacaaaaatccaccttgtccttgctgtggtacccgggtaaactctgtgttgaatctgattgaacatctgaaagtgtcacacgggaaaaggggggtttgttttcggtgtgcaaaatgtggaaaggaaaatagtaactatcacagtgttgtttgtcattttaagaaatgcaggggtccagagacggagaaagccccagctggggagtggatttgtgaggtatgcaacagagattttacaaccaaaattggcctgggacaacacaagagattggcacacccagcagtgagaaatcaggaaaggatcgttgcttcccaaccgaaagaaacatcaaatagaggtgctcacaaaaggtgctggacaaaggaggaggaagaattactaataagactggaggctcagttcgagggaaacaaaaatattaataagcttattgcagaacacataaccaccaaaacagctaagcagatcagtgacaaaaggcgattgctgtccagaaagccagcagaggagccacgtgaggagcctggaacgtgtcatcacaccaggagagcagctgcgagcctgagaacggagcctgagatgagtcatcacgcccaggcagaggacagagataatggacctgggagacgccctctgccaggcagggcagctgccggagggagaacaatggacgagataagacgccaccctgataagggcaacggacagcagagacccaccaagcaaaaatcagaagaacagctgcaggcttactataaaaagacactagaggaacgactttcagctggggcacttaacaccttcccccgagcattcaagcaggtaatggaaggccgggatataaagctagtaatcaatcagacagcgcaggactgcttcggatgcctggaatccataagccaaataagaacggcaacccgagataaaaaggacacggtgacccgggagaaacacccaaagaaaccttttcagaagtggatgaagaagagagcaatcaaaaaaggtaattatcttcggttccagcgtttattttatcttgatagagggaaactggctaaaatcattttagatgatattgaatgcttgtcttgtgacataccactcagtgaaatttattcggtttttaaaacaagatgggaaacaactggtagctttaaaagccttggggactttaaaacttacgggaaggctgacaacactgccttcagagaattaattacggctaaagaaattgagaaaaatgtgcaggaaatgagcaaaggctcgagccccggtccagacgggattactcttggggacgtcgtaaagatggatcccgagttttcccggaccatggagattttcaatttatggttaacaactggtaaaatcccggacatggtgagggggtgcagaaccgttttgattccaaaatcatcaaagccggatcgtttgaaagacattaataactggagacctatcacgatcggttccatcttgctgagactgttctccaggattgtaacagctaggctgagcaaagcgtgccccctgaacccaaggcaaagaggctttatcagagcggcgggatgctctgaaaacttaaaactcctgcaaactataatttggtcggccaaaagagaacacagaccactgggtgttgtattcgtggacatcgccaaggcttttgacaccgtaagccaccagcacatcattcatgctttgcagcaaagagaggtggatccccacatcgtcggtctggtgagcaatatgtacgagaacatcagtacgtatatcaccacaaagaggaacacacacacagacaaaatccagatccgggttggagtaaagcagggtgacccgatgtcgccccttttatttaacctggcaatggaccctctattatgcaagctggaagagagtggcaaaggataccaccgaggacagagcagcatcacagcgatggcatttgcagacgatctggttttgctgagcgactcctgggaaaatatgaatacaaatattagcatactggagaccttctgcaatctgaccggactcaaaacacaggggcaaaagtgccacggcttttacatcaagccgacaaaggactcttacaccatcaatgactgcgctgcctggactatcaacggcacacccctgaacatgatcgaccccggcgaatctgagaaatacctcggcctgcagtttgacccgtggattggaatagcaaggtccggtctctccacaaaactagatttttggcttcagcggatcgatcaagcaccacttaaacctctgcagaaaactgatattctcaaaacatacaccatccctcggctgatctacatagctgaccactcagaagtgaaaagcgcactactcgaaacccttgaccagaagatccggacagcggtcaaggaatggcttcacctacctccgtgcacctgcgatgccatcctgtactcgagcacgagagacggcggtttgggcatcaccaaattggcaggactgatccccagcgtgcaggcccgtagactgcatcggatcgcacagtcatctgacgatacgatgaaatgcttcatggaaaaagagaaaatggaacagctgcataagaaattgtggattcaagctggaggggacagagagaacataccctcgatttgggaagcaccaccgtcgagtgaaccaccaaacaacgtgagcacaaattcggaatgggaagcaccgacccagaaagataaatttccaaagccttgcaattggaggaaaaacgaattcaaaaaatggaccaaattggcatcccaaggccgcggaattgtaaattttgaaagagacaaaattagtaaccattggatccaatactacagacgcatacctcacaggaaactcctcactgcactacaactcagggccaacgtttaccccacgagagaatttctagccaggggtagacaagaccaatacatcaaggcgtgtaggcactgcgatgcggacaacgaatcctgcgcccacatcatcggcaactgcccagtgacacaggacgcccgaatcaagaggcacaattacatctgcgaactgcttctcgaggaggcgaagaagaaggactgggtagtgttcaaggaaccgcacataagggattccaacaaggaactgtacaaacctgacctgatatttgtgaaggatgggcgtgcacttgtcgtggatgtgacagtacggtatgaagcagccaaatcatcgctggaggaagccgctgcagagaaagtgagaaagtacaaacacctggaaacggaagtaagacatctcacgaatgcaaaggacgttacttttgtgggctttcccctaggagcgcgggggaaatggcaccaagataactttaaacttttgactgagcttggcctctccaaatcgaggcaagtgaaaatggcagagactttttccacagtagcgctcttttcatctgtggacattgtacatatgtttgccagtagggccagaaaatctatggttatgtgataataggctgccttctgcggggcttgccttctggccatgcccttcttctctcccttgcacctgtacctcttggtctttgaataaagcctgagtaggaaggaccggtaaaaaaaaaaaaaaaaaaaaaaaaaaaaaaacgttgactaaaaaaaaaaaaaaaaaaaaaaaaaaaaaaaaaaaaaaaaaaaaaaaaaaaaaaaaaaaaaaaaaaaaaa

SEQ ID NO: 11610 - DNA, 4439 bp, synthetic construct
  source 1..4439: mol_type = other DNA
gaaataagagagaaaagaagagtaagaagaaatataagagaattcgccaccatggcttcttgcccgaaacctggccccccggtttcagcaggggcaatgagtttggaaagtggactgaccacccactccgttctcgccatcgaacgtggtcccaattcgttggcaaattccggatcagactttgggggggggggtctggggctaccgttacgcctattgagggtatcggtcggcactcagacctcccgctccgactgggtagacctggtgtcctggagccacccaggacccacgtctaagtcccagcaggttgacctggtgtctttatttcctaaacaccgggttgacctgttatccaaaaacgaccaggtagacctggtggctcaatttttaccatctaaatttccccccaatttggcagaaaatgatttggctttgctggtgaacttagagttctacagatcggatttgcatgtgtatgagtgtgttcataaggctgcacattgggagggattaagtggtttgcctgaggtgtatgaacaacttgcaccacaaccgtgtgtgggagaaactttacattctagcctcccacgagacagtgaactgtttgtgcctgaagaggggagcagcgagaaggagagcgaggacgcgccaaaaacatctcctccgacgcctgggaaacatggtttggaacagactggggaggaaaaagtgatggtgactgttcctgacaaaaatccaccttgtccttgctgtggtacccgggtaaactctgtgttgaatctgattgaacatctgaaagtgtcacacgggaaaaggggggtttgttttcggtgtgcaaaatgtggaaaggaaaatagtaactatcacagtgttgtttgtcattttaagaaatgcaggggtccagagacggagaaagccccagctggggagtggatttgtgaggtatgcaacagagattttacaaccaaaattggcctgggacaacacaagagattggcacacccagcagtgagaaatcaggaaaggatcgttgcttcccaaccgaaagaaacatcaaatagaggtgctcacaaaaggtgctggacaaaggaggaggaagaattactaataagactggaggctcagttcgagggaaacaaaaatattaataagcttattgcagaacacataaccaccaaaacagctaagcagatcagtgacaaaaggcgattgctgtccagaaagccagcagaggagccacgtgaggagcctggaacgtgtcatcacaccaggagagcagctgcgagcctgagaacggagcctgagatgagtcatcacgcccaggcagaggacagagataatggacctgggagacgccctctgccaggcagggcagctgccggagggagaacaatggacgagataagacgccaccctgataagggcaacggacagcagagacccaccaagcaaaaatcagaagaacagctgcaggcttactataaaaagacactagaggaacgactttcagctggggcacttaacaccttcccccgagcattcaagcaggtaatggaaggccgggatataaagctagtaatcaatcagacagcgcaggactgcttcggatgcctggaatccataagccaaataagaacggcaacccgagataaaaaggacacggtgacccgggagaaacacccaaagaaaccttttcagaagtggatgaagaagagagcaatcaaaaaaggtaattatcttcggttccagcgtttattttatcttgatagagggaaactggctaaaatcattttagatgatattgaatgcttgtcttgtgacataccactcagtgaaatttattcggtttttaaaacaagatgggaaacaactggtagctttaaaagccttggggactttaaaacttacgggaaggctgacaacactgccttcagagaattaattacggctaaagaaattgagaaaaatgtgcaggaaatgagcaaaggctcggctcccggtccagacgggattactcttggggacgtcgtaaagatggatcccgagttttcccggaccatggagattttcaatttatggttaacaactggtaaaatcccggacatggtgagggggtgcagaaccaccttgattccaaaatcatcaaagccggatcgtttgaaagacattaataactggagacctatcacgatcggttccatcttgctgagactgttctccaggattgtaacagctaggctgagcaaagcgtgccccctgaacccaaggcaaagaggctttatcagagcggcgggatgctctgaaaacttaaaactcctgcaaactataatttggtcggccaaaagagaacacagaccactgggtgttgtattcgtggacatcgccaaggcttttgacaccgtaagccaccagcacatcattcatgctttgcagcaaagagaggtggatccccacatcgtcggtctggtgagcaatatgtacgagaacatcagtacgtatatcaccacaaagaggaacacacacacagacaaaatccagatccgggttggagtaaagcagggtgacccgatgtcgccccttttatttaacctggcaatggaccctctattatgcaagctggaagagagtggcaaaggataccaccgaggacagagcagcatcacagcgatggcatttgcagacgatctggttttgctgagcgactcctgggaaaatatgaatacaaatattagcatactggagaccttctgcaatctgaccggactcaaaacacaggggcaaaagtgccacggcttttacatcaagccgacaaaggactcttacaccatcaatgactgcgctgcctggactatcaacggcacacccctgaacatgatcgaccccggcgaatctgagaaatacctcggcctgcagtttgacccgtggattggaatagcaaggtccggtctctccacaaaactagatttttggcttcagcggatcgatcaagcaccacttaaacctctgcagaaaactgatattctcaaaacatacaccatccctcggctgatctacatagctgaccactcagaagtgaaaagcgcactactcgaaacccttgaccagaagatccggacagcggtcaaggaatggcttcacctacctccgtgcacctgcgatgccatcctgtactcgagcacgagagacggcggtttgggcatcaccaaattggcaggactgatccccagcgtgcaggcccgtagactgcatcggatcgcacagtcatctgacgatacgatgaaatgcttcatggaaaaagagaaaatggaacagctgcataagaaattgtggattcaagctggaggggacagagagaacataccctcgatttgggaagcaccaccgtcgagtgaaccaccaaacaacgtgagcacaaattcggaatgggaagcaccgacccagaaagataaatttccaaagccttgcaattggaggaaaaacgaattcaaaaaatggaccaaattggcatcccaaggccgcggaattgtaaattttgaaagagacaaaattagtaaccattggatccaatactacagacgcatacctcacaggaaactcctcactgcactacaactcagggccaacgtttaccccacgagagaatttctagccaggggtagacaagaccaatacatcaaggcgtgtaggcactgcgatgcggacaacgaatcctgcgcccacatcatcggcaactgcccagtgacacaggacgcccgaatcaagaggcacaattacatctgcgaactgcttctcgaggaggcgaagaagaaggactgggtagtgttcaaggaaccgcacataagggattccaacaaggaactgtacaaacctgacctgatatttgtgaaggatgggcgtgcacttgtcgtggatgtgacagtacggtatgaagcagccaaatcatcgctggaggaagccgctgcagagaaagtgagaaagtacaaacacctggaaacggaagtaagacatctcacgaatgcaaaggacgttacttttgtgggctttcccctaggagcgcgggggaaatggcaccaagataactttaaacttttgactgagcttggcctctccaaatcgaggcaagtgaaaatggcagagactttttccacagtagcgctcttttcatctgtggacattgtacatatgtttgccagtagggccagaaaatctatggttatgtgataataggctgccttctgcggggcttgccttctggccatgcccttcttctctcccttgcacctgtacctcttggtctttgaataaagcctgagtaggaaggaccggtaaaaaaaaaaaaaaaaaaaaaaaaaaaaaaacgttgactaaaaaaaaaaaaaaaaaaaaaaaaaaaaaaaaaaaaaaaaaaaaaaaaaaaaaaaaaaaaaaaaaaaaaa

SEQ ID NO: 11611 - DNA, 4439 bp, synthetic construct
  source 1..4439: mol_type = other DNA
gaaataagagagaaaagaagagtaagaagaaatataagagaattcgccaccatggcttcttgcccgaaacctggccccccggtttcagcaggggcaatgagtttggaaagtggactgaccacccactccgttctcgccatcgaacgtggtcccaattcgttggcaaattccggatcagactttgggggggggggtctggggctaccgttacgcctattgagggtatcggtcggcactcagacctcccgctccgactgggtagacctggtgtcctggagccacccaggacccacgtctaagtcccagcaggttgacctggtgtctttatttcctaaacaccgggttgacctgttatccaaaaacgaccaggtagacctggtggctcaatttttaccatctaaatttccccccaatttggcagaaaatgatttggctttgctggtgaacttagagttctacagatcggatttgcatgtgtatgagtgtgttcataaggctgcacattgggagggattaagtggtttgcctgaggtgtatgaacaacttgcaccacaaccgtgtgtgggagaaactttacattctagcctcccacgagacagtgaactgtttgtgcctgaagaggggagcagcgagaaggagagcgaggacgcgccaaaaacatctcctccgacgcctgggaaacatggtttggaacagactggggaggaaaaagtgatggtgactgttcctgacaaaaatccaccttgtccttgctgtggtacccgggtaaactctgtgttgaatctgattgaacatctgaaagtgtcacacgggaaaaggggggtttgttttcggtgtgcaaaatgtggaaaggaaaatagtaactatcacagtgttgtttgtcattttaagaaatgcaggggtccagagacggagaaagccccagctggggagtggatttgtgaggtatgcaacagagattttacaaccaaaattggcctgggacaacacaagagattggcacacccagcagtgagaaatcaggaaaggatcgttgcttcccaaccgaaagaaacatcaaatagaggtgctcacaaaaggtgctggacaaaggaggaggaagaattactaataagactggaggctcagttcgagggaaacaaaaatattaataagcttattgcagaacacataaccaccaaaacagctaagcagatcagtgacaaaaggcgattgctgtccagaaagccagcagaggagccacgtgaggagcctggaacgtgtcatcacaccaggagagcagctgcgagcctgagaacggagcctgagatgagtcatcacgcccaggcagaggacagagataatggacctgggagacgccctctgccaggcagggcagctgccggagggagaacaatggacgagataagacgccaccctgataagggcaacggacagcagagacccaccaagcaaaaatcagaagaacagctgcaggcttactataaaaagacactagaggaacgactttcagctggggcacttaacaccttcccccgagcattcaagcaggtaatggaaggccgggatataaagctagtaatcaatcagacagcgcaggactgcttcggatgcctggaatccataagccaaataagaacggcaacccgagataaaaaggacacggtgacccgggagaaacacccaaagaaaccttttcagaagtggatgaagaagagagcaatcaaaaaaggtaattatcttcggttccagcgtttattttatcttgatagagggaaactggctaaaatcattttagatgatattgaatgcttgtcttgtgacataccactcagtgaaatttattcggtttttaaaacaagatgggaaacaactggtagctttaaaagccttggggactttaaaacttacgggaaggctgacaacactgccttcagagaattaattacggctaaagaaattgagaaaaatgtgcaggaaatgagcaaaggctcggctcccggtccagacgggattactcttggggacgtcgtaaagatggatcccgagttttcccggaccatggagattttcaatttatggttaacaactggtaaaatcccggacatggtgagggggtgcagaaccgttttgattccaaaatcatcaaagccggatcgtttgaaagacattaataactggagacctatcacgatcggttccatcttgctgagactgttctccaggattgtaacagctaggctgagcaaagcgtgccccctgaacccaaggcaaagaggctttaggagagcggcgggatgctctgaaaacttaaaactcctgcaaactataatttggtcggccaaaagagaacacagaccactgggtgttgtattcgtggacatcgccaaggcttttgacaccgtaagccaccagcacatcattcatgctttgcagcaaagagaggtggatccccacatcgtcggtctggtgagcaatatgtacgagaacatcagtacgtatatcaccacaaagaggaacacacacacagacaaaatccagatccgggttggagtaaagcagggtgacccgatgtcgccccttttatttaacctggcaatggaccctctattatgcaagctggaagagagtggcaaaggataccaccgaggacagagcagcatcacagcgatggcatttgcagacgatctggttttgctgagcgactcctgggaaaatatgaatacaaatattagcatactggagaccttctgcaatctgaccggactcaaaacacaggggcaaaagtgccacggcttttacatcaagccgacaaaggactcttacaccatcaatgactgcgctgcctggactatcaacggcacacccctgaacatgatcgaccccggcgaatctgagaaatacctcggcctgcagtttgacccgtggattggaatagcaaggtccggtctctccacaaaactagatttttggcttcagcggatcgatcaagcaccacttaaacctctgcagaaaactgatattctcaaaacatacaccatccctcggctgatctacatagctgaccactcagaagtgaaaagcgcactactcgaaacccttgaccagaagatccggacagcggtcaaggaatggcttcacctacctccgtgcacctgcgatgccatcctgtactcgagcacgagagacggcggtttgggcatcaccaaattggcaggactgatccccagcgtgcaggcccgtagactgcatcggatcgcacagtcatctgacgatacgatgaaatgcttcatggaaaaagagaaaatggaacagctgcataagaaattgtggattcaagctggaggggacagagagaacataccctcgatttgggaagcaccaccgtcgagtgaaccaccaaacaacgtgagcacaaattcggaatgggaagcaccgacccagaaagataaatttccaaagccttgcaattggaggaaaaacgaattcaaaaaatggaccaaattggcatcccaaggccgcggaattgtaaattttgaaagagacaaaattagtaaccattggatccaatactacagacgcatacctcacaggaaactcctcactgcactacaactcagggccaacgtttaccccacgagagaatttctagccaggggtagacaagaccaatacatcaaggcgtgtaggcactgcgatgcggacaacgaatcctgcgcccacatcatcggcaactgcccagtgacacaggacgcccgaatcaagaggcacaattacatctgcgaactgcttctcgaggaggcgaagaagaaggactgggtagtgttcaaggaaccgcacataagggattccaacaaggaactgtacaaacctgacctgatatttgtgaaggatgggcgtgcacttgtcgtggatgtgacagtacggtatgaagcagccaaatcatcgctggaggaagccgctgcagagaaagtgagaaagtacaaacacctggaaacggaagtaagacatctcacgaatgcaaaggacgttacttttgtgggctttcccctaggagcgcgggggaaatggcaccaagataactttaaacttttgactgagcttggcctctccaaatcgaggcaagtgaaaatggcagagactttttccacagtagcgctcttttcatctgtggacattgtacatatgtttgccagtagggccagaaaatctatggttatgtgataataggctgccttctgcggggcttgccttctggccatgcccttcttctctcccttgcacctgtacctcttggtctttgaataaagcctgagtaggaaggaccggtaaaaaaaaaaaaaaaaaaaaaaaaaaaaaaacgttgactaaaaaaaaaaaaaaaaaaaaaaaaaaaaaaaaaaaaaaaaaaaaaaaaaaaaaaaaaaaaaaaaaaaaaa

SEQ ID NO: 11612 - DNA, 4439 bp, synthetic construct
  source 1..4439: mol_type = other DNA
gaaataagagagaaaagaagagtaagaagaaatataagagaattcgccaccatggcttcttgcccgaaacctggccccccggtttcagcaggggcaatgagtttggaaagtggactgaccacccactccgttctcgccatcgaacgtggtcccaattcgttggcaaattccggatcagactttgggggggggggtctggggctaccgttacgcctattgagggtatcggtcggcactcagacctcccgctccgactgggtagacctggtgtcctggagccacccaggacccacgtctaagtcccagcaggttgacctggtgtctttatttcctaaacaccgggttgacctgttatccaaaaacgaccaggtagacctggtggctcaatttttaccatctaaatttccccccaatttggcagaaaatgatttggctttgctggtgaacttagagttctacagatcggatttgcatgtgtatgagtgtgttcataaggctgcacattgggagggattaagtggtttgcctgaggtgtatgaacaacttgcaccacaaccgtgtgtgggagaaactttacattctagcctcccacgagacagtgaactgtttgtgcctgaagaggggagcagcgagaaggagagcgaggacgcgccaaaaacatctcctccgacgcctgggaaacatggtttggaacagactggggaggaaaaagtgatggtgactgttcctgacaaaaatccaccttgtccttgctgtggtacccgggtaaactctgtgttgaatctgattgaacatctgaaagtgtcacacgggaaaaggggggtttgttttcggtgtgcaaaatgtggaaaggaaaatagtaactatcacagtgttgtttgtcattttaagaaatgcaggggtccagagacggagaaagccccagctggggagtggatttgtgaggtatgcaacagagattttacaaccaaaattggcctgggacaacacaagagattggcacacccagcagtgagaaatcaggaaaggatcgttgcttcccaaccgaaagaaacatcaaatagaggtgctcacaaaaggtgctggacaaaggaggaggaagaattactaataagactggaggctcagttcgagggaaacaaaaatattaataagcttattgcagaacacataaccaccaaaacagctaagcagatcagtgacaaaaggcgattgctgtccagaaagccagcagaggagccacgtgaggagcctggaacgtgtcatcacaccaggagagcagctgcgagcctgagaacggagcctgagatgagtcatcacgcccaggcagaggacagagataatggacctgggagacgccctctgccaggcagggcagctgccggagggagaacaatggacgagataagacgccaccctgataagggcaacggacagcagagacccaccaagcaaaaatcagaagaacagctgcaggcttactataaaaagacactagaggaacgactttcagctggggcacttaacaccttcccccgagcattcaagcaggtaatggaaggccgggatataaagctagtaatcaatcagacagcgcaggactgcttcggatgcctggaatccataagccaaataagaacggcaacccgagataaaaaggacacggtgacccgggagaaacacccaaagaaaccttttcagaagtggatgaagaagagagcaatcaaaaaaggtaattatcttcggttccagcgtttattttatcttgatagagggaaactggctaaaatcattttagatgatattgaatgcttgtcttgtgacataccactcagtgaaatttattcggtttttaaaacaagatgggaaacaactggtagctttaaaagccttggggactttaaaacttacgggaaggctgacaacactgccttcagagaattaattacggctaaagaaattgagaaaaatgtgcaggaaatgagcaaaggctcggctcccggtccagacgggattactcttggggacgtcgtaaagatggatcccgagttttcccggaccatggagattttcaatttatggttaacaactggtaaaatcccggacatggtgagggggtgcagaaccgttttgattccaaaatcatcaaagccggatcgtttgaaagacattaataactggagacctatcacgatcggttccatcttgctgagactgttctccaggattgtaacagctaggctgagcaaagcgtgccccctgaacccaaggcaaagaggctttatcagagcggcgggatgctctgaaaacttaaaactcctgcaaactataatttggtcggccaaaagagaacacagaccactggccgttgtattcgtggacatcgccaaggcttttgacaccgtaagccaccagcacatcattcatgctttgcagcaaagagaggtggatccccacatcgtcggtctggtgagcaatatgtacgagaacatcagtacgtatatcaccacaaagaggaacacacacacagacaaaatccagatccgggttggagtaaagcagggtgacccgatgtcgccccttttatttaacctggcaatggaccctctattatgcaagctggaagagagtggcaaaggataccaccgaggacagagcagcatcacagcgatggcatttgcagacgatctggttttgctgagcgactcctgggaaaatatgaatacaaatattagcatactggagaccttctgcaatctgaccggactcaaaacacaggggcaaaagtgccacggcttttacatcaagccgacaaaggactcttacaccatcaatgactgcgctgcctggactatcaacggcacacccctgaacatgatcgaccccggcgaatctgagaaatacctcggcctgcagtttgacccgtggattggaatagcaaggtccggtctctccacaaaactagatttttggcttcagcggatcgatcaagcaccacttaaacctctgcagaaaactgatattctcaaaacatacaccatccctcggctgatctacatagctgaccactcagaagtgaaaagcgcactactcgaaacccttgaccagaagatccggacagcggtcaaggaatggcttcacctacctccgtgcacctgcgatgccatcctgtactcgagcacgagagacggcggtttgggcatcaccaaattggcaggactgatccccagcgtgcaggcccgtagactgcatcggatcgcacagtcatctgacgatacgatgaaatgcttcatggaaaaagagaaaatggaacagctgcataagaaattgtggattcaagctggaggggacagagagaacataccctcgatttgggaagcaccaccgtcgagtgaaccaccaaacaacgtgagcacaaattcggaatgggaagcaccgacccagaaagataaatttccaaagccttgcaattggaggaaaaacgaattcaaaaaatggaccaaattggcatcccaaggccgcggaattgtaaattttgaaagagacaaaattagtaaccattggatccaatactacagacgcatacctcacaggaaactcctcactgcactacaactcagggccaacgtttaccccacgagagaatttctagccaggggtagacaagaccaatacatcaaggcgtgtaggcactgcgatgcggacaacgaatcctgcgcccacatcatcggcaactgcccagtgacacaggacgcccgaatcaagaggcacaattacatctgcgaactgcttctcgaggaggcgaagaagaaggactgggtagtgttcaaggaaccgcacataagggattccaacaaggaactgtacaaacctgacctgatatttgtgaaggatgggcgtgcacttgtcgtggatgtgacagtacggtatgaagcagccaaatcatcgctggaggaagccgctgcagagaaagtgagaaagtacaaacacctggaaacggaagtaagacatctcacgaatgcaaaggacgttacttttgtgggctttcccctaggagcgcgggggaaatggcaccaagataactttaaacttttgactgagcttggcctctccaaatcgaggcaagtgaaaatggcagagactttttccacagtagcgctcttttcatctgtggacattgtacatatgtttgccagtagggccagaaaatctatggttatgtgataataggctgccttctgcggggcttgccttctggccatgcccttcttctctcccttgcacctgtacctcttggtctttgaataaagcctgagtaggaaggaccggtaaaaaaaaaaaaaaaaaaaaaaaaaaaaaaacgttgactaaaaaaaaaaaaaaaaaaaaaaaaaaaaaaaaaaaaaaaaaaaaaaaaaaaaaaaaaaaaaaaaaaaaaa

SEQ ID NO: 11613 - DNA, 4439 bp, synthetic construct
  source 1..4439: mol_type = other DNA
gaaataagagagaaaagaagagtaagaagaaatataagagaattcgccaccatggcttcttgcccgaaacctggccccccggtttcagcaggggcaatgagtttggaaagtggactgaccacccactccgttctcgccatcgaacgtggtcccaattcgttggcaaattccggatcagactttgggggggggggtctggggctaccgttacgcctattgagggtatcggtcggcactcagacctcccgctccgactgggtagacctggtgtcctggagccacccaggacccacgtctaagtcccagcaggttgacctggtgtctttatttcctaaacaccgggttgacctgttatccaaaaacgaccaggtagacctggtggctcaatttttaccatctaaatttccccccaatttggcagaaaatgatttggctttgctggtgaacttagagttctacagatcggatttgcatgtgtatgagtgtgttcataaggctgcacattgggagggattaagtggtttgcctgaggtgtatgaacaacttgcaccacaaccgtgtgtgggagaaactttacattctagcctcccacgagacagtgaactgtttgtgcctgaagaggggagcagcgagaaggagagcgaggacgcgccaaaaacatctcctccgacgcctgggaaacatggtttggaacagactggggaggaaaaagtgatggtgactgttcctgacaaaaatccaccttgtccttgctgtggtacccgggtaaactctgtgttgaatctgattgaacatctgaaagtgtcacacgggaaaaggggggtttgttttcggtgtgcaaaatgtggaaaggaaaatagtaactatcacagtgttgtttgtcattttaagaaatgcaggggtccagagacggagaaagccccagctggggagtggatttgtgaggtatgcaacagagattttacaaccaaaattggcctgggacaacacaagagattggcacacccagcagtgagaaatcaggaaaggatcgttgcttcccaaccgaaagaaacatcaaatagaggtgctcacaaaaggtgctggacaaaggaggaggaagaattactaataagactggaggctcagttcgagggaaacaaaaatattaataagcttattgcagaacacataaccaccaaaacagctaagcagatcagtgacaaaaggcgattgctgtccagaaagccagcagaggagccacgtgaggagcctggaacgtgtcatcacaccaggagagcagctgcgagcctgagaacggagcctgagatgagtcatcacgcccaggcagaggacagagataatggacctgggagacgccctctgccaggcagggcagctgccggagggagaacaatggacgagataagacgccaccctgataagggcaacggacagcagagacccaccaagcaaaaatcagaagaacagctgcaggcttactataaaaagacactagaggaacgactttcagctggggcacttaacaccttcccccgagcattcaagcaggtaatggaaggccgggatataaagctagtaatcaatcagacagcgcaggactgcttcggatgcctggaatccataagccaaataagaacggcaacccgagataaaaaggacacggtgacccgggagaaacacccaaagaaaccttttcagaagtggatgaagaagagagcaatcaaaaaaggtaattatcttcggttccagcgtttattttatcttgatagagggaaactggctaaaatcattttagatgatattgaatgcttgtcttgtgacataccactcagtgaaatttattcggtttttaaaacaagatgggaaacaactggtagctttaaaagccttggggactttaaaacttacgggaaggctgacaacactgccttcagagaattaattacggctaaagaaattgagaaaaatgtgcaggaaatgagcaaaggctcggctcccggtccagacgggattactcttggggacgtcgtaaagatggatcccgagttttcccggaccatggagattttcaatttatggttaacaactggtaaaatcccggacatggtgagggggtgcagaaccgttttgattccaaaatcatcaaagccggatcgtttgaaagacattaataactggagacctatcacgatcggttccatcttgctgagactgttctccaggattgtaacagctaggctgagcaaagcgtgccccctgaacccaaggcaaagaggctttatcagaagcgcgggatgctctgaaaacttaaaactcctgcaaactataatttggtcggccaaaagagaacacagaccactgggtgttgtattcgtggacatcgccaaggcttttgacaccgtaagccaccagcacatcattcatgctttgcagcaaagagaggtggatccccacatcgtcggtctggtgagcaatatgtacgagaacatcagtacgtatatcaccacaaagaggaacacacacacagacaaaatccagatccgggttggagtaaagcagggtgacccgatgtcgccccttttatttaacctggcaatggaccctctattatgcaagctggaagagagtggcaaaggataccaccgaggacagagcagcatcacagcgatggcatttgcagacgatctggttttgctgagcgactcctgggaaaatatgaatacaaatattagcatactggagaccttctgcaatctgaccggactcaaaacacaggggcaaaagtgccacggcttttacatcaagccgacaaaggactcttacaccatcaatgactgcgctgcctggactatcaacggcacacccctgaacatgatcgaccccggcgaatctgagaaatacctcggcctgcagtttgacccgtggattggaatagcaaggtccggtctctccacaaaactagatttttggcttcagcggatcgatcaagcaccacttaaacctctgcagaaaactgatattctcaaaacatacaccatccctcggctgatctacatagctgaccactcagaagtgaaaagcgcactactcgaaacccttgaccagaagatccggacagcggtcaaggaatggcttcacctacctccgtgcacctgcgatgccatcctgtactcgagcacgagagacggcggtttgggcatcaccaaattggcaggactgatccccagcgtgcaggcccgtagactgcatcggatcgcacagtcatctgacgatacgatgaaatgcttcatggaaaaagagaaaatggaacagctgcataagaaattgtggattcaagctggaggggacagagagaacataccctcgatttgggaagcaccaccgtcgagtgaaccaccaaacaacgtgagcacaaattcggaatgggaagcaccgacccagaaagataaatttccaaagccttgcaattggaggaaaaacgaattcaaaaaatggaccaaattggcatcccaaggccgcggaattgtaaattttgaaagagacaaaattagtaaccattggatccaatactacagacgcatacctcacaggaaactcctcactgcactacaactcagggccaacgtttaccccacgagagaatttctagccaggggtagacaagaccaatacatcaaggcgtgtaggcactgcgatgcggacaacgaatcctgcgcccacatcatcggcaactgcccagtgacacaggacgcccgaatcaagaggcacaattacatctgcgaactgcttctcgaggaggcgaagaagaaggactgggtagtgttcaaggaaccgcacataagggattccaacaaggaactgtacaaacctgacctgatatttgtgaaggatgggcgtgcacttgtcgtggatgtgacagtacggtatgaagcagccaaatcatcgctggaggaagccgctgcagagaaagtgagaaagtacaaacacctggaaacggaagtaagacatctcacgaatgcaaaggacgttacttttgtgggctttcccctaggagcgcgggggaaatggcaccaagataactttaaacttttgactgagcttggcctctccaaatcgaggcaagtgaaaatggcagagactttttccacagtagcgctcttttcatctgtggacattgtacatatgtttgccagtagggccagaaaatctatggttatgtgataataggctgccttctgcggggcttgccttctggccatgcccttcttctctcccttgcacctgtacctcttggtctttgaataaagcctgagtaggaaggaccggtaaaaaaaaaaaaaaaaaaaaaaaaaaaaaaacgttgactaaaaaaaaaaaaaaaaaaaaaaaaaaaaaaaaaaaaaaaaaaaaaaaaaaaaaaaaaaaaaaaaaaaaaa

SEQ ID NO: 11614 - DNA, 4439 bp, synthetic construct
  source 1..4439: mol_type = other DNA
gaaataagagagaaaagaagagtaagaagaaatataagagaattcgccaccatggcttcttgcccgaaacctggccccccggtttcagcaggggcaatgagtttggaaagtggactgaccacccactccgttctcgccatcgaacgtggtcccaattcgttggcaaattccggatcagactttgggggggggggtctggggctaccgttacgcctattgagggtatcggtcggcactcagacctcccgctccgactgggtagacctggtgtcctggagccacccaggacccacgtctaagtcccagcaggttgacctggtgtctttatttcctaaacaccgggttgacctgttatccaaaaacgaccaggtagacctggtggctcaatttttaccatctaaatttccccccaatttggcagaaaatgatttggctttgctggtgaacttagagttctacagatcggatttgcatgtgtatgagtgtgttcataaggctgcacattgggagggattaagtggtttgcctgaggtgtatgaacaacttgcaccacaaccgtgtgtgggagaaactttacattctagcctcccacgagacagtgaactgtttgtgcctgaagaggggagcagcgagaaggagagcgaggacgcgccaaaaacatctcctccgacgcctgggaaacatggtttggaacagactggggaggaaaaagtgatggtgactgttcctgacaaaaatccaccttgtccttgctgtggtacccgggtaaactctgtgttgaatctgattgaacatctgaaagtgtcacacgggaaaaggggggtttgttttcggtgtgcaaaatgtggaaaggaaaatagtaactatcacagtgttgtttgtcattttaagaaatgcaggggtccagagacggagaaagccccagctggggagtggatttgtgaggtatgcaacagagattttacaaccaaaattggcctgggacaacacaagagattggcacacccagcagtgagaaatcaggaaaggatcgttgcttcccaaccgaaagaaacatcaaatagaggtgctcacaaaaggtgctggacaaaggaggaggaagaattactaataagactggaggctcagttcgagggaaacaaaaatattaataagcttattgcagaacacataaccaccaaaacagctaagcagatcagtgacaaaaggcgattgctgtccagaaagccagcagaggagccacgtgaggagcctggaacgtgtcatcacaccaggagagcagctgcgagcctgagaacggagcctgagatgagtcatcacgcccaggcagaggacagagataatggacctgggagacgccctctgccaggcagggcagctgccggagggagaacaatggacgagataagacgccaccctgataagggcaacggacagcagagacccaccaagcaaaaatcagaagaacagctgcaggcttactataaaaagacactagaggaacgactttcagctggggcacttaacaccttcccccgagcattcaagcaggtaatggaaggccgggatataaagctagtaatcaatcagacagcgcaggactgcttcggatgcctggaatccataagccaaataagaacggcaacccgagataaaaaggacacggtgacccgggagaaacacccaaagaaaccttttcagaagtggatgaagaagagagcaatcaaaaaaggtaattatcttcggttccagcgtttattttatcttgatagagggaaactggctaaaatcattttagatgatattgaatgcttgtcttgtgacataccactcagtgaaatttattcggtttttaaaacaagatgggaaacaactggtagctttaaaagccttggggactttaaaacttacgggaaggctgacaacactgccttcagagaattaattacggctaaagaaattgagaaaaatgtgcaggaaatgagcaaaggctcggctcccggtccagacgggattactcttggggacgtcgtaaagatggatcccgagttttcccggaccatggagattttcaatttatggttaacaactggtaaaatcccggacatggtgagggggtgcagaaccgttttgattccaaaatcatcaaagccggatcgtttgaaagacattaataactggagacctatcacgatcggttccatcttgctgagactgttctccaggattgtaacagctaggctgagcaaagcgtgccccctgaacccaaggcaaagaggctttatcagagcgcccggatgctctgaaaacttaaaactcctgcaaactataatttggtcggccaaaagagaacacagaccactgggtgttgtattcgtggacatcgccaaggcttttgacaccgtaagccaccagcacatcattcatgctttgcagcaaagagaggtggatccccacatcgtcggtctggtgagcaatatgtacgagaacatcagtacgtatatcaccacaaagaggaacacacacacagacaaaatccagatccgggttggagtaaagcagggtgacccgatgtcgccccttttatttaacctggcaatggaccctctattatgcaagctggaagagagtggcaaaggataccaccgaggacagagcagcatcacagcgatggcatttgcagacgatctggttttgctgagcgactcctgggaaaatatgaatacaaatattagcatactggagaccttctgcaatctgaccggactcaaaacacaggggcaaaagtgccacggcttttacatcaagccgacaaaggactcttacaccatcaatgactgcgctgcctggactatcaacggcacacccctgaacatgatcgaccccggcgaatctgagaaatacctcggcctgcagtttgacccgtggattggaatagcaaggtccggtctctccacaaaactagatttttggcttcagcggatcgatcaagcaccacttaaacctctgcagaaaactgatattctcaaaacatacaccatccctcggctgatctacatagctgaccactcagaagtgaaaagcgcactactcgaaacccttgaccagaagatccggacagcggtcaaggaatggcttcacctacctccgtgcacctgcgatgccatcctgtactcgagcacgagagacggcggtttgggcatcaccaaattggcaggactgatccccagcgtgcaggcccgtagactgcatcggatcgcacagtcatctgacgatacgatgaaatgcttcatggaaaaagagaaaatggaacagctgcataagaaattgtggattcaagctggaggggacagagagaacataccctcgatttgggaagcaccaccgtcgagtgaaccaccaaacaacgtgagcacaaattcggaatgggaagcaccgacccagaaagataaatttccaaagccttgcaattggaggaaaaacgaattcaaaaaatggaccaaattggcatcccaaggccgcggaattgtaaattttgaaagagacaaaattagtaaccattggatccaatactacagacgcatacctcacaggaaactcctcactgcactacaactcagggccaacgtttaccccacgagagaatttctagccaggggtagacaagaccaatacatcaaggcgtgtaggcactgcgatgcggacaacgaatcctgcgcccacatcatcggcaactgcccagtgacacaggacgcccgaatcaagaggcacaattacatctgcgaactgcttctcgaggaggcgaagaagaaggactgggtagtgttcaaggaaccgcacataagggattccaacaaggaactgtacaaacctgacctgatatttgtgaaggatgggcgtgcacttgtcgtggatgtgacagtacggtatgaagcagccaaatcatcgctggaggaagccgctgcagagaaagtgagaaagtacaaacacctggaaacggaagtaagacatctcacgaatgcaaaggacgttacttttgtgggctttcccctaggagcgcgggggaaatggcaccaagataactttaaacttttgactgagcttggcctctccaaatcgaggcaagtgaaaatggcagagactttttccacagtagcgctcttttcatctgtggacattgtacatatgtttgccagtagggccagaaaatctatggttatgtgataataggctgccttctgcggggcttgccttctggccatgcccttcttctctcccttgcacctgtacctcttggtctttgaataaagcctgagtaggaaggaccggtaaaaaaaaaaaaaaaaaaaaaaaaaaaaaaacgttgactaaaaaaaaaaaaaaaaaaaaaaaaaaaaaaaaaaaaaaaaaaaaaaaaaaaaaaaaaaaaaaaaaaaaaa

SEQ ID NO: 11615 - DNA, 4439 bp, synthetic construct
  source 1..4439: mol_type = other DNA
gaaataagagagaaaagaagagtaagaagaaatataagagaattcgccaccatggcttcttgcccgaaacctggccccccggtttcagcaggggcaatgagtttggaaagtggactgaccacccactccgttctcgccatcgaacgtggtcccaattcgttggcaaattccggatcagactttgggggggggggtctggggctaccgttacgcctattgagggtatcggtcggcactcagacctcccgctccgactgggtagacctggtgtcctggagccacccaggacccacgtctaagtcccagcaggttgacctggtgtctttatttcctaaacaccgggttgacctgttatccaaaaacgaccaggtagacctggtggctcaatttttaccatctaaatttccccccaatttggcagaaaatgatttggctttgctggtgaacttagagttctacagatcggatttgcatgtgtatgagtgtgttcataaggctgcacattgggagggattaagtggtttgcctgaggtgtatgaacaacttgcaccacaaccgtgtgtgggagaaactttacattctagcctcccacgagacagtgaactgtttgtgcctgaagaggggagcagcgagaaggagagcgaggacgcgccaaaaacatctcctccgacgcctgggaaacatggtttggaacagactggggaggaaaaagtgatggtgactgttcctgacaaaaatccaccttgtccttgctgtggtacccgggtaaactctgtgttgaatctgattgaacatctgaaagtgtcacacgggaaaaggggggtttgttttcggtgtgcaaaatgtggaaaggaaaatagtaactatcacagtgttgtttgtcattttaagaaatgcaggggtccagagacggagaaagccccagctggggagtggatttgtgaggtatgcaacagagattttacaaccaaaattggcctgggacaacacaagagattggcacacccagcagtgagaaatcaggaaaggatcgttgcttcccaaccgaaagaaacatcaaatagaggtgctcacaaaaggtgctggacaaaggaggaggaagaattactaataagactggaggctcagttcgagggaaacaaaaatattaataagcttattgcagaacacataaccaccaaaacagctaagcagatcagtgacaaaaggcgattgctgtccagaaagccagcagaggagccacgtgaggagcctggaacgtgtcatcacaccaggagagcagctgcgagcctgagaacggagcctgagatgagtcatcacgcccaggcagaggacagagataatggacctgggagacgccctctgccaggcagggcagctgccggagggagaacaatggacgagataagacgccaccctgataagggcaacggacagcagagacccaccaagcaaaaatcagaagaacagctgcaggcttactataaaaagacactagaggaacgactttcagctggggcacttaacaccttcccccgagcattcaagcaggtaatggaaggccgggatataaagctagtaatcaatcagacagcgcaggactgcttcggatgcctggaatccataagccaaataagaacggcaacccgagataaaaaggacacggtgacccgggagaaacacccaaagaaaccttttcagaagtggatgaagaagagagcaatcaaaaaaggtaattatcttcggttccagcgtttattttatcttgatagagggaaactggctaaaatcattttagatgatattgaatgcttgtcttgtgacataccactcagtgaaatttattcggtttttaaaacaagatgggaaacaactggtagctttaaaagccttggggactttaaaacttacgggaaggctgacaacactgccttcagagaattaattacggctaaagaaattgagaaaaatgtgcaggaaatgagcaaaggctcggctcccggtccagacgggattactcttggggacgtcgtaaagatggatcccgagttttcccggaccatggagattttcaatttatggttaacaactggtaaaatcccggacatggtgagggggtgcagaaccgttttgattccaaaatcatcaaagccggatcgtttgaaagacattaataactggagacctatcacgatcggttccatcttgctgagactgttctccaggattgtaacagctaggctgagcaaagcgtgccccctgaacccaaggcaaagaggctttatcagagcggcgggatgctctgaaaacttaaaactcctgcaaactataatttggtcggccaaaagagaacacagaccactgggtgttgtattcgtggacttcgccaaggctttcgacaccgtaagccaccagcacatcattcatgctttgcagcaaagagaggtggatccccacatcgtcggtctggtgagcaatatgtacgagaacatcagtacgtatatcaccacaaagaggaacacacacacagacaaaatccagatccgggttggagtaaagcagggtgacccgatgtcgccccttttatttaacctggcaatggaccctctattatgcaagctggaagagagtggcaaaggataccaccgaggacagagcagcatcacagcgatggcatttgcagacgatctggttttgctgagcgactcctgggaaaatatgaatacaaatattagcatactggagaccttctgcaatctgaccggactcaaaacacaggggcaaaagtgccacggcttttacatcaagccgacaaaggactcttacaccatcaatgactgcgctgcctggactatcaacggcacacccctgaacatgatcgaccccggcgaatctgagaaatacctcggcctgcagtttgacccgtggattggaatagcaaggtccggtctctccacaaaactagatttttggcttcagcggatcgatcaagcaccacttaaacctctgcagaaaactgatattctcaaaacatacaccatccctcggctgatctacatagctgaccactcagaagtgaaaagcgcactactcgaaacccttgaccagaagatccggacagcggtcaaggaatggcttcacctacctccgtgcacctgcgatgccatcctgtactcgagcacgagagacggcggtttgggcatcaccaaattggcaggactgatccccagcgtgcaggcccgtagactgcatcggatcgcacagtcatctgacgatacgatgaaatgcttcatggaaaaagagaaaatggaacagctgcataagaaattgtggattcaagctggaggggacagagagaacataccctcgatttgggaagcaccaccgtcgagtgaaccaccaaacaacgtgagcacaaattcggaatgggaagcaccgacccagaaagataaatttccaaagccttgcaattggaggaaaaacgaattcaaaaaatggaccaaattggcatcccaaggccgcggaattgtaaattttgaaagagacaaaattagtaaccattggatccaatactacagacgcatacctcacaggaaactcctcactgcactacaactcagggccaacgtttaccccacgagagaatttctagccaggggtagacaagaccaatacatcaaggcgtgtaggcactgcgatgcggacaacgaatcctgcgcccacatcatcggcaactgcccagtgacacaggacgcccgaatcaagaggcacaattacatctgcgaactgcttctcgaggaggcgaagaagaaggactgggtagtgttcaaggaaccgcacataagggattccaacaaggaactgtacaaacctgacctgatatttgtgaaggatgggcgtgcacttgtcgtggatgtgacagtacggtatgaagcagccaaatcatcgctggaggaagccgctgcagagaaagtgagaaagtacaaacacctggaaacggaagtaagacatctcacgaatgcaaaggacgttacttttgtgggctttcccctaggagcgcgggggaaatggcaccaagataactttaaacttttgactgagcttggcctctccaaatcgaggcaagtgaaaatggcagagactttttccacagtagcgctcttttcatctgtggacattgtacatatgtttgccagtagggccagaaaatctatggttatgtgataataggctgccttctgcggggcttgccttctggccatgcccttcttctctcccttgcacctgtacctcttggtctttgaataaagcctgagtaggaaggaccggtaaaaaaaaaaaaaaaaaaaaaaaaaaaaaaacgttgactaaaaaaaaaaaaaaaaaaaaaaaaaaaaaaaaaaaaaaaaaaaaaaaaaaaaaaaaaaaaaaaaaaaaaa

SEQ ID NO: 11616 - DNA, 4439 bp, synthetic construct
  source 1..4439: mol_type = other DNA
gaaataagagagaaaagaagagtaagaagaaatataagagaattcgccaccatggcttcttgcccgaaacctggccccccggtttcagcaggggcaatgagtttggaaagtggactgaccacccactccgttctcgccatcgaacgtggtcccaattcgttggcaaattccggatcagactttgggggggggggtctggggctaccgttacgcctattgagggtatcggtcggcactcagacctcccgctccgactgggtagacctggtgtcctggagccacccaggacccacgtctaagtcccagcaggttgacctggtgtctttatttcctaaacaccgggttgacctgttatccaaaaacgaccaggtagacctggtggctcaatttttaccatctaaatttccccccaatttggcagaaaatgatttggctttgctggtgaacttagagttctacagatcggatttgcatgtgtatgagtgtgttcataaggctgcacattgggagggattaagtggtttgcctgaggtgtatgaacaacttgcaccacaaccgtgtgtgggagaaactttacattctagcctcccacgagacagtgaactgtttgtgcctgaagaggggagcagcgagaaggagagcgaggacgcgccaaaaacatctcctccgacgcctgggaaacatggtttggaacagactggggaggaaaaagtgatggtgactgttcctgacaaaaatccaccttgtccttgctgtggtacccgggtaaactctgtgttgaatctgattgaacatctgaaagtgtcacacgggaaaaggggggtttgttttcggtgtgcaaaatgtggaaaggaaaatagtaactatcacagtgttgtttgtcattttaagaaatgcaggggtccagagacggagaaagccccagctggggagtggatttgtgaggtatgcaacagagattttacaaccaaaattggcctgggacaacacaagagattggcacacccagcagtgagaaatcaggaaaggatcgttgcttcccaaccgaaagaaacatcaaatagaggtgctcacaaaaggtgctggacaaaggaggaggaagaattactaataagactggaggctcagttcgagggaaacaaaaatattaataagcttattgcagaacacataaccaccaaaacagctaagcagatcagtgacaaaaggcgattgctgtccagaaagccagcagaggagccacgtgaggagcctggaacgtgtcatcacaccaggagagcagctgcgagcctgagaacggagcctgagatgagtcatcacgcccaggcagaggacagagataatggacctgggagacgccctctgccaggcagggcagctgccggagggagaacaatggacgagataagacgccaccctgataagggcaacggacagcagagacccaccaagcaaaaatcagaagaacagctgcaggcttactataaaaagacactagaggaacgactttcagctggggcacttaacaccttcccccgagcattcaagcaggtaatggaaggccgggatataaagctagtaatcaatcagacagcgcaggactgcttcggatgcctggaatccataagccaaataagaacggcaacccgagataaaaaggacacggtgacccgggagaaacacccaaagaaaccttttcagaagtggatgaagaagagagcaatcaaaaaaggtaattatcttcggttccagcgtttattttatcttgatagagggaaactggctaaaatcattttagatgatattgaatgcttgtcttgtgacataccactcagtgaaatttattcggtttttaaaacaagatgggaaacaactggtagctttaaaagccttggggactttaaaacttacgggaaggctgacaacactgccttcagagaattaattacggctaaagaaattgagaaaaatgtgcaggaaatgagcaaaggctcggctcccggtccagacgggattactcttggggacgtcgtaaagatggatcccgagttttcccggaccatggagattttcaatttatggttaacaactggtaaaatcccggacatggtgagggggtgcagaaccgttttgattccaaaatcatcaaagccggatcgtttgaaagacattaataactggagacctatcacgatcggttccatcttgctgagactgttctccaggattgtaacagctaggctgagcaaagcgtgccccctgaacccaaggcaaagaggctttatcagagcggcgggatgctctgaaaacttaaaactcctgcaaactataatttggtcggccaaaagagaacacagaccactgggtgttgtattcgtggacatcgccaaggcttttgacaccgtaagccaccagcacatcattcatgctttgcagcaaagagaggtggatccccacatcgtcggtctggtgagcaatatgtacgagaacatcagtacgtatatcaccacaaagaggaacacacacacagacaaaatccagatccgggttggagtaaagcagggtgacccgctgtcgccccttttatttaacctggcaatggaccctctattatgcaagctggaagagagtggcaaaggataccaccgaggacagagcagcatcacagcgatggcatttgcagacgatctggttttgctgagcgactcctgggaaaatatgaatacaaatattagcatactggagaccttctgcaatctgaccggactcaaaacacaggggcaaaagtgccacggcttttacatcaagccgacaaaggactcttacaccatcaatgactgcgctgcctggactatcaacggcacacccctgaacatgatcgaccccggcgaatctgagaaatacctcggcctgcagtttgacccgtggattggaatagcaaggtccggtctctccacaaaactagatttttggcttcagcggatcgatcaagcaccacttaaacctctgcagaaaactgatattctcaaaacatacaccatccctcggctgatctacatagctgaccactcagaagtgaaaagcgcactactcgaaacccttgaccagaagatccggacagcggtcaaggaatggcttcacctacctccgtgcacctgcgatgccatcctgtactcgagcacgagagacggcggtttgggcatcaccaaattggcaggactgatccccagcgtgcaggcccgtagactgcatcggatcgcacagtcatctgacgatacgatgaaatgcttcatggaaaaagagaaaatggaacagctgcataagaaattgtggattcaagctggaggggacagagagaacataccctcgatttgggaagcaccaccgtcgagtgaaccaccaaacaacgtgagcacaaattcggaatgggaagcaccgacccagaaagataaatttccaaagccttgcaattggaggaaaaacgaattcaaaaaatggaccaaattggcatcccaaggccgcggaattgtaaattttgaaagagacaaaattagtaaccattggatccaatactacagacgcatacctcacaggaaactcctcactgcactacaactcagggccaacgtttaccccacgagagaatttctagccaggggtagacaagaccaatacatcaaggcgtgtaggcactgcgatgcggacaacgaatcctgcgcccacatcatcggcaactgcccagtgacacaggacgcccgaatcaagaggcacaattacatctgcgaactgcttctcgaggaggcgaagaagaaggactgggtagtgttcaaggaaccgcacataagggattccaacaaggaactgtacaaacctgacctgatatttgtgaaggatgggcgtgcacttgtcgtggatgtgacagtacggtatgaagcagccaaatcatcgctggaggaagccgctgcagagaaagtgagaaagtacaaacacctggaaacggaagtaagacatctcacgaatgcaaaggacgttacttttgtgggctttcccctaggagcgcgggggaaatggcaccaagataactttaaacttttgactgagcttggcctctccaaatcgaggcaagtgaaaatggcagagactttttccacagtagcgctcttttcatctgtggacattgtacatatgtttgccagtagggccagaaaatctatggttatgtgataataggctgccttctgcggggcttgccttctggccatgcccttcttctctcccttgcacctgtacctcttggtctttgaataaagcctgagtaggaaggaccggtaaaaaaaaaaaaaaaaaaaaaaaaaaaaaaacgttgactaaaaaaaaaaaaaaaaaaaaaaaaaaaaaaaaaaaaaaaaaaaaaaaaaaaaaaaaaaaaaaaaaaaaaa

SEQ ID NO: 11617 - DNA, 4439 bp, synthetic construct
  source 1..4439: mol_type = other DNA
gaaataagagagaaaagaagagtaagaagaaatataagagaattcgccaccatggcttcttgcccgaaacctggccccccggtttcagcaggggcaatgagtttggaaagtggactgaccacccactccgttctcgccatcgaacgtggtcccaattcgttggcaaattccggatcagactttgggggggggggtctggggctaccgttacgcctattgagggtatcggtcggcactcagacctcccgctccgactgggtagacctggtgtcctggagccacccaggacccacgtctaagtcccagcaggttgacctggtgtctttatttcctaaacaccgggttgacctgttatccaaaaacgaccaggtagacctggtggctcaatttttaccatctaaatttccccccaatttggcagaaaatgatttggctttgctggtgaacttagagttctacagatcggatttgcatgtgtatgagtgtgttcataaggctgcacattgggagggattaagtggtttgcctgaggtgtatgaacaacttgcaccacaaccgtgtgtgggagaaactttacattctagcctcccacgagacagtgaactgtttgtgcctgaagaggggagcagcgagaaggagagcgaggacgcgccaaaaacatctcctccgacgcctgggaaacatggtttggaacagactggggaggaaaaagtgatggtgactgttcctgacaaaaatccaccttgtccttgctgtggtacccgggtaaactctgtgttgaatctgattgaacatctgaaagtgtcacacgggaaaaggggggtttgttttcggtgtgcaaaatgtggaaaggaaaatagtaactatcacagtgttgtttgtcattttaagaaatgcaggggtccagagacggagaaagccccagctggggagtggatttgtgaggtatgcaacagagattttacaaccaaaattggcctgggacaacacaagagattggcacacccagcagtgagaaatcaggaaaggatcgttgcttcccaaccgaaagaaacatcaaatagaggtgctcacaaaaggtgctggacaaaggaggaggaagaattactaataagactggaggctcagttcgagggaaacaaaaatattaataagcttattgcagaacacataaccaccaaaacagctaagcagatcagtgacaaaaggcgattgctgtccagaaagccagcagaggagccacgtgaggagcctggaacgtgtcatcacaccaggagagcagctgcgagcctgagaacggagcctgagatgagtcatcacgcccaggcagaggacagagataatggacctgggagacgccctctgccaggcagggcagctgccggagggagaacaatggacgagataagacgccaccctgataagggcaacggacagcagagacccaccaagcaaaaatcagaagaacagctgcaggcttactataaaaagacactagaggaacgactttcagctggggcacttaacaccttcccccgagcattcaagcaggtaatggaaggccgggatataaagctagtaatcaatcagacagcgcaggactgcttcggatgcctggaatccataagccaaataagaacggcaacccgagataaaaaggacacggtgacccgggagaaacacccaaagaaaccttttcagaagtggatgaagaagagagcaatcaaaaaaggtaattatcttcggttccagcgtttattttatcttgatagagggaaactggctaaaatcattttagatgatattgaatgcttgtcttgtgacataccactcagtgaaatttattcggtttttaaaacaagatgggaaacaactggtagctttaaaagccttggggactttaaaacttacgggaaggctgacaacactgccttcagagaattaattacggctaaagaaattgagaaaaatgtgcaggaaatgagcaaaggctcggctcccggtccagacgggattactcttggggacgtcgtaaagatggatcccgagttttcccggaccatggagattttcaatttatggttaacaactggtaaaatcccggacatggtgagggggtgcagaaccgttttgattccaaaatcatcaaagccggatcgtttgaaagacattaataactggagacctatcacgatcggttccatcttgctgagactgttctccaggattgtaacagctaggctgagcaaagcgtgccccctgaacccaaggcaaagaggctttatcagagcggcgggatgctctgaaaacttaaaactcctgcaaactataatttggtcggccaaaagagaacacagaccactgggtgttgtattcgtggacatcgccaaggcttttgacaccgtaagccaccagcacatcattcatgctttgcagcaaagagaggtggatccccacatcgtcggtctggtgagcaatatgtacgagaacatcagtacgtatatcaccacaaagaggaacacacacacagacaaaatccagatccgggttggagtaaagcagggtgacccgatgtcgccccttttatttaacctggcactggaccctctattatgcaagctggaagagagtggcaaaggataccaccgaggacagagcagcatcacagcgatggcatttgcagacgatctggttttgctgagcgactcctgggaaaatatgaatacaaatattagcatactggagaccttctgcaatctgaccggactcaaaacacaggggcaaaagtgccacggcttttacatcaagccgacaaaggactcttacaccatcaatgactgcgctgcctggactatcaacggcacacccctgaacatgatcgaccccggcgaatctgagaaatacctcggcctgcagtttgacccgtggattggaatagcaaggtccggtctctccacaaaactagatttttggcttcagcggatcgatcaagcaccacttaaacctctgcagaaaactgatattctcaaaacatacaccatccctcggctgatctacatagctgaccactcagaagtgaaaagcgcactactcgaaacccttgaccagaagatccggacagcggtcaaggaatggcttcacctacctccgtgcacctgcgatgccatcctgtactcgagcacgagagacggcggtttgggcatcaccaaattggcaggactgatccccagcgtgcaggcccgtagactgcatcggatcgcacagtcatctgacgatacgatgaaatgcttcatggaaaaagagaaaatggaacagctgcataagaaattgtggattcaagctggaggggacagagagaacataccctcgatttgggaagcaccaccgtcgagtgaaccaccaaacaacgtgagcacaaattcggaatgggaagcaccgacccagaaagataaatttccaaagccttgcaattggaggaaaaacgaattcaaaaaatggaccaaattggcatcccaaggccgcggaattgtaaattttgaaagagacaaaattagtaaccattggatccaatactacagacgcatacctcacaggaaactcctcactgcactacaactcagggccaacgtttaccccacgagagaatttctagccaggggtagacaagaccaatacatcaaggcgtgtaggcactgcgatgcggacaacgaatcctgcgcccacatcatcggcaactgcccagtgacacaggacgcccgaatcaagaggcacaattacatctgcgaactgcttctcgaggaggcgaagaagaaggactgggtagtgttcaaggaaccgcacataagggattccaacaaggaactgtacaaacctgacctgatatttgtgaaggatgggcgtgcacttgtcgtggatgtgacagtacggtatgaagcagccaaatcatcgctggaggaagccgctgcagagaaagtgagaaagtacaaacacctggaaacggaagtaagacatctcacgaatgcaaaggacgttacttttgtgggctttcccctaggagcgcgggggaaatggcaccaagataactttaaacttttgactgagcttggcctctccaaatcgaggcaagtgaaaatggcagagactttttccacagtagcgctcttttcatctgtggacattgtacatatgtttgccagtagggccagaaaatctatggttatgtgataataggctgccttctgcggggcttgccttctggccatgcccttcttctctcccttgcacctgtacctcttggtctttgaataaagcctgagtaggaaggaccggtaaaaaaaaaaaaaaaaaaaaaaaaaaaaaaacgttgactaaaaaaaaaaaaaaaaaaaaaaaaaaaaaaaaaaaaaaaaaaaaaaaaaaaaaaaaaaaaaaaaaaaaaa

SEQ ID NO: 11618 - DNA, 4439 bp, synthetic construct
  source 1..4439: mol_type = other DNA
gaaataagagagaaaagaagagtaagaagaaatataagagaattcgccaccatggcttcttgcccgaaacctggccccccggtttcagcaggggcaatgagtttggaaagtggactgaccacccactccgttctcgccatcgaacgtggtcccaattcgttggcaaattccggatcagactttgggggggggggtctggggctaccgttacgcctattgagggtatcggtcggcactcagacctcccgctccgactgggtagacctggtgtcctggagccacccaggacccacgtctaagtcccagcaggttgacctggtgtctttatttcctaaacaccgggttgacctgttatccaaaaacgaccaggtagacctggtggctcaatttttaccatctaaatttccccccaatttggcagaaaatgatttggctttgctggtgaacttagagttctacagatcggatttgcatgtgtatgagtgtgttcataaggctgcacattgggagggattaagtggtttgcctgaggtgtatgaacaacttgcaccacaaccgtgtgtgggagaaactttacattctagcctcccacgagacagtgaactgtttgtgcctgaagaggggagcagcgagaaggagagcgaggacgcgccaaaaacatctcctccgacgcctgggaaacatggtttggaacagactggggaggaaaaagtgatggtgactgttcctgacaaaaatccaccttgtccttgctgtggtacccgggtaaactctgtgttgaatctgattgaacatctgaaagtgtcacacgggaaaaggggggtttgttttcggtgtgcaaaatgtggaaaggaaaatagtaactatcacagtgttgtttgtcattttaagaaatgcaggggtccagagacggagaaagccccagctggggagtggatttgtgaggtatgcaacagagattttacaaccaaaattggcctgggacaacacaagagattggcacacccagcagtgagaaatcaggaaaggatcgttgcttcccaaccgaaagaaacatcaaatagaggtgctcacaaaaggtgctggacaaaggaggaggaagaattactaataagactggaggctcagttcgagggaaacaaaaatattaataagcttattgcagaacacataaccaccaaaacagctaagcagatcagtgacaaaaggcgattgctgtccagaaagccagcagaggagccacgtgaggagcctggaacgtgtcatcacaccaggagagcagctgcgagcctgagaacggagcctgagatgagtcatcacgcccaggcagaggacagagataatggacctgggagacgccctctgccaggcagggcagctgccggagggagaacaatggacgagataagacgccaccctgataagggcaacggacagcagagacccaccaagcaaaaatcagaagaacagctgcaggcttactataaaaagacactagaggaacgactttcagctggggcacttaacaccttcccccgagcattcaagcaggtaatggaaggccgggatataaagctagtaatcaatcagacagcgcaggactgcttcggatgcctggaatccataagccaaataagaacggcaacccgagataaaaaggacacggtgacccgggagaaacacccaaagaaaccttttcagaagtggatgaagaagagagcaatcaaaaaaggtaattatcttcggttccagcgtttattttatcttgatagagggaaactggctaaaatcattttagatgatattgaatgcttgtcttgtgacataccactcagtgaaatttattcggtttttaaaacaagatgggaaacaactggtagctttaaaagccttggggactttaaaacttacgggaaggctgacaacactgccttcagagaattaattacggctaaagaaattgagaaaaatgtgcaggaaatgagcaaaggctcggctcccggtccagacgggattactcttggggacgtcgtaaagatggatcccgagttttcccggaccatggagattttcaatttatggttaacaactggtaaaatcccggacatggtgagggggtgcagaaccgttttgattccaaaatcatcaaagccggatcgtttgaaagacattaataactggagacctatcacgatcggttccatcttgctgagactgttctccaggattgtaacagctaggctgagcaaagcgtgccccctgaacccaaggcaaagaggctttatcagagcggcgggatgctctgaaaacttaaaactcctgcaaactataatttggtcggccaaaagagaacacagaccactgggtgttgtattcgtggacatcgccaaggcttttgacaccgtaagccaccagcacatcattcatgctttgcagcaaagagaggtggatccccacatcgtcggtctggtgagcaatatgtacgagaacatcagtacgtatatcaccacaaagaggaacacacacacagacaaaatccagatccgggttggagtaaagcagggtgacccgatgtcgccccttttatttaacctggcaatggaccctctattatgcaagctggaagagagtggcaaaggataccaccgaggacagagcagcatcacagcgatggcatttgcagacgatctggttttgctgagcgactcctgggaaaatatgaatacaaatattagcatactggagaccttctgcaatctgaccggactcaaaacacaggggcaaaagtgccacggcttttacatcaagccgacaaaggactcttacaccatcaatgactgcgctgcctggactatcaacggcacacccctgaacatgatcgaccccggcgaatctctgaaatacctcggcctgcagtttgacccgtggattggaatagcaaggtccggtctctccacaaaactagatttttggcttcagcggatcgatcaagcaccacttaaacctctgcagaaaactgatattctcaaaacatacaccatccctcggctgatctacatagctgaccactcagaagtgaaaagcgcactactcgaaacccttgaccagaagatccggacagcggtcaaggaatggcttcacctacctccgtgcacctgcgatgccatcctgtactcgagcacgagagacggcggtttgggcatcaccaaattggcaggactgatccccagcgtgcaggcccgtagactgcatcggatcgcacagtcatctgacgatacgatgaaatgcttcatggaaaaagagaaaatggaacagctgcataagaaattgtggattcaagctggaggggacagagagaacataccctcgatttgggaagcaccaccgtcgagtgaaccaccaaacaacgtgagcacaaattcggaatgggaagcaccgacccagaaagataaatttccaaagccttgcaattggaggaaaaacgaattcaaaaaatggaccaaattggcatcccaaggccgcggaattgtaaattttgaaagagacaaaattagtaaccattggatccaatactacagacgcatacctcacaggaaactcctcactgcactacaactcagggccaacgtttaccccacgagagaatttctagccaggggtagacaagaccaatacatcaaggcgtgtaggcactgcgatgcggacaacgaatcctgcgcccacatcatcggcaactgcccagtgacacaggacgcccgaatcaagaggcacaattacatctgcgaactgcttctcgaggaggcgaagaagaaggactgggtagtgttcaaggaaccgcacataagggattccaacaaggaactgtacaaacctgacctgatatttgtgaaggatgggcgtgcacttgtcgtggatgtgacagtacggtatgaagcagccaaatcatcgctggaggaagccgctgcagagaaagtgagaaagtacaaacacctggaaacggaagtaagacatctcacgaatgcaaaggacgttacttttgtgggctttcccctaggagcgcgggggaaatggcaccaagataactttaaacttttgactgagcttggcctctccaaatcgaggcaagtgaaaatggcagagactttttccacagtagcgctcttttcatctgtggacattgtacatatgtttgccagtagggccagaaaatctatggttatgtgataataggctgccttctgcggggcttgccttctggccatgcccttcttctctcccttgcacctgtacctcttggtctttgaataaagcctgagtaggaaggaccggtaaaaaaaaaaaaaaaaaaaaaaaaaaaaaaacgttgactaaaaaaaaaaaaaaaaaaaaaaaaaaaaaaaaaaaaaaaaaaaaaaaaaaaaaaaaaaaaaaaaaaaaaa

SEQ ID NO: 11619 - DNA, 4439 bp, synthetic construct
  source 1..4439: mol_type = other DNA
gaaataagagagaaaagaagagtaagaagaaatataagagaattcgccaccatggcttcttgcccgaaacctggccccccggtttcagcaggggcaatgagtttggaaagtggactgaccacccactccgttctcgccatcgaacgtggtcccaattcgttggcaaattccggatcagactttgggggggggggtctggggctaccgttacgcctattgagggtatcggtcggcactcagacctcccgctccgactgggtagacctggtgtcctggagccacccaggacccacgtctaagtcccagcaggttgacctggtgtctttatttcctaaacaccgggttgacctgttatccaaaaacgaccaggtagacctggtggctcaatttttaccatctaaatttccccccaatttggcagaaaatgatttggctttgctggtgaacttagagttctacagatcggatttgcatgtgtatgagtgtgttcataaggctgcacattgggagggattaagtggtttgcctgaggtgtatgaacaacttgcaccacaaccgtgtgtgggagaaactttacattctagcctcccacgagacagtgaactgtttgtgcctgaagaggggagcagcgagaaggagagcgaggacgcgccaaaaacatctcctccgacgcctgggaaacatggtttggaacagactggggaggaaaaagtgatggtgactgttcctgacaaaaatccaccttgtccttgctgtggtacccgggtaaactctgtgttgaatctgattgaacatctgaaagtgtcacacgggaaaaggggggtttgttttcggtgtgcaaaatgtggaaaggaaaatagtaactatcacagtgttgtttgtcattttaagaaatgcaggggtccagagacggagaaagccccagctggggagtggatttgtgaggtatgcaacagagattttacaaccaaaattggcctgggacaacacaagagattggcacacccagcagtgagaaatcaggaaaggatcgttgcttcccaaccgaaagaaacatcaaatagaggtgctcacaaaaggtgctggacaaaggaggaggaagaattactaataagactggaggctcagttcgagggaaacaaaaatattaataagcttattgcagaacacataaccaccaaaacagctaagcagatcagtgacaaaaggcgattgctgtccagaaagccagcagaggagccacgtgaggagcctggaacgtgtcatcacaccaggagagcagctgcgagcctgagaacggagcctgagatgagtcatcacgcccaggcagaggacagagataatggacctgggagacgccctctgccaggcagggcagctgccggagggagaacaatggacgagataagacgccaccctgataagggcaacggacagcagagacccaccaagcaaaaatcagaagaacagctgcaggcttactataaaaagacactagaggaacgactttcagctggggcacttaacaccttcccccgagcattcaagcaggtaatggaaggccgggatataaagctagtaatcaatcagacagcgcaggactgcttcggatgcctggaatccataagccaaataagaacggcaacccgagataaaaaggacacggtgacccgggagaaacacccaaagaaaccttttcagaagtggatgaagaagagagcaatcaaaaaaggtaattatcttcggttccagcgtttattttatcttgatagagggaaactggctaaaatcattttagatgatattgaatgcttgtcttgtgacataccactcagtgaaatttattcggtttttaaaacaagatgggaaacaactggtagctttaaaagccttggggactttaaaacttacgggaaggctgacaacactgccttcagagaattaattacggctaaagaaattgagaaaaatgtgcaggaaatgagcaaaggctcggctcccggtccagacgggattactcttggggacgtcgtaaagatggatcccgagttttcccggaccatggagattttcaatttatggttaacaactggtaaaatcccggacatggtgagggggtgcagaaccgttttgattccaaaatcatcaaagccggatcgtttgaaagacattaataactggagacctatcacgatcggttccatcttgctgagactgttctccaggattgtaacagctaggctgagcaaagcgtgccccctgaacccaaggcaaagaggctttatcagagcggcgggatgctctgaaaacttaaaactcctgcaaactataatttggtcggccaaaagagaacacagaccactgggtgttgtattcgtggacatcgccaaggcttttgacaccgtaagccaccagcacatcattcatgctttgcagcaaagagaggtggatccccacatcgtcggtctggtgagcaatatgtacgagaacatcagtacgtatatcaccacaaagaggaacacacacacagacaaaatccagatccgggttggagtaaagcagggtgacccgatgtcgccccttttatttaacctggcaatggaccctctattatgcaagctggaagagagtggcaaaggataccaccgaggacagagcagcatcacagcgatggcatttgcagacgatctggttttgctgagcgactcctgggaaaatatgaatacaaatattagcatactggagaccttctgcaatctgaccggactcaaaacacaggggcaaaagtgccacggcttttacatcaagccgacaaaggactcttacaccatcaatgactgcgctgcctggactatcaacggcacacccctgaacatgatcgaccccggcgaatctgagaaatacctcggcctgaggtttgacccgtggattggaatagcaaggtccggtctctccacaaaactagatttttggcttcagcggatcgatcaagcaccacttaaacctctgcagaaaactgatattctcaaaacatacaccatccctcggctgatctacatagctgaccactcagaagtgaaaagcgcactactcgaaacccttgaccagaagatccggacagcggtcaaggaatggcttcacctacctccgtgcacctgcgatgccatcctgtactcgagcacgagagacggcggtttgggcatcaccaaattggcaggactgatccccagcgtgcaggcccgtagactgcatcggatcgcacagtcatctgacgatacgatgaaatgcttcatggaaaaagagaaaatggaacagctgcataagaaattgtggattcaagctggaggggacagagagaacataccctcgatttgggaagcaccaccgtcgagtgaaccaccaaacaacgtgagcacaaattcggaatgggaagcaccgacccagaaagataaatttccaaagccttgcaattggaggaaaaacgaattcaaaaaatggaccaaattggcatcccaaggccgcggaattgtaaattttgaaagagacaaaattagtaaccattggatccaatactacagacgcatacctcacaggaaactcctcactgcactacaactcagggccaacgtttaccccacgagagaatttctagccaggggtagacaagaccaatacatcaaggcgtgtaggcactgcgatgcggacaacgaatcctgcgcccacatcatcggcaactgcccagtgacacaggacgcccgaatcaagaggcacaattacatctgcgaactgcttctcgaggaggcgaagaagaaggactgggtagtgttcaaggaaccgcacataagggattccaacaaggaactgtacaaacctgacctgatatttgtgaaggatgggcgtgcacttgtcgtggatgtgacagtacggtatgaagcagccaaatcatcgctggaggaagccgctgcagagaaagtgagaaagtacaaacacctggaaacggaagtaagacatctcacgaatgcaaaggacgttacttttgtgggctttcccctaggagcgcgggggaaatggcaccaagataactttaaacttttgactgagcttggcctctccaaatcgaggcaagtgaaaatggcagagactttttccacagtagcgctcttttcatctgtggacattgtacatatgtttgccagtagggccagaaaatctatggttatgtgataataggctgccttctgcggggcttgccttctggccatgcccttcttctctcccttgcacctgtacctcttggtctttgaataaagcctgagtaggaaggaccggtaaaaaaaaaaaaaaaaaaaaaaaaaaaaaaacgttgactaaaaaaaaaaaaaaaaaaaaaaaaaaaaaaaaaaaaaaaaaaaaaaaaaaaaaaaaaaaaaaaaaaaaaa

SEQ ID NO: 11620 - DNA, 4703 bp, synthetic construct
  source 1..4703: mol_type = other DNA
ggtctagttacaactgggcatcgctgcagagatcgcacctcctcgtggtcccgctggtagcccttcgaagggtgactaagtcgatctctgccccaggtacggagccgttgggactcaccagtccaacgtaactcctgcctaaattcggtgaaacaaattcctcggtaaaaagccccatggcttcttgcccgaaacctggccccccggtttcagcaggggcaatgagtttggaaagtggactgaccacccactccgttctcgccatcgaacgtggtcccaattcgttggcaaattccggatcagactttgggggggggggtctggggctaccgttacgcctattgagggtatcggtcggcactcagacctcccgctccgactgggtagacctggtgtcctggagccacccaggacccacgtctaagtcccagcaggttgacctggtgtctttatttcctaaacaccgggttgacctgttatccaaaaacgaccaggtagacctggtggctcaatttttaccatctaaatttccccccaatttggcagaaaatgatttggctttgctggtgaacttagagttctacagatcggatttgcatgtgtatgagtgtgttcattttgctgcacattgggagggattaagtggtttgcctgaggtgtatgaacaacttgcaccacaaccgtgtgtgggagaaactttacattctagcctcccacgagacagtgaactgtttgtgcctgaagaggggagcagcgagaaggagagcgaggacgcgccaaaaacatctcctccgacgcctgggaaacatggtttggaacagactggggaggaaaaagtgatggtgactgttcctgacaaaaatccaccttgtccttgctgtggtacccgggtaaactctgtgttgaatctgattgaacatctgaaagtgtcacacgggaaaaggggggtttgttttcggtgtgcaaaatgtggaaaggaaaatagtaactatcacagtgttgtttgtcattttaagaaatgcaggggtccagagacggagaaagccccagctggggagtggatttgtgaggtatgcaacagagattttacaaccaaaattggcctgggacaacacaagagattggcacacccagcagtgagaaatcaggaaaggatcgttgcttcccaaccgaaagaaacatcaaatagaggtgctcacaaaaggtgctggacaaaggaggaggaagaattactaataagactggaggctcagttcgagggaaacaaaaatattaataagcttattgcagaacacataaccaccaaaacagctaagcagatcagtgacaaaaggcgattgctgtccagaaagccagcagaggagccacgtgaggagcctggaacgtgtcatcacaccaggagagcagctgcgagcctgagaacggagcctgagatgagtcatcacgcccaggcagaggacagagataatggacctgggagacgccctctgccaggcagggcagctgccggagggagaacaatggacgagataagacgccaccctgataagggcaacggacagcagagacccaccaagcaaaaatcagaagaacagctgcaggcttactataaaaagacactagaggaacgactttcagctggggcacttaacaccttcccccgagcattcaagcaggtaatggaaggccgggatataaagctagtaatcaatcagacagcgcaggactacttcggatgcctggaatccataagccaaataagaacggcaacccgagataaaaaggacacggtgacccggaagaaacacccaaagaaaccttttcagaagtggatgaaggacagagcaatcaaaaaaggtaattatcttcggttccagcgtttattttatcttgatagagggaaactggctaaaatcattttagatgatattgaatgcttgtcttgtgacataccactcagtgaaatttattcggtttttaaaacaagatgggaaacaactggtagctttaaaagccttggggactttaaaacttacgggaaggctgacaacactgccttcagagaattaattacggctaaagaaattgagaaaaatgtgcaggaaatgagcaaaggctcggctcccggtccagacgggattactcttggggacgtcgtaaagatggatcccgagggctcccggaccatggagattttcaatttatggttaacaactggtaaaatcccggacatggtgagggggtgcagaaccgttttgattccaaaatcatcagacccggatcgtttgaaagacattaataactggagacctatcacgatcggttccatcttgctgagactgttctccaggattgtaacagctaggctgagcaaagcgtgccccctgaacccaaggcaaagaggctttatcagagcggcgggatgctctgaaaacttaaaactcctgcaaactataatttggtcggccaaaagagaacacagaccactgggtgttgtattcgtggacatcgccaaggcttttgacaccgtaagccaccagcacatcattcatgctttgcagcaaagagaggtggatccccacatcgtcggtctggtgagcaatatgtacgagaacatcagtacgtatatcaccacaaagaggaacacacacacagacaaaatccagatccgggttggagtaaagcagggtgacccgatgtcgccccttttatttaacctggcaatggaccctctattatgcaagctggaagagagtggcaaaggataccaccgaggacagagcagcatcacagcgatggcatttgcagacgatctggttttgctgagcgactcctgggaaggcatgaatacaaatattagcatactggagaccttctgcaatctgaccggactcaaaacacaggggcaaaagtgccacggcttttacatcaagccgacaaagaagtcttacaccatcaatgactgcgctgcctggactatcaacggcacacccctgaacatgatcgaccccggcgaatctgagaaatacctcggcctgcagtttgacccgtggattggaatagcaaggtccggtctctccacaaaactagatttttggcttcagcggatcgatcaagcaccacttaaacctctgcagaaactggatattctcaaaacatacaccatccctcggctgatctacatagctgaccactcagaagtgaaaactgcactactcgaaacccttgaccagaagatccggacagcggtcaaggaatggcttcacctacctccgtgcacctgcgatgccatcctgtactcgagcacgagagacggcggtttgggcatcaccaaattggcaggactgatccccagcgtgcaggcccgtagactgcatcggatcgcacagtcatctgacgatacgatgaaatgcttcatggaaaaagagaaaatggaacagctgcataagaaattgtggattcaagctggaggggacagagagaacataccctcgatttgggaagcaccaccgtcgagtgaaccaccaaacaacgtgagcacaaattcggaatgggaagcaccgacccagaaagataaatttccaaagccttgcaattggaggaaaaacgaattcaaaaaatggaccaaattggcatcccaaggccgcggaattgtaaattttgaaagagacaaaattagtaaccattggatccaatactacagacgcatacctcacaggaaactcctcactgcactacaactcagggccaacgtttaccccacgagagaatttctagccaggggtagacaagaccaatacatcaaggcgtgtaggcactgcgatgcggacattgaatcctgcgcccacatcatcggcaactgcccagtgacacaggacgcccgaatcaagaggcacaattacatctgcgaactgcttctcgaggaggcgaagaagaaggactgggtagtgttcaaggaaccgcacataagggattccaacaaggaactgtacaaacctgacctgatatttgtgaaggatgcccgtgcacttgtcgtggatgtgacagtacggtatgaagcagccaaatcatcgctggaggaagccgctgcagagaaagtgagaaagtacaaacacctggaaacggaagtaagacatctcacgaatgcaaaggacgttacttttgtgggctttcccctaggagcgcgggggaaatggcaccaagataactttaaacttttgactgagcttggcctctccaaatcgaggcaagtgaaaatggcagagactttttccacagtagcgctcttttcatctgtggacattgtacatatgtttgccagtagggccagaaaatctatggttatgtgataataggctgccttctgcggggcttgccttctggccatgcccttcttctctcccttgcacctgtacctcttggtctttgaataaagcctgagtaggaaggaccggtagacatgataagatacattgatgagtttggacaaaccacaactagaatgcagtgaaaaaaatgctttatttgtgaaatttgtgatgctattgctttatttgtaaccattataagctgcaataaacaagttaacaacaacaaaaaaaaaaaaaaaaaaaaaaaaaaaaaaacgttgactaaaaaaaaaaaaaaaaaaaaaaaaaaaaaaaaaaaaaaaaaaaaaaaaaaaaaaaaaaaaaaaaaaaaaa

SEQ ID NO: 11621 - DNA, 4703 bp, synthetic construct
  source 1..4703: mol_type = other DNA
ggtctagttacaactgggcatcgctgcagagatcgcacctcctcgtggtcccgctggtagcccttcgaagggtgactaagtcgatctctgccccaggtacggagccgttgggactcaccagtccaacgtaactcctgcctaaattcggtgaaacaaattcctcggtaaaaagccccatggcttcttgcccgaaacctggccccccggtttcagcaggggcaatgagtttggaaagtggactgaccacccactccgttctcgccatcgaacgtggtcccaattcgttggcaaattccggatcagactttgggggggggggtctggggggcccgttacgcctattgagggtatcggtcggcactcagacctcccgctccgactgggtagacctggtgtcctggagccacccaggacccacgtctaagtcccagcaggttgacctggtgtctttatttcctaaacaccgggttgacctgttatccaaaaacgaccaggtagacctggtggctcaatttttaccatctaaatttccccccaatttggcagaaaatgatttggctttgctggtgaacttagagttctacagatcggatttgcatgtgtatgagtgtgttcattttgctgcacattgggagggattaagtggtttgcctgaggtgtatgaacaacttgcaccacaaccgtgtgtgggagaaactttacattctagcctcccacgagacagtgaactgtttgtgcctgaagaggggagcagcgagaaggagagcgaggacgcgccaaaaacatctcctccgacgcctttcaaacatggtaggaagcagactggggaggaaaaagtgatggtgactgttcctgacaaaaatccaccttgtccttgctgtggtacccgggtaaactctgtgttgaatctgattgaacatctgaaagtgtcacacgggaaaaggggggtttgttttcggtgtgcaaaatgtggaaaggaaaggagtaactatcacagtgttgtttgtcattttaagaaatgcaggggtccagagacggagaaagccccagctggggagtggatttgtgaggtatgcaacagagattttaggaccaaaattggcctgggacaacacaagagattggcacacccagcagtgagaaatcaggaaaggatcgttgcttcccaaccgaaagaaacatcaaatagaggtgctcacaaaaggtgctggacaaaggaggaggaagaattactaataagactggaggctcagttcgagggaaacaaaaatattaataagcttattgcagaacacataaccaccaaaacagctaagcagatcagtgacatgaggcgattgctgtccagaaagccagcagaggagccacgtgaggagcctggaacgtgtcatcacaccaggagagcagctgcgagcctgagaacggagcctgagatgagtcatcacgcccaggcagaggacagagataatggacctgggagacgccctctgccaggcagggcagctgccggagggagatacatggacgagataagacgccaccctgataagggcaacggacagcagagacccaccaagcaaaaatcagaagaacagctgcaggcttactataaaaagacactagaggaacgactttcagctggggcacttaacaccttcccccgagcattcaagcaggtaatggaaggccgggatataaagctagtaatcaatcagacagcgcaggactacttcggatgcctggaatccataagccaaataagaacggcaacccgagataaaaaggacacgggcacccgggagaaacacccaaagaaaccttttcagaagtggatgaagaagagagcaatcaaaaaaggtaattatcttcggttccagcgtttattttatcttgatagagggaaactggctaaaatcattttagatgatattgaatgcttgtcttgtgacataccactcagtgaaatttattcggtttttaaaacaagatgggaaacaactggtagctttaaaagccttggggactttaaaacttacgggaaggctgacaacactgccttcagagaattaattacggctaaagaaattgagaaaaatgtgcaggaaatgagcaaaggctcggctcccggtccagacgggattactcttggggacatcgtaaagatggatcccgagggctcccggaccatggagattttcaatttatgcttaacaactggtaaaatcccggacatggtgagggggtgcagaaccgttttgattccaaaatcatcagacccggatcgtttgaaagacattaataactggagacctatcacgatcggttccatcttgctgagactgttctccaggattgtaacagctaggctgagcaaagcgtgccccctgaacccaaggcaaagaggctttatcagagcggcgggatgctctgaaaacttaaaactcctgcaaactataatttggtcggccaaaagagaacacagaccactgggtgttgtattcgtggacatcgccaaggcttttgacaccgtaagccaccagcacatcattcatgctttgcagcaaagagaggtggatccccacatcgtcggtctggtgagcaatatgtacgagaacatcagtacgtatatcaccacaaagaggaacacacacacagacaaaatccagatccgggttggagtaaagcagggtgacccgatgtcgccccttttatttaacctggcaatggaccctctattatgcaagctggaagagagtggcaaaggataccaccgaggacagagcagcatcacagcgatggcatttgcagacgatctggttttgctgagcgactcctgggaaaatatgaatacaaatattagcatactggagaccttctgcaatctgaccggactcaaaacacaggggcaaaagtgccacggcttttacatcaagccgacaaaggactcttacaccatcaatgactgcgctgcctggactatcaacggcacacccctgaacatgatcgaccccggcgaatctgagaaatacctcggcctgcagtttgacccgtggattggaatagcaaggtccggtctctccacaaaactagatttttggcttcagcggatcgatcaagcaccacttaaacctctgcagaaaactgatattctcaaaacatacaccatccctcggctgatctacatagctgaccactcagaagtgaaaagcgcactactcgaaacccttgaccagaagatccggacagcggtcaaggaatggcttcacctacctccgtgcacctgcgatgccatcctgtactcgagcacgagagacggcggtttgggcatcaccaaattggcaggactgatccccagcgtgcaggcccgtagactgcatcggatcgcacagtcatctgacgatacgatgaaatgcttcatggaaaaagagaaaatggaacagctgcataagaaattgtggattcaagctggaggggacagagagaacataccctcgatttgggaagcaccaccgtcgagtgaaccaccaaacaacgtgagcacaaattcggaatgggaagcaccgacccagaaagataaatttccaaagccttgcaattggaggaaaaacgaattcaaaaaatggaccaaattggcatcccaaggccgcggaattgtaaattttgaaagagacaaaattagtaaccattggatccaatactacagacgcatacctcacaggaaactcctcactgcactacaactcagggccaacgtttaccccacgagagaatttctagccaggggtagacaagaccaatacatcaaggcgtgtaggcactgcgatgcggacattgaatcctgcgcccacatcatcggcaactgcccagtgacacaggacgcccgaatcaagaggcacaattacatctgcgaactgcttctcgaggaggcgaagaagaaggactgggtagtgttcaaggaaccgcacataagggattccaacaaggaactgtacaaacctgacctgatatttgtgaaggatgcccgtgcacttgtcgtggatgtgacagtacggtatgaagcagccaaatcatcgctggaggaagccgctgcagagaaagtgagaaagtacaaacacctggaaacggaagtaagacatctcacgaatgcaaaggacgttacttttgtgggctttcccctaggagcgcgggggaaatggcaccaagataactttaaacttttgactgagcttggcctctccaaatcgaggcaagtgaaaatggcagagactttttccacagtagcgctcttttcatctgtggacattgtacatatgtttgccagtagggccagaaaatctatggttatgtgataataggctgccttctgcggggcttgccttctggccatgcccttcttctctcccttgcacctgtacctcttggtctttgaataaagcctgagtaggaaggaccggtagacatgataagatacattgatgagtttggacaaaccacaactagaatgcagtgaaaaaaatgctttatttgtgaaatttgtgatgctattgctttatttgtaaccattataagctgcaataaacaagttaacaacaacaaaaaaaaaaaaaaaaaaaaaaaaaaaaaaacgttgactaaaaaaaaaaaaaaaaaaaaaaaaaaaaaaaaaaaaaaaaaaaaaaaaaaaaaaaaaaaaaaaaaaaaaa

SEQ ID NO: 11622 - DNA, 4703 bp, synthetic construct
  source 1..4703: mol_type = other DNA
ggtctagttacaactgggcatcgctgcagagatcgcacctcctcgtggtcccgctggtagcccttcgaagggtgactaagtcgatctctgccccaggtacggagccgttgggactcaccagtccaacgtaactcctgcctaaattcggtgaaacaaattcctcggtaaaaagccccatggcttcttgcccgaaacctggccccccggtttcagcaggggcaatgagtttggaaagtggactgaccacccactccgttctcgccatcgaacgtggtcccaattcgttggcaaattccggatcagactttgggggggggggtctggggctaccgttacgcctattgagggtatcggtcggcactcagacctcccgctccgactgggtagacctggtgtcctggagccacccaggacccacgtctaagtcccagcaggttgacctggtgtctttatttcctaaacaccgggttgacctgttatccaaaaacgaccaggtagacctggtggctcaatttttaccatctaaatttccccccaatttggcagaaaatgatttggctttgctggtgaacttagagttctacagatcggatttgcatgtgtatgagtgtgttcattttgctgcacattgggagggattaagtggtttgcctgaggtgtatgaacaacttgcaccacaaccgtgtgtgggagaaactttacattctagcctcccacgagacagtgaactgtttgtgcctgaagaggggagcagcgagaaggagagcgaggacgcgccaaaaacatctcctccgacgcctgggaaacatggtttggaacagactggggaggaaaaagtgatggtgactgttcctgacaaaaatccaccttgtccttgctgtggtacccgggtaaactctgtgttgaatctgattgaacatctgaaagtgtcacacgggaaaaggggggtttgttttcggtgtgcaaaatgtggaaaggaaaatagtaactatcacagtgttgtttgtcattttaagaaatgcaggggtccagagacggagaaagccccagctggggagtggatttgtgaggtatgcaacagagattttacaaccaaaattggcctgggacaacacaagagaaggtggcacccagcagtgagaaatcaggaaaggatcgttgcttcccaaccgaaagaaacatcaaatagaggtgctcacaaaaggtgctggacaaaggaggagagggaattactaataagactggaggctcagttcgagggaaacaaaaatattaataagcttattgcagaacacataaccaccaaaacagctaagcagatcagtgacaaaaggcgattgctgtccagaaagccagcagaggagccacgtatgatgcctggaacgtgtcatcacaccaggagagcagctgcgagcctgagaacggagcctgagatgagtcatcacgcccaggcagaggacagagataatggacctgggagacgccctctgccaggcagggcagctgccggagggagaacaatggacgagataagacgccaccctgataagggcaacggacagcagagacccaccaagcaaaaatcagaagaacagctgcaggcttactataaaaagacactagaggaacgactttcagctggggcacttaacaccttcccccgagcattcaagcaggtaatggaaggccgggatataaagctagtaatcaatcagacagcgcaggactgcttcggatgcctggaatccataagccaaataagaacggcaacccgagataaaaaggacacggtgacccgggagaaacacccaaagaaaccttttcagaagtggatgaagaagagagcaatcaaaaaaggtaattatcttcggttccagcgtttattttatcttgatagagggaaactggctaaaatcattttagatgatattgaatgcttgtcttgtgacataccactcagtgaaatttattcggtttttaaaacaagatgggaaacaactggtagctttaaaagccttggggactttaaaacttacgggaaggctgacaacactgccttcagagaattaattacggctaaagaaattgagaaaaatgtgcaggaaatgagcaaaggctcggctcccggtccagacgggattactcttggggacgtcgtaaagatggatcccgagggctcccggaccatggagattttcaatttatggttaacaactggtaaaatcccggacatggtgagggggtgcagaaccgttttgattccaaaatcatcagacccggatcgtttgaaagacattaataactggagacctatcacgatcggttccatcttgctgagactgttctccaggattgtaacagctaggctgagcaaagcgtgccccctgaacccaaggcaaagaggctttatcagagcggcgggatgctctgaaaacttaaaactcctgcaaactataatttggtcggccaaaagagaacacagaccactgggtgttgtattcgtggacatcgccaaggcttttgacaccgtaagccaccagcacatcattcatgctttgcagcaaagagaggtggatccccacatcgtcggtctggtgagcaatatgtacgagaacatcagtacgtatatcaccacaaagaggaacacacacacagacaaaatccagatccgggttggagtaaagcagggtgacccgatgtcgccccttttatttaacctggcaatggaccctctattatgcaagctggaagagagtggcaaaggataccaccgaggacagagcagcatcacagcgatggcatttgcagacgatctggttttgctgagcgactcctgggaaggcatgaatacaaatattagcatactggagaccttctgcaatctgaccggactcaaaacacaggggcaaaagtgccacggcttttacatcaagccgacaaagaagtcttacaccatcaatgactgcgctgcctggactatcaacggcacacccctgaacatgatcgaccccggcgaatctgagaaatacctcggcctgcagtttgacccgtggattggaatagcaaggtccggtctctccacaaaactagatttttggcttcagcggatcgatcaagcaccacttaaacctctgcagaaactggatattctcaaaacatacaccatccctcggctgatctacatagctgaccactcagaagtgaaaagcgcactactcgaaacccttgaccagaagatccggacagcggtcaaggaatggcttcacctacctccgtgcacctgcgatgccatcctgtactcgagcacgagagacggcggtttgggcatcaccaaattggcaggactgatccccagcgtgcaggcccgtagactgcatcggatcgcacagtcatctgacgatacgatgaaatgcttcatggaaaaagagaaaatggaacagctgcataagaaattgtggattcaagctggaggggacagagagaacataccctcgatttgggaagcaccaccgtcgagtgaaccaccaaacaacgtgagcacaaattcggaatgggaagcaccgacccagaaagataaatttccaaagccttgcaattggaggaaaaacgaattcaaaaaatggaccaaattggcatcccaaggccgcggaattgtaaattttgaaagagacaaaattagtaaccattggatccaatactacagacgcatacctcacaggaaactcctcactgcactacaactcagggccaacgtttaccccacgagagaatttctagccaggggtagacaagaccaatacatcaaggcgtgtaggcactgcgatgcggacaacgaatcctgcgcccacatcatcggcaactgcccagtgacacaggacgcccgaatcaagaggcacaataagatctgcgaactgcttctcgaggaggcgaagaagaaggactgggtagtgttcaaggaaccgcacataagggattccaacaaggaactgtacaaacctgacctgatatttgtgaaggatgcccgtgcacttgtcgtggatgtgacagtacggtatgaagcagccaaatcatcgctggaggaagccgctgcagagaaagtgagaaagtacaaacacctggaaacggaagtaagacatctcacgaatgcaaaggacgttacttttgtgggctttcccctaggagcgcgggggaaatggcaccaagataactttaaacttttgactgagcttggcctctccaaatcgaggcaagtgaaaatggcagagactttttccacagtagcgctcttttcatctgtggacattgtacatatgtttgccagtagggccagaaaatctatggttatgtgataataggctgccttctgcggggcttgccttctggccatgcccttcttctctcccttgcacctgtacctcttggtctttgaataaagcctgagtaggaaggaccggtagacatgataagatacattgatgagtttggacaaaccacaactagaatgcagtgaaaaaaatgctttatttgtgaaatttgtgatgctattgctttatttgtaaccattataagctgcaataaacaagttaacaacaacaaaaaaaaaaaaaaaaaaaaaaaaaaaaaaacgttgactaaaaaaaaaaaaaaaaaaaaaaaaaaaaaaaaaaaaaaaaaaaaaaaaaaaaaaaaaaaaaaaaaaaaaa

SEQ ID NO: 11623 - DNA, 4564 bp, synthetic construct
  source 1..4564: mol_type = other DNA
ggtctagttacaactgggcatcgctgcagagatcgcacctcctcgtggtcccgctggtagcccttcgaagggtgactaagtcgatctctgccccaggtacggagccgttgggactcaccagtccaacgtaactcctgcctaaattcggtgaaacaaattcctcggtaaaaagccccatggcttcttgcccgaaacctggccccccggtttcagcaggggcaatgagtttggaaagtggactgaccacccactccgttctcgccatcgaacgtggtcccaattcgttggcaaattccggatcagactttgggggggggggtctggggctaccgttacgcctattgagggtatcggtcggcactcagacctcccgctccgactgggtagacctggtgtcctggagccacccaggacccacgtctaagtcccagcaggttgacctggtgtctttatttcctaaacaccgggttgacctgttatccaaaaacgaccaggtagacctggtggctcaatttttaccatctaaatttccccccaatttggcagaaaatgatttggctttgctggtgaacttagagttctacagatcggatttgcatgtgtatgagtgtgttcattttgctgcacattgggagggattaagtggtttgcctgaggtgtatgaacaacttgcaccacaaccgtgtgtgggagaaactttacattctagcctcccacgagacagtgaactgtttgtgcctgaagaggggagcagcgagaaggagagcgaggacgcgccaaaaacatctcctccgacgcctgggaaacatggtttggaacagactggggaggaaaaagtgatggtgactgttcctgacaaaaatccaccttgtccttgctgtggtacccgggtaaactctgtgttgaatctgattgaacatctgaaagtgtcacacgggaaaaggggggtttgttttcggtgtgcaaaatgtggaaaggaaaatagtaactatcacagtgttgtttgtcattttccaaaatgcaggggtccagagacggagaaagccccagctggggagtggatttgtgaggtatgcaacagagattttacaaccaaaattggcctgggacaacacaagagattggcacacccagcagtgagaaatcaggaaaggatcgttgcttcccaaccgaaagaaacatcaaatagaggtgctcacaaaaggtgctggacaaaggaggaggaagaattactaataagactggaggctcagttcgagggaaacaaaaatattaataagcttattgcagaacacataaccaccaaaacagctaagcagatcagtgacaaaaggcgattgctgtccagaaagccagcagaggagccacgtgaggagcctggaacgtgtcatcacaccaggagagcagctgcgagcctgagaacggagcctgagatgagtcatcacgcccaggcagaggacagagataatggacctgggagacgccctctgccaggcagggcagctgccggagggagaacaatggacgagataagacgccaccctgataagggcaacggacagcagagacccaccaagcaaaaatcagaagaacagctgcaggcttactataaaaagacactagaggaacgactttcagctggggcacttaacaccttcccccgagcattcaagcaggtaatggaaggccgggatataaagctagtaatcaatcagacagcgcaggactgcttcggatgcctggaatccataagccaaataagaacggcaacccgagataaaaaggacacggtgacccgggagaaacacccaaagaaaccttttcagaagtggatgaagaagagagcaatcaaaaaaggtaattatcttcggttccagcgtttattttatcttgatagagggaaactggctaaaatcattttagatgatattgaatgcttgtcttgtgacataccactcagtgaaatttattcggtttttaaaacaagatgggaaacaactggtagctttaaaagccttggggactttaaaacttacgggaaggctgacaacactgccttcagagaattaattacggctaaagaaattgagaaaaatgtgcaggaaatgagcaaaggctcggctcccggtccagacgggattactcttggggacgtcgtaaagatggatcccgagttttcccggaccatggagattttcaatttatggttaacaactggtaaaatcccggacatggtgagggggtgcagaaccgttttgattccaaaatcatcaaagccggatcgtttgaaagacattaataactggagacctatcacgatcggttccatcttgctgagactgttctccaggattgtaacagctaggctgagcaaagcgtgccccctgaacccaaggcaaagaggctttatcagagcggcgggatgctctgaaaacttaaaactcctgcaaactataatttggtcggccaaaagagaacacagaccactgggtgttgtattcgtggacatcgccaaggcttttgacaccgtaagccaccagcacatcattcatgctttgcagcaaagagaggtggatccccacatcgtcggtctggtgagcaatatgtacgagaacatcagtacgtatatcaccacaaagaggaacacacacacagacaaaatccagatccgggttggagtaaagcagggtgacccgatgtcgccccttttatttaacctggcaatggaccctctattatgcaagctggaagagagtggcaaaggataccaccgaggacagagcagcatcacagcgatggcatttgcagacgatctggttttgctgagcgactcctgggaaggcatgaatacaaatattagcatactggagaccttctgcaatctgaccggactcaaaacacaggggcaaaagtgccacggcttttacatcaagccgacaaagaagtcttacaccatcaatgactgcgctgcctggactatcaacggcacacccctgaacatgatcgaccccggcgaatctgagaaatacctcggcctgcagtttgacccgtggattggaatagcaaggtccggtctctccacaaaactagatttttggcttcagcggatcgatcaagcaccacttaaacctctgcagaaactggatattctcaaaacatacaccatccctcggctgatctacatagctgaccactcagaagtgaaaactgcactactcgaaacccttgaccagaagatccggacagcggtcaaggaatggcttcacctacctccgtgcacctgcgatgccatcctgtactcgagcacgagagacggcggtttgggcatcaccaaattggcaggactgatccccagcgtgcaggcccgtagactgcatcggatcgcacagtcatctgacgatacgatgaaatgcttcatggaaaaagagaaaatggaacagctgcataagaaattgtggattcaagctggaggggacagagagaacataccctcgatttgggaagcaccaccgtcgagtgaaccaccaaacaacgtgagcacaaattcggaatgggaagcaccgacccagaaagataaatttccaaagccttgcaattggaggaaaaacgaattcaaaaaatggaccaaattggcatcccaaggccgcggaattgtaaattttgaaagagacaaaattagtaaccattggatccaatactacagacgcatacctcacaggaaactcctcactgcactacaactcagggccaacgtttaccccacgagagaatttctagccaggggtagacaagaccaatacatcaaggcgtgtaggcactgcgatgcggacattgaatcctgcgcccacatcatcggcaactgcccagtgacacaggacgcccgaatcaagaggcacaattacatctgcgaactgcttctcgaggaggcgaagaagaaggactgggtagtgttcaaggaaccgcacataagggattccaacaaggaactgtacaaacctgacctgatatttgtgaaggatggccgtgcacttgtcgtggatgtgacagtacggtatgaagcagccaaatcatcgctggaggaagccgctgcagagaaagtgagaaagtacaaacacctggaaacggaagtaagacatctcacgaatgcaaaggacgttacttttgtgggctttcccctaggagcgcgggggaaatggcaccaagataactttaaacttttgactgagcttggcctctccaaatcgaggcaagtgaaaatggcagagactttttccacagtagcgctcttttcatctgtggacattgtacatatgtttgccagtagggccagaaaatctatggttatgtgataataggctgccttctgcggggcttgccttctggccatgcccttcttctctcccttgcacctgtacctcttggtctttgaataaagcctgagtaggaaggaccggtaaaaaaaaaaaaaaaaaaaaaaaaaaaaaaacgttgactaaaaaaaaaaaaaaaaaaaaaaaaaaaaaaaaaaaaaaaaaaaaaaaaaaaaaaaaaaaaaaaaaaaaaa

SEQ ID NO: 11624 - DNA, 4564 bp, synthetic construct
  source 1..4564: mol_type = other DNA
ggtctagttacaactgggcatcgctgcagagatcgcacctcctcgtggtcccgctggtagcccttcgaagggtgactaagtcgatctctgccccaggtacggagccgttgggactcaccagtccaacgtaactcctgcctaaattcggtgaaacaaattcctcggtaaaaagccccatggcttcttgcccgaaacctggccccccggtttcagcaggggcaatgagtttggaaagtggactgaccacccactccgttctcgccatcgaacgtggtcccaattcgttggcaaattccggatcagactttgggggggggggtctggggctaccgttacgcctattgagggtatcggtcggcactcagacctcccgctccgactgggtagacctggtgtcctggagccacccaggacccacgtctaagtcccagcaggttgacctggtgtctttatttcctaaacaccgggttgacctgttatccaaaaacgaccaggtagacctggtggctcaatttttaccatctaaatttccccccaatttggcagaaaatgatttggctttgctggtgaacttagagttctacagatcggatttgcatgtgtatgagggcgttcataaggctgcacattgggagggattaagtggtttgcctgaggtgtatgaacaacttgcaccacaaccgtgtgtgggagaaactttacattctagcctcccacgagacagtgaactgtttgtgcctgaagaggggagcagcgagaaggagagcgaggacgcgccaaaaacatctcctccgacgcctgggaaacatggtttggaacagactggggaggaaaaagtgatggtgactgttcctgacaaaaatccaccttgtccttgctgtggtacccgggtaaactctgtgttgaatctgattgaacatctgaaagtgtcacacgggaaaaggggggtttgttttcggtgtgcaaaatgtggaaaggaaaatagtaactatcacagtgttgtttgtcattttaagaaatgcaggggtccagagacggagaaagccccagctggggagtggatttgtgaggtatgcaacagagattttacaaccaaaattggcctgggacaacacaagagattggcacacccagcagtgagaaatcaggaaaggatcgttgcttcccaaccgaaagaaacatcaaatagaggtgctcacaaaaggtgctggacaaaggaggaggaagaattactaataagactggaggctcagttcgagggaaacaaaaatattaataagcttattgcagaacacataaccaccaaaacagctaagcagatcagtgacaaaaggcgattgctgtccagaaagccagcagaggagccacgtgaggagcctggaacgtgtcatcacaccaggagagcagctgcgagcctgagaacggagcctgagatgagtcatcacgcccaggcagaggacagagataatggacctgggagacgccctctgccaggcagggcagctgccggagggagaacaatggacgagataagacgccaccctgataagggcaacggacagcagagacccaccaagcaaaaatcagaagaacagctgcaggcttactataaaaagacactagaggaacgactttcagctggggcacttaacaccttcccccgagcattcaagcaggtaatggaaggccgggatataaagctagtaatcaatcagacagcgcaggactacttcggatgcctggaatccataagccaaataagaacggcaacccgagataaaaaggacacggtgacccggaagaaacacccaaagaaaccttttcagaagtggatgaagaagagagcaatcaaaaaaggtaattatcttcggttccagcgtttattttatcttgatagagggaaactggctaaaatcattttagatgatattgaatgcttgtcttgtgacataccactcagtgaaatttattcggtttttaaaacaagatgggaaacaactggtagctttaaaagccttggggactttaaaacttacgggaaggctgacaacactgccttcagagaattaattacggctaaagaaattgagaaaaatgtgcaggaaatgagcaaaggctcggctcccggtccagacgggattactcttggggacgtcgtaaagatggatcccgagggctcccggaccatggagattttcaatttatggttaacaactggtaaaatcccggacatggtgagggggtgcagaaccgttttgattccaaaatcatcagacccggatcgtttgaaagacattaataactggagacctatcacgatcggttccatcttgctgagactgttctccaggattgtaacagctaggctgagcaaagcgtgccccctgaacccaaggcaaagaggctttatcagagcggcgggatgctctgaaaacttaaaactcctgcaaactataatttggtcggccaaaagagaacacagaccactgggtgttgtattcgtggacatcgccaaggcttttgacaccgtaagccaccagcacatcattcatgctttgcagcaaagagaggtggatccccacatcgtcggtctggtgagcaatatgtacgagaacatcagtacgtatatcaccacaaagaggaacacacacacagacaaaatccagatccgggttggagtaaagcagggtgacccgatgtcgccccttttatttaacctggcaatggaccctctattatgcaagctggaagagagtggcaaaggataccaccgaggacagagcagcatcacagcgatggcatttgcagacgatctggttttgctgagcgactcctgggaaggcatgaatacaaatattagcatactggagaccttctgcaatctgaccggactcaaaacacaggggcaaaagtgccacggcttttacatcaagccgacaaagaagtcttacaccatcaatgactgcgctgcctggactatcaacggcacacccctgaacatgatcgaccccggcgaatctgagaaatacctcggcctgcagtttgacccgtggattggaatagcaaggtccggtctctccacaaaactagatttttggcttcagcggatcgatcaagcaccacttaaacctctgcagaaactggatattctcaaaacatacaccatccctcggctgatctacatagctgaccactcagaagtgaaaactgcactactcgaaacccttgaccagaagatccggacagcggtcaaggaatggcttcacctacctccgtgcacctgcgatgccatcctgtactcgagcacgagagacggcggtttgggcatcaccaaattggcaggactgatccccagcgtgcaggcccgtagactgcatcggatcgcacagtcatctgacgatacgatgaaatgcttcatggaaaaagagaaaatggaacagctgcataagaaattgtggattcaagctggaggggacagagagaacataccctcgatttgggaagcaccaccgtcgagtgaaccaccaaacaacgtgagcacaaattcggaatgggaagcaccgacccagaaagataaatttccaaagccttgcaattggaggaaaaacgaattcaaaaaatggaccaaattggcatcccaaggccgcggaattgtaaattttgaaagagacaaaattagtaaccattggatccaatactacagacgcatacctcacaggaaactcctcactgcactacaactcagggccaacgtttaccccacgagagaatttctagccaggggtagacaagaccaatacatcaaggcgtgtaggcactgcgatgcggacattgaatcctgcgcccacatcatcggcaactgcccagtgacacaggacgcccgaatcaagaggcacaataagatctgcgaactgcttctcgaggaggcgaagaagaaggactgggtagtgttcaaggaaccgcacataagggattccaacaaggaactgtacaaacctgacctgatatttgtgaaggatgcccgtgcacttgtcgtggatgtgacagtacggtatgaagcagccaaatcatcgctggaggaagccgctgcagagaaagtgagaaagtacaaacacctggaaacggaagtaagacatctcacgaatgcaaaggacgttacttttgtgggctttcccctaggagcgcgggggaaatggcaccaagataactttaaacttttgactgagcttggcctctccaaatcgaggcaagtgaaaatggcagagactttttccacagtagcgctcttttcatctgtggacattgtacatatgtttgccagtagggccagaaaatctatggttatgtgataataggctgccttctgcggggcttgccttctggccatgcccttcttctctcccttgcacctgtacctcttggtctttgaataaagcctgagtaggaaggaccggtaaaaaaaaaaaaaaaaaaaaaaaaaaaaaaacgttgactaaaaaaaaaaaaaaaaaaaaaaaaaaaaaaaaaaaaaaaaaaaaaaaaaaaaaaaaaaaaaaaaaaaaaa

SEQ ID NO: 11625 - DNA, 4564 bp, synthetic construct
  source 1..4564: mol_type = other DNA
ggtctagttacaactgggcatcgctgcagagatcgcacctcctcgtggtcccgctggtagcccttcgaagggtgactaagtcgatctctgccccaggtacggagccgttgggactcaccagtccaacgtaactcctgcctaaattcggtgaaacaaattcctcggtaaaaagccccatggcttcttgcccgaaacctggccccccggtttcagcaggggcaatgagtttggaaagtggactgaccacccactccgttctcgccatcgaacgtggtcccaattcgttggcaaattccggatcagactttgggggggggggtctggggctaccgttacgcctattgagggtatcggtcggcactcagacctcccgctccgactgggtagacctggtgtcctggagccacccaggacccacgtctaagtcccagcaggttgacctggtgtctttatttcctaaacaccgggttgacctgttatccaaaaacgaccaggtagacctggtggctcaatttttaccatctaaatttccccccaatttggcagaaaatgatttggctttgctggtgaacttagagttctacagatcggatttgcatgtgtatgagtgtgttcataaggctgcacattgggagggattaagtggtttgcctgaggtgtatgaacaacttgcaccacaaccgtgtgtgggagaaactttacattctagcctcccacgagacagtgaactgtttgtgcctgaagaggggagcagcgagaaggagagcgaggacgcgccaaaaacatctcctccgacgcctgggaaacatggtttggaacagactggggaggaaaaagtgatggtgactgttcctgacaaaaatccaccttgtccttgctgtggtacccgggtaaactctgtgttgaatctgattgaacatctgaaagtgtcacacgggaaaaggggggtttgttttcggtgtgcaaaatgtggaaaggaaaatagtaactatcacagtgttgtttgtcattttccaaaatgcaggggtccagagacggagaaagccccagctggggagtggatttgtgaggtatgcaacagagattttacaaccaaaattggcctgggacaacacaagagattggcacacccagcagtgagaaatcaggaaaggatcgttgcttcccaaccgaaagaaacatcaaatagaggtgctcacaaaaggtgctggacaaaggaggaggaagaattactaataagactggaggctcagttcgagggaaacaaaaatattaataagcttattgcagaacacataaccaccaaaacagctaagcagatcagtgacaaaaggcgattgctgtccagaaagccagcagaggagccacgtgaggagcctggaacgtgtcatcacaccaggagagcagctgcgagcctgagaacggagcctgagatgagtcatcacgcccaggcagaggacagagataatggacctgggagacgccctctgccaggcagggcagctgccggagggagaacaatggacgagataagacgccaccctgataagggcaacggacagcagagacccaccaagcaaaaatcagaagaacagctgcaggcttactataaaaagacactagaggaacgactttcagctggggcacttaacaccttcccccgagcattcaagcaggtaatggaaggccgggatataaagctagtaatcaatcagacagcgcaggactgcttcggatgcctggaatccataagccaaataagaacggcaacccgagataaaaagtacacggtgacccgggagaaacacccaaagaaaccttttcagaagtggatgaaggacagagcaatcaaaaaaggtaattatcttcggttccagcgtttattttatcttgatagagggaaactggctaaaatcattttagatgatattgaatgcttgtcttgtgacataccactcagtgaaatttattcggtttttaaaacaagatgggaaacaactggtagctttaaaagccttggggactttaaaacttacgggaaggctgacaacactgccttcagagaattaattacggctaaagaaattgagaaaaatgtgcaggaaatgagcaaaggctcggctcccggtccagacgggattactcttggggacgtcgtaaagatggatcccgagttttccctgaccatggagattttcaatttatggttaacaactggtaaaatcccggacatggtgagggggtgcagaaccgttttgattccaaaatcatcaaagccggatcgtttgaaagacattaataactggagacctatcacgatcggttccatcttgctgagactgttctccaggattgtaacagctaggctgagcaaagcgtgccccctgaacccaaggcaaagaggctttatcagagcggcgggatgctctgaaaacttaaaactcctgcaaactataatttggtcggccaaaagagaacacagaccactgggtgttgtattcgtggacatcgccaaggcttttgacaccgtaagccaccagcacatcattcatgctttgcagcaaagagaggtggatccccacatcgtcggtctggtgagcaatatgtacgagaacatcagtacgtatatcaccacaaagaggaacacacacacagacaaaatccagatccgggttggagtaaagcagggtgacccgatgtcgccccttttatttaacctggcaatggaccctctattatgcaagctggaagagagtggcaaaggataccaccgaggacagagcagcatcacagcgatggcatttgcagacgatctggttttgctgagcgactcctgggaaaatatgaatacaaatattagcatactggagaccttctgcaatctgaccggactcaaaacacaggggcaaaagtgccacggcttttacatcaagccgacaaaggactcttacaccatcaatgactgcgctgcctggactatcaacggcacacccctgaacatgatcgaccccggcgaatctgagaaatacctcggcctgcagtttgacccgtggattggaatagcaaggtccggtctctccacaaaactagatttttggcttcagcggatcgatcaagcaccacttaaacctctgcagaaaactgatattctcaaaacatacaccatccctcggctgatctacatagctgaccactcagaagtgaaagccgcactactcgaaacccttgaccagaagatccggacagcggtcaaggaatggcttcacctacctccgtgcacctgcgatgccatcctgtactcgagcacgagagacggcggtttgggcatcaccaaattggcaggactgatccccagcgtgcaggcccgtagactgcatcggatcgcacagtcatctgacgatacgatgaaatgcttcatggaaaaagagaaaatggaacagctgcataagaaattgtggattcaagctggaggggacagagagaacataccctcgatttgggaagcaccaccgtcgagtgaaccaccaaacaacgtgagcacaaattcggaatgggaagcaccgacccagaaacccaaatttccaaagccttgcaattggaggaaaaacgaattcaaaaaatggaccaaattggcatcccaaggccgcggaattgtaaattttgaaagagacaaaattagtaaccattggatccaatactacagacgcatacctcacaggaaactcctcactgcactacaactcagggccaacgtttaccccacgagagaatttctagccaggggtagacaagaccaatacatcaaggcgtgtaggcactgcgatgcggacattgaatcctgcgcccacatcatcggcaactgcccagtgacacaggacgcccgaatcaagaggcacaattacatctgcgaactgcttctcgaggaggcgaagaagaaggactgggtagtgttcaaggaaccgcacataagggattccaacaaggaactgtacaaacctgacctgatatttgtgaaggatgcccgtgcacttgtcgtggatgtgacagtacggtatgaagcagccaaatcatcgctggaggaagccgctgcagagaaagtgagaaagtacaaacacctggaaacggaagtaagacatctcacgaatgcaaaggacgttacttttgtgggctttcccctaggagcgcgggggaaatggcaccaagataactttaaacttttgactgagcttggcctctccaaatcgaggcaagtgaaaatggcagagactttttccacagtagcgctcttttcatctgtggacattgtacatatgtttgccagtagggccagaaaatctatggttatgtgataataggctgccttctgcggggcttgccttctggccatgcccttcttctctcccttgcacctgtacctcttggtctttgaataaagcctgagtaggaaggaccggtaaaaaaaaaaaaaaaaaaaaaaaaaaaaaaacgttgactaaaaaaaaaaaaaaaaaaaaaaaaaaaaaaaaaaaaaaaaaaaaaaaaaaaaaaaaaaaaaaaaaaaaaa

SEQ ID NO: 11626 - DNA, 4564 bp, synthetic construct
  source 1..4564: mol_type = other DNA
ggtctagttacaactgggcatcgctgcagagatcgcacctcctcgtggtcccgctggtagcccttcgaagggtgactaagtcgatctctgccccaggtacggagccgttgggactcaccagtccaacgtaactcctgcctaaattcggtgaaacaaattcctcggtaaaaagccccatggcttcttgcccgaaacctggccccccggtttcagcaggggcaatgagtttggaaagtggactgaccacccactccgttctcgccatcgaacgtggtcccaattcgttggcaaattccggatcagactttgggggggggggtctggggctaccgttacgcctattgagggtatcggtcggcactcagacctcccgctccgactgggtagacctggtgtcctggagccacccaggacccacgtctaagtcccagcaggttgacctggtgtctttatttcctaaacaccgggttgacctgttatccaaaaacgaccaggtagacctggtggctcaatttttaccatctaaatttccccccaatttggcagaaaatgatttggctttgctggtgaacttagagttctacagatcggatttgcatgtgtatgagtgtgttcattttgctgcacattgggagggattaagtggtttgcctgaggtgtatgaacaacttgcaccacaaccgtgtgtgggagaaactttacattctagcctcccacgagacagtgaactgtttgtgcctgaagaggggagcagcgagaaggagagcgaggacgcgccaaaaacatctcctccgacgcctgggaaacatggtttggaacagactggggaggaaaaagtgatggtgactgttcctgacaaaaatccaccttgtccttgctgtggtacccgggtaaactctgtgttgaatctgattgaacatctgaaagtgtcacacgggaaaaggggggtttgttttcggtgtgcaaaatgtggaaaggaaaatagtaactatcacagtgttgtttgtcattttaagaaatgcaggggtccagagacggagaaagccccagctggggagtggatttgtgaggtatgcaacagagattttacaaccaaaattggcctgggacaacacaagagattggcacacccagcagtgagaaatcaggaaaggatcgttgcttcccaaccgaaagaaacatcaaatagaggtgctcacaaaaggtgctggacaaaggaggaggaagaattactaataagactggaggctcagttcgagggaaacaaaaatattaataagcttattgcagaacacataaccaccaaaacagctaagcagatcagtgacaaaaggcgattgctgtccagaaagccagcagaggagccacgtgaggagcctggaacgtgtcatcacaccaggagagcagctgcgagcctgagaacggagcctgagatgagtcatcacgcccaggcagaggacagagataatggacctgggagacgccctctgccaggcagggcagctgccggagggagaacaatggacgagataagacgccaccctgataagggcaacggacagcagagacccaccaagcaaaaatcagaagaacagctgcaggcttactataaaaagacactagaggaacgactttcagctggggcacttaacaccttcccccgagcattcaagcaggtaatggaaggccgggatataaagctagtaatcaatcagacagcgcaggactgcttcggatgcctggaatccataagccaaataagaacggcaacccgagataaaaagtacacggtgacccgggagaaacacccaaagaaaccttttcagaagtggatgaagaagagagcaatcaaaaaaggtaattatcttcggttccagcgtttattttatcttgatagagggaaactggctaaaatcattttagatgatattgaatgcttgtcttgtgacataccactcagtgaaatttattcggtttttaaaacaagatgggaaacaactggtagctttaaaagccttggggactttaaaacttacgggaaggctgacaacactgccttcagagaattaattacggctaaagaaattgagaaaaatgtgcaggaaatgagcaaaggctcggctcccggtccagacgggattactcttggggacgtcgtaaagatggatcccgagttttccctgaccatggagattttcaatttatggttaacaactggtaaaatcccggacatggtgagggggtgcagaaccgttttgattccaaaatcatcaaagccggatcgtttgaaagacattaataactggagacctatcacgatcggttccatcttgctgagactgttctccaggattgtaacagctaggctgagcaaagcgtgccccctgaacccaaggcaaagaggctttatcagagcggcgggatgctctgaaaacttaaaactcctgcaaactataatttggtcggccaaaagagaacacagaccactgggtgttgtattcgtggacatcgccaaggcttttgacaccgtaagccaccagcacatcattcatgctttgcagcaaagagaggtggatccccacatcgtcggtctggtgagcaatatgtacgagaacatcagtacgtatatcaccacaaagaggaacacacacacagacaaaatccagatccgggttggagtaaagcagggtgacccgatgtcgccccttttatttaacctggcaatggaccctctattatgcaagctggaagagagtggcaaaggataccaccgaggacagagcagcatcacagcgatggcatttgcagacgatctggttttgctgagcgactcctgggaaaatatgaatacaaatattagcatactggagaccttctgcaatctgaccggactcaaaacacaggggcaaaagtgccacggcttttacatcaagccgacaaaggactcttacaccatcaatgactgcgctgcctggactatcaacggcacacccctgaacatgatcgaccccggcgaatctgagaaatacctcggcctgcagtttgacccgtggattggaatagcaaggtccggtctctccacaaaactagatttttggcttcagcggatcgatcaagcaccacttaaacctctgcagaaaactgatattctcaaaacatacaccatccctcggctgatctacatagctgaccactcagaagtgaaagccgcactactcgaaacccttgaccagaagatccggacagcggtcaaggaatggcttcacctacctccgtgcacctgcgatgccatcctgtactcgagcacgagagacggcggtttgggcatcaccaaattggcaggactgatccccagcgtgcaggcccgtagactgcatcggatcgcacagtcatctgacgatacgatgaaatgcttcatggaaaaagagaaaatggaacagctgcataagaaattgtggattcaagctggaggggacagagagaacataccctcgatttgggaagcaccaccgtcgagtgaaccaccaaacaacgtgagcacaaattcggaatgggaagcaccgacccagaaacccaaatttccaaagccttgcaattggaggaaaaacgaattcaaaaaatggaccaaattggcatcccaaggccgcggaattgtaaattttgaaagagacaaaattagtaaccattggatccaatactacagacgcatacctcacaggaaactcctcactgcactacaactcagggccaacgtttaccccacgagagaatttctagccaggggtagacaagaccaatacatcaaggcgtgtaggcactgcgatgcggacattgaatcctgcgcccacatcatcggcaactgcccagtgacacaggacgcccgaatcaagaggcacaattacatctgcgaactgcttctcgaggaggcgaagaagaaggactgggtagtgttcaaggaaccgcacataagggattccaacaaggaactgtacaaacctgacctgatatttgtgaaggatgcccgtgcacttgtcgtggatgtgacagtacggtatgaagcagccaaatcatcgctggaggaagccgctgcagagaaagtgagaaagtacaaacacctggaaacggaagtaagacatctcacgaatgcaaaggacgttacttttgtgggctttcccctaggagcgcgggggaaatggcaccaagataactttaaacttttgactgagcttggcctctccaaatcgaggcaagtgaaaatggcagagactttttccacagtagcgctcttttcatctgtggacattgtacatatgtttgccagtagggccagaaaatctatggttatgtgataataggctgccttctgcggggcttgccttctggccatgcccttcttctctcccttgcacctgtacctcttggtctttgaataaagcctgagtaggaaggaccggtaaaaaaaaaaaaaaaaaaaaaaaaaaaaaaacgttgactaaaaaaaaaaaaaaaaaaaaaaaaaaaaaaaaaaaaaaaaaaaaaaaaaaaaaaaaaaaaaaaaaaaaaa

SEQ ID NO: 11627 - DNA, 4564 bp, synthetic construct
  source 1..4564: mol_type = other DNA
ggtctagttacaactgggcatcgctgcagagatcgcacctcctcgtggtcccgctggtagcccttcgaagggtgactaagtcgatctctgccccaggtacggagccgttgggactcaccagtccaacgtaactcctgcctaaattcggtgaaacaaattcctcggtaaaaagccccatggcttcttgcccgaaacctggccccccggtttcagcaggggcaatgagtttggaaagtggactgaccacccactccgttctcgccatcgaacgtggtcccaattcgttggcaaattccggatcagactttgggggggggggtctggggctaccgttacgcctattgagggtatcggtcggcactcagacctcccgctccgactgggtagacctggtgtcctggagccacccaggacccacgtctaagtcccagcaggttgacctggtgtctttatttcctaaacaccgggttgacctgttatccaaaaacgaccaggtagacctggtggctcaatttttaccatctaaatttccccccaatttggcagaaaatgatttggctttgctggtgaacttagagttctacagatcggatttgcatgtgtatgagtgtgttcataaggctgcacattgggagggattaagtggtttgcctgaggtgtatgaacaacttgcaccacaaccgtgtgtgggagaaactttacattctagcctcccacgagacagtgaactgtttgtgcctgaagaggggagcagcgagaaggagagcgaggacgcgccaaaaacatctcctccgacgcctgggaaacatggtttggaacagactggggaggaaaaagtgatggtgactgttcctgacaaaaatccaccttgtccttgctgtggtacccgggtaaactctgtgttgaatctgattgaacatctgaaagtgtcacacgggaaaaggggggtttgttttcggtgtgcaaaatgtggaaaggaaaatagtaactatcacagtgttgtttgtcattttaagaaatgcaggggtccagagacggagaaagccccagctggggagtggatttgtgaggtatgcaacagagattttacaaccaaaattggcctgggacaacacaagagattggcacacccagcagtgagaaatcaggaaaggatcgttgcttcccaaccgaaagaaacatcaaatagaggtgctcacaaaaggtgctggacaaaggaggaggaagaattactaataagactggaggctcagttcgagggaaacaaaaatattaataagcttattgcagaacacataaccaccaaaacagctaagcagatcagtgacaaaaggcgattgctgtccagaaagccagcagaggagccacgtgaggagcctggaacgtgtcatcacaccaggagagcagctgcgagcctgagaacggagcctgagatgagtcatcacgcccaggcagaggacagagataatggacctgggagacgccctctgccaggcagggcagctgccggagggagaacaatggacgagataagacgccaccctgataagggcaacggacagcagagacccaccaagcaaaaatcagaagaacagctgcaggcttactataaaaagacactagaggaacgactttcagctggggcacttaacaccttcccccgagcattcaagcaggtaatggaaggccgggatataaagctagtaatcaatcagacagcgcaggactgcttcggatgcctggaatccataagccaaataagaacggcaacccgagataaaaagtacacggtgacccgggagaaacacccaaagaaaccttttcagaagtggatgaagaagagagcaatcaaaaaaggtaattatcttcggttccagcgtttattttatcttgatagagggaaactggctaaaatcattttagatgatattgaatgcttgtcttgtgacataccactcagtgaaatttattcggtttttaaaacaagatgggaaacaactggtagctttaaaagccttggggactttaaaacttacgggaaggctgacaacactgccttcagagaattaattacggctaaagaaattgagaaaaatgtgcaggaaatgagcaaaggctcggctcccggtccagacgggattactcttggggacgtcgtaaagatggatcccgagttttccctgaccatggagattttcaatttatggttaacaactggtaaaatcccggacatggtgagggggtgcagaaccgttttgattccaaaatcatcaaagccggatcgtttgaaagacattaataactggagacctatcacgatcggttccatcttgctgagactgttctccaggattgtaacagctaggctgagcaaagcgtgccccctgaacccaaggcaaagaggctttatcagagcggcgggatgctctgaaaacttaaaactcctgcaaactataatttggtcggccaaaagagaacacagaccactgggtgttgtattcgtggacatcgccaaggcttttgacaccgtaagccaccagcacatcattcatgctttgcagcaaagagaggtggatccccacatcgtcggtctggtgagcaatatgtacgagaacatcagtacgtatatcaccacaaagaggaacacacacacagacaaaatccagatccgggttggagtaaagcagggtgacccgatgtcgccccttttatttaacctggcaatggaccctctattatgcaagctggaagagagtggcaaaggataccaccgaggacagagcagcatcacagcgatggcatttgcagacgatctggttttgctgagcgactcctgggaaaatatgaatacaaatattagcatactggagaccttctgcaatctgaccggactcaaaacacaggggcaaaagtgccacggcttttacatcaagccgacaaaggactcttacaccatcaatgactgcgctgcctggactatcaacggcacacccctgaacatgatcgaccccggcgaatctgagaaatacctcggcctgcagtttgacccgtggattggaatagcaaggtccggtctctccacaaaactagatttttggcttcagcggatcgatcaagcaccacttaaacctctgcagaaaactgatattctcaaaacatacaccatccctcggctgatctacatagctgaccactcagaagtgaaagccgcactactcgaaacccttgaccagaagatccggacagcggtcaaggaatggcttcacctacctccgtgcacctgcgatgccatcctgtactcgagcacgagagacggcggtttgggcatcaccaaattggcaggactgatccccagcgtgcaggcccgtagactgcatcggatcgcacagtcatctgacgatacgatgaaatgcttcatggaaaaagagaaaatggaacagctgcataagaaattgtggattcaagctggaggggacagagagaacataccctcgatttgggaagcaccaccgtcgagtgaaccaccaaacaacgtgagcacaaattcggaatgggaagcaccgacccagaaacccaaatttccaaagccttgcaattggaggaaaaacgaattcaaaaaatggaccaaattggcatcccaaggccgcggaattgtaaattttgaaagagacaaaattagtaaccattggatccaatactacagacgcatacctcacaggaaactcctcactgcactacaactcagggccaacgtttaccccacgagagaatttctagccaggggtagacaagaccaatacatcaaggcgtgtaggcactgcgatgcggacattgaatcctgcgcccacatcatcggcaactgcccagtgacacaggacgcccgaatcaagaggcacaattacatctgcgaactgcttctcgaggaggcgaagaagaaggactgggtagtgttcaaggaaccgcacataagggattccaacaaggaactgtacaaacctgacctgatatttgtgaaggatgcccgtgcacttgtcgtggatgtgacagtacggtatgaagcagccaaatcatcgctggaggaagccgctgcagagaaagtgagaaagtacaaacacctggaaacggaagtaagacatctcacgaatgcaaaggacgttacttttgtgggctttcccctaggagcgcgggggaaatggcaccaagataactttaaacttttgactgagcttggcctctccaaatcgaggcaagtgaaaatggcagagactttttccacagtagcgctcttttcatctgtggacattgtacatatgtttgccagtagggccagaaaatctatggttatgtgataataggctgccttctgcggggcttgccttctggccatgcccttcttctctcccttgcacctgtacctcttggtctttgaataaagcctgagtaggaaggaccggtaaaaaaaaaaaaaaaaaaaaaaaaaaaaaaacgttgactaaaaaaaaaaaaaaaaaaaaaaaaaaaaaaaaaaaaaaaaaaaaaaaaaaaaaaaaaaaaaaaaaaaaaa

SEQ ID NO: 11628 - DNA, 5407 bp, synthetic construct
  source 1..5407: mol_type = other DNA
ggtctagttacaactgggcatcgctgcagagatcgcacctcctcgtggtcccgctggtagcccttcgaagggtgactaagtcgatctctgccccaggtacggagccgttgggactcaccagtccaacgtaactcctgcctaaattcggtgaaacaaattcctcggtaaaaagccccatgggaactgcactaacaccgctcctgacgaagttcgccacgcgctacgagatgggtaccacgcctgaagaagtggcgaacacgctcaagcagacctgtttcaagggccaggtcaatgattcgcagatggtcgccctgctgatcgtggcagaccagtacaagcttaaccccttcaccaaggagttgtacgcattccccgacaagaacaacggcatcgtgccggttgttggtgtggatggctgggctcggatcatcaacgagaacccacagttcgatggcatggaattctcaatggaccagcagggaaccgaatgcacctgcaagatctatcggaaggaccgcagccatgccatcagcgcgactgagtacatggccgagtgcaagcggaacacccagccttggcagtcccatccgcgccggatgcttcgccacaaggcaatgatccagtgcgcacgcctcgcgttcgggttcgccggcatatacgaccaggacgaggccgagcggatcgttgaacgagacgtcactcccgcagagcagtacgaggacgtcagcgaggcgatctgcctgatcaaggactccccaacaatggaggacttgcaggcagcattcagcaatgcctggaaagcctataagacaaagggcgcgcgcgaccagcttacggcggccaaggaccagcggaagaaagaattgctggacgcccctatagacgttgaattcgaggagaccggcgatgatcgagcagcgtctggaggatctagcggaggatcctctggcagcgagacaccaggaacaagcgagtcagcaacaccagagagcagtggcggcagcagcggcggcagcagcatggcttcttgcccgaaacctggccccccggtttcagcaggggcaatgagtttggaaagtggactgaccacccactccgttctcgccatcgaacgtggtcccaattcgttggcaaattccggatcagactttgggggggggggtctggggctaccgttacgcctattgagggtatcggtcggcactcagacctcccgctccgactgggtagacctggtgtcctggagccacccaggacccacgtctaagtcccagcaggttgacctggtgtctttatttcctaaacaccgggttgacctgttatccaaaaacgaccaggtagacctggtggctcaatttttaccatctaaatttccccccaatttggcagaaaatgatttggctttgctggtgaacttagagttctacagatcggatttgcatgtgtatgagtgtgttcattttgctgcacattgggagggattaagtggtttgcctgaggtgtatgaacaacttgcaccacaaccgtgtgtgggagaaactttacattctagcctcccacgagacagtgaactgtttgtgcctgaagaggggagcagcgagaaggagagcgaggacgcgccaaaaacatctcctccgacgcctgggaaacatggtttggaacagactggggaggaaaaagtgatggtgactgttcctgacaaaaatccaccttgtccttgctgtggtacccgggtaaactctgtgttgaatctgattgaacatctgaaagtgtcacacgggaaaaggggggtttgttttcggtgtgcaaaatgtggaaaggaaaatagtaactatcacagtgttgtttgtcattttccaaaatgcaggggtccagagacggagaaagccccagctggggagtggatttgtgaggtatgcaacagagattttacaaccaaaattggcctgggacaacacaagagattggcacacccagcagtgagaaatcaggaaaggatcgttgcttcccaaccgaaagaaacatcaaatagaggtgctcacaaaaggtgctggacaaaggaggaggaagaattactaataagactggaggctcagttcgagggaaacaaaaatattaataagcttattgcagaacacataaccaccaaaacagctaagcagatcagtgacaaaaggcgattgctgtccagaaagccagcagaggagccacgtgaggagcctggaacgtgtcatcacaccaggagagcagctgcgagcctgagaacggagcctgagatgagtcatcacgcccaggcagaggacagagataatggacctgggagacgccctctgccaggcagggcagctgccggagggagaacaatggacgagataagacgccaccctgataagggcaacggacagcagagacccaccaagcaaaaatcagaagaacagctgcaggcttactataaaaagacactagaggaacgactttcagctggggcacttaacaccttcccccgagcattcaagcaggtaatggaaggccgggatataaagctagtaatcaatcagacagcgcaggactgcttcggatgcctggaatccataagccaaataagaacggcaacccgagataaaaagtacacggtgacccgggagaaacacccaaagaaaccttttcagaagtggatgaaggacagagcaatcaaaaaaggtaattatcttcggttccagcgtttattttatcttgatagagggaaactggctaaaatcattttagatgatattgaatgcttgtcttgtgacataccactcagtgaaatttattcggtttttaaaacaagatgggaaacaactggtagctttaaaagccttggggactttaaaacttacgggaaggctgacaacactgccttcagagaattaattacggctaaagaaattgagaaaaatgtgcaggaaatgagcaaaggctcggctcccggtccagacgggattactcttggggacgtcgtaaagatggatcccgagttttccctgaccatggagattttcaatttatggttaacaactggtaaaatcccggacatggtgagggggtgcagaaccgttttgattccaaaatcatcaaagccggatcgtttgaaagacattaataactggagacctatcacgatcggttccatcttgctgagactgttctccaggattgtaacagctaggctgagcaaagcgtgccccctgaacccaaggcaaagaggctttatcagagcggcgggatgctctgaaaacttaaaactcctgcaaactataatttggtcggccaaaagagaacacagaccactgggtgttgtattcgtggacatcgccaaggcttttgacaccgtaagccaccagcacatcattcatgctttgcagcaaagagaggtggatccccacatcgtcggtctggtgagcaatatgtacgagaacatcagtacgtatatcaccacaaagaggaacacacacacagacaaaatccagatccgggttggagtaaagcagggtgacccgatgtcgccccttttatttaacctggcaatggaccctctattatgcaagctggaagagagtggcaaaggataccaccgaggacagagcagcatcacagcgatggcatttgcagacgatctggttttgctgagcgactcctgggaaaatatgaatacaaatattagcatactggagaccttctgcaatctgaccggactcaaaacacaggggcaaaagtgccacggcttttacatcaagccgacaaaggactcttacaccatcaatgactgcgctgcctggactatcaacggcacacccctgaacatgatcgaccccggcgaatctgagaaatacctcggcctgcagtttgacccgtggattggaatagcaaggtccggtctctccacaaaactagatttttggcttcagcggatcgatcaagcaccacttaaacctctgcagaaaactgatattctcaaaacatacaccatccctcggctgatctacatagctgaccactcagaagtgaaagccgcactactcgaaacccttgaccagaagatccggacagcggtcaaggaatggcttcacctacctccgtgcacctgcgatgccatcctgtactcgagcacgagagacggcggtttgggcatcaccaaattggcaggactgatccccagcgtgcaggcccgtagactgcatcggatcgcacagtcatctgacgatacgatgaaatgcttcatggaaaaagagaaaatggaacagctgcataagaaattgtggattcaagctggaggggacagagagaacataccctcgatttgggaagcaccaccgtcgagtgaaccaccaaacaacgtgagcacaaattcggaatgggaagcaccgacccagaaacccaaatttccaaagccttgcaattggaggaaaaacgaattcaaaaaatggaccaaattggcatcccaaggccgcggaattgtaaattttgaaagagacaaaattagtaaccattggatccaatactacagacgcatacctcacaggaaactcctcactgcactacaactcagggccaacgtttaccccacgagagaatttctagccaggggtagacaagaccaatacatcaaggcgtgtaggcactgcgatgcggacattgaatcctgcgcccacatcatcggcaactgcccagtgacacaggacgcccgaatcaagaggcacaattacatctgcgaactgcttctcgaggaggcgaagaagaaggactgggtagtgttcaaggaaccgcacataagggattccaacaaggaactgtacaaacctgacctgatatttgtgaaggatgcccgtgcacttgtcgtggatgtgacagtacggtatgaagcagccaaatcatcgctggaggaagccgctgcagagaaagtgagaaagtacaaacacctggaaacggaagtaagacatctcacgaatgcaaaggacgttacttttgtgggctttcccctaggagcgcgggggaaatggcaccaagataactttaaacttttgactgagcttggcctctccaaatcgaggcaagtgaaaatggcagagactttttccacagtagcgctcttttcatctgtggacattgtacatatgtttgccagtagggccagaaaatctatggttatgtgataataggctgccttctgcggggcttgccttctggccatgcccttcttctctcccttgcacctgtacctcttggtctttgaataaagcctgagtaggaaggaccggtaaaaaaaaaaaaaaaaaaaaaaaaaaaaaaacgttgactaaaaaaaaaaaaaaaaaaaaaaaaaaaaaaaaaaaaaaaaaaaaaaaaaaaaaaaaaaaaaaaaaaaaaa

SEQ ID NO: 11629 - DNA, 5407 bp, synthetic construct
  source 1..5407: mol_type = other DNA
ggtctagttacaactgggcatcgctgcagagatcgcacctcctcgtggtcccgctggtagcccttcgaagggtgactaagtcgatctctgccccaggtacggagccgttgggactcaccagtccaacgtaactcctgcctaaattcggtgaaacaaattcctcggtaaaaagccccatgggaactgcactaacaccgctcctgacgaagttcgccacgcgctacgagatgggtaccacgcctgaagaagtggcgaacacgctcaagcagacctgtttcaagggccaggtcaatgattcgcagatggtcgccctgctgatcgtggcagaccagtacaagcttaaccccttcaccaaggagttgtacgcattccccgacaagaacaacggcatcgtgccggttgttggtgtggatggctgggctcggatcatcaacgagaacccacagttcgatggcatggaattctcaatggaccagcagggaaccgaatgcacctgcaagatctatcggaaggaccgcagccatgccatcagcgcgactgagtacatggccgagtgcaagcggaacacccagccttggcagtcccatccgcgccggatgcttcgccacaaggcaatgatccagtgcgcacgcctcgcgttcgggttcgccggcatatacgaccaggacgaggccgagcggatcgttgaacgagacgtcactcccgcagagcagtacgaggacgtcagcgaggcgatctgcctgatcaaggactccccaacaatggaggacttgcaggcagcattcagcaatgcctggaaagcctataagacaaagggcgcgcgcgaccagcttacggcggccaaggaccagcggaagaaagaattgctggacgcccctatagacgttgaattcgaggagaccggcgatgatcgagcagcgtctggaggatctagcggaggatcctctggcagcgagacaccaggaacaagcgagtcagcaacaccagagagcagtggcggcagcagcggcggcagcagcatggcttcttgcccgaaacctggccccccggtttcagcaggggcaatgagtttggaaagtggactgaccacccactccgttctcgccatcgaacgtggtcccaattcgttggcaaattccggatcagactttgggggggggggtctggggctaccgttacgcctattgagggtatcggtcggcactcagacctcccgctccgactgggtagacctggtgtcctggagccacccaggacccacgtctaagtcccagcaggttgacctggtgtctttatttcctaaacaccgggttgacctgttatccaaaaacgaccaggtagacctggtggctcaatttttaccatctaaatttccccccaatttggcagaaaatgatttggctttgctggtgaacttagagttctacagatcggatttgcatgtgtatgagtgtgttcataaggctgcacattgggagggattaagtggtttgcctgaggtgtatgaacaacttgcaccacaaccgtgtgtgggagaaactttacattctagcctcccacgagacagtgaactgtttgtgcctgaagaggggagcagcgagaaggagagcgaggacgcgccaaaaacatctcctccgacgcctgggaaacatggtttggaacagactggggaggaaaaagtgatggtgactgttcctgacaaaaatccaccttgtccttgctgtggtacccgggtaaactctgtgttgaatctgattgaacatctgaaagtgtcacacgggaaaaggggggtttgttttcggtgtgcaaaatgtggaaaggaaaatagtaactatcacagtgttgtttgtcattttccaaaatgcaggggtccagagacggagaaagccccagctggggagtggatttgtgaggtatgcaacagagattttacaaccaaaattggcctgggacaacacaagagattggcacacccagcagtgagaaatcaggaaaggatcgttgcttcccaaccgaaagaaacatcaaatagaggtgctcacaaaaggtgctggacaaaggaggaggaagaattactaataagactggaggctcagttcgagggaaacaaaaatattaataagcttattgcagaacacataaccaccaaaacagctaagcagatcagtgacaaaaggcgattgctgtccagaaagccagcagaggagccacgtgaggagcctggaacgtgtcatcacaccaggagagcagctgcgagcctgagaacggagcctgagatgagtcatcacgcccaggcagaggacagagataatggacctgggagacgccctctgccaggcagggcagctgccggagggagaacaatggacgagataagacgccaccctgataagggcaacggacagcagagacccaccaagcaaaaatcagaagaacagctgcaggcttactataaaaagacactagaggaacgactttcagctggggcacttaacaccttcccccgagcattcaagcaggtaatggaaggccgggatataaagctagtaatcaatcagacagcgcaggactgcttcggatgcctggaatccataagccaaataagaacggcaacccgagataaaaagtacacggtgacccgggagaaacacccaaagaaaccttttcagaagtggatgaaggacagagcaatcaaaaaaggtaattatcttcggttccagcgtttattttatcttgatagagggaaactggctaaaatcattttagatgatattgaatgcttgtcttgtgacataccactcagtgaaatttattcggtttttaaaacaagatgggaaacaactggtagctttaaaagccttggggactttaaaacttacgggaaggctgacaacactgccttcagagaattaattacggctaaagaaattgagaaaaatgtgcaggaaatgagcaaaggctcggctcccggtccagacgggattactcttggggacgtcgtaaagatggatcccgagttttccctgaccatggagattttcaatttatggttaacaactggtaaaatcccggacatggtgagggggtgcagaaccgttttgattccaaaatcatcaaagccggatcgtttgaaagacattaataactggagacctatcacgatcggttccatcttgctgagactgttctccaggattgtaacagctaggctgagcaaagcgtgccccctgaacccaaggcaaagaggctttatcagagcggcgggatgctctgaaaacttaaaactcctgcaaactataatttggtcggccaaaagagaacacagaccactgggtgttgtattcgtggacatcgccaaggcttttgacaccgtaagccaccagcacatcattcatgctttgcagcaaagagaggtggatccccacatcgtcggtctggtgagcaatatgtacgagaacatcagtacgtatatcaccacaaagaggaacacacacacagacaaaatccagatccgggttggagtaaagcagggtgacccgatgtcgccccttttatttaacctggcaatggaccctctattatgcaagctggaagagagtggcaaaggataccaccgaggacagagcagcatcacagcgatggcatttgcagacgatctggttttgctgagcgactcctgggaaaatatgaatacaaatattagcatactggagaccttctgcaatctgaccggactcaaaacacaggggcaaaagtgccacggcttttacatcaagccgacaaaggactcttacaccatcaatgactgcgctgcctggactatcaacggcacacccctgaacatgatcgaccccggcgaatctgagaaatacctcggcctgcagtttgacccgtggattggaatagcaaggtccggtctctccacaaaactagatttttggcttcagcggatcgatcaagcaccacttaaacctctgcagaaaactgatattctcaaaacatacaccatccctcggctgatctacatagctgaccactcagaagtgaaagccgcactactcgaaacccttgaccagaagatccggacagcggtcaaggaatggcttcacctacctccgtgcacctgcgatgccatcctgtactcgagcacgagagacggcggtttgggcatcaccaaattggcaggactgatccccagcgtgcaggcccgtagactgcatcggatcgcacagtcatctgacgatacgatgaaatgcttcatggaaaaagagaaaatggaacagctgcataagaaattgtggattcaagctggaggggacagagagaacataccctcgatttgggaagcaccaccgtcgagtgaaccaccaaacaacgtgagcacaaattcggaatgggaagcaccgacccagaaacccaaatttccaaagccttgcaattggaggaaaaacgaattcaaaaaatggaccaaattggcatcccaaggccgcggaattgtaaattttgaaagagacaaaattagtaaccattggatccaatactacagacgcatacctcacaggaaactcctcactgcactacaactcagggccaacgtttaccccacgagagaatttctagccaggggtagacaagaccaatacatcaaggcgtgtaggcactgcgatgcggacattgaatcctgcgcccacatcatcggcaactgcccagtgacacaggacgcccgaatcaagaggcacaattacatctgcgaactgcttctcgaggaggcgaagaagaaggactgggtagtgttcaaggaaccgcacataagggattccaacaaggaactgtacaaacctgacctgatatttgtgaaggatgcccgtgcacttgtcgtggatgtgacagtacggtatgaagcagccaaatcatcgctggaggaagccgctgcagagaaagtgagaaagtacaaacacctggaaacggaagtaagacatctcacgaatgcaaaggacgttacttttgtgggctttcccctaggagcgcgggggaaatggcaccaagataactttaaacttttgactgagcttggcctctccaaatcgaggcaagtgaaaatggcagagactttttccacagtagcgctcttttcatctgtggacattgtacatatgtttgccagtagggccagaaaatctatggttatgtgataataggctgccttctgcggggcttgccttctggccatgcccttcttctctcccttgcacctgtacctcttggtctttgaataaagcctgagtaggaaggaccggtaaaaaaaaaaaaaaaaaaaaaaaaaaaaaaacgttgactaaaaaaaaaaaaaaaaaaaaaaaaaaaaaaaaaaaaaaaaaaaaaaaaaaaaaaaaaaaaaaaaaaaaaa

SEQ ID NO: 11630 - DNA, 5407 bp, synthetic construct
  source 1..5407: mol_type = other DNA
ggtctagttacaactgggcatcgctgcagagatcgcacctcctcgtggtcccgctggtagcccttcgaagggtgactaagtcgatctctgccccaggtacggagccgttgggactcaccagtccaacgtaactcctgcctaaattcggtgaaacaaattcctcggtaaaaagccccatgggaactgcactaacaccgctcctgacgaagttcgccacgcgctacgagatgggtaccacgcctgaagaagtggcgaacacgctcaagcagacctgtttcaagggccaggtcaatgattcgcagatggtcgccctgctgatcgtggcagaccagtacaagcttaaccccttcaccaaggagttgtacgcattccccgacaagaacaacggcatcgtgccggttgttggtgtggatggctgggctcggatcatcaacgagaacccacagttcgatggcatggaattctcaatggaccagcagggaaccgaatgcacctgcaagatctatcggaaggaccgcagccatgccatcagcgcgactgagtacatggccgagtgcaagcggaacacccagccttggcagtcccatccgcgccggatgcttcgccacaaggcaatgatccagtgcgcacgcctcgcgttcgggttcgccggcatatacgaccaggacgaggccgagcggatcgttgaacgagacgtcactcccgcagagcagtacgaggacgtcagcgaggcgatctgcctgatcaaggactccccaacaatggaggacttgcaggcagcattcagcaatgcctggaaagcctataagacaaagggcgcgcgcgaccagcttacggcggccaaggaccagcggaagaaagaattgctggacgcccctatagacgttgaattcgaggagaccggcgatgatcgagcagcgtctggaggatctagcggaggatcctctggcagcgagacaccaggaacaagcgagtcagcaacaccagagagcagtggcggcagcagcggcggcagcagcatggcttcttgcccgaaacctggccccccggtttcagcaggggcaatgagtttggaaagtggactgaccacccactccgttctcgccatcgaacgtggtcccaattcgttggcaaattccggatcagactttgggggggggggtctggggctaccgttacgcctattgagggtatcggtcggcactcagacctcccgctccgactgggtagacctggtgtcctggagccacccaggacccacgtctaagtcccagcaggttgacctggtgtctttatttcctaaacaccgggttgacctgttatccaaaaacgaccaggtagacctggtggctcaatttttaccatctaaatttccccccaatttggcagaaaatgatttggctttgctggtgaacttagagttctacagatcggatttgcatgtgtatgagtgtgttcattttgctgcacattgggagggattaagtggtttgcctgaggtgtatgaacaacttgcaccacaaccgtgtgtgggagaaactttacattctagcctcccacgagacagtgaactgtttgtgcctgaagaggggagcagcgagaaggagagcgaggacgcgccaaaaacatctcctccgacgcctgggaaacatggtttggaacagactggggaggaaaaagtgatggtgactgttcctgacaaaaatccaccttgtccttgctgtggtacccgggtaaactctgtgttgaatctgattgaacatctgaaagtgtcacacgggaaaaggggggtttgttttcggtgtgcaaaatgtggaaaggaaaatagtaactatcacagtgttgtttgtcattttaagaaatgcaggggtccagagacggagaaagccccagctggggagtggatttgtgaggtatgcaacagagattttacaaccaaaattggcctgggacaacacaagagattggcacacccagcagtgagaaatcaggaaaggatcgttgcttcccaaccgaaagaaacatcaaatagaggtgctcacaaaaggtgctggacaaaggaggaggaagaattactaataagactggaggctcagttcgagggaaacaaaaatattaataagcttattgcagaacacataaccaccaaaacagctaagcagatcagtgacaaaaggcgattgctgtccagaaagccagcagaggagccacgtgaggagcctggaacgtgtcatcacaccaggagagcagctgcgagcctgagaacggagcctgagatgagtcatcacgcccaggcagaggacagagataatggacctgggagacgccctctgccaggcagggcagctgccggagggagaacaatggacgagataagacgccaccctgataagggcaacggacagcagagacccaccaagcaaaaatcagaagaacagctgcaggcttactataaaaagacactagaggaacgactttcagctggggcacttaacaccttcccccgagcattcaagcaggtaatggaaggccgggatataaagctagtaatcaatcagacagcgcaggactgcttcggatgcctggaatccataagccaaataagaacggcaacccgagataaaaagtacacggtgacccgggagaaacacccaaagaaaccttttcagaagtggatgaagaagagagcaatcaaaaaaggtaattatcttcggttccagcgtttattttatcttgatagagggaaactggctaaaatcattttagatgatattgaatgcttgtcttgtgacataccactcagtgaaatttattcggtttttaaaacaagatgggaaacaactggtagctttaaaagccttggggactttaaaacttacgggaaggctgacaacactgccttcagagaattaattacggctaaagaaattgagaaaaatgtgcaggaaatgagcaaaggctcggctcccggtccagacgggattactcttggggacgtcgtaaagatggatcccgagttttccctgaccatggagattttcaatttatggttaacaactggtaaaatcccggacatggtgagggggtgcagaaccgttttgattccaaaatcatcaaagccggatcgtttgaaagacattaataactggagacctatcacgatcggttccatcttgctgagactgttctccaggattgtaacagctaggctgagcaaagcgtgccccctgaacccaaggcaaagaggctttatcagagcggcgggatgctctgaaaacttaaaactcctgcaaactataatttggtcggccaaaagagaacacagaccactgggtgttgtattcgtggacatcgccaaggcttttgacaccgtaagccaccagcacatcattcatgctttgcagcaaagagaggtggatccccacatcgtcggtctggtgagcaatatgtacgagaacatcagtacgtatatcaccacaaagaggaacacacacacagacaaaatccagatccgggttggagtaaagcagggtgacccgatgtcgccccttttatttaacctggcaatggaccctctattatgcaagctggaagagagtggcaaaggataccaccgaggacagagcagcatcacagcgatggcatttgcagacgatctggttttgctgagcgactcctgggaaaatatgaatacaaatattagcatactggagaccttctgcaatctgaccggactcaaaacacaggggcaaaagtgccacggcttttacatcaagccgacaaaggactcttacaccatcaatgactgcgctgcctggactatcaacggcacacccctgaacatgatcgaccccggcgaatctgagaaatacctcggcctgcagtttgacccgtggattggaatagcaaggtccggtctctccacaaaactagatttttggcttcagcggatcgatcaagcaccacttaaacctctgcagaaaactgatattctcaaaacatacaccatccctcggctgatctacatagctgaccactcagaagtgaaaactgcactactcgaaacccttgaccagaagatccggacagcggtcaaggaatggcttcacctacctccgtgcacctgcgatgccatcctgtactcgagcacgagagacggcggtttgggcatcaccaaattggcaggactgatccccagcgtgcaggcccgtagactgcatcggatcgcacagtcatctgacgatacgatgaaatgcttcatggaaaaagagaaaatggaacagctgcataagaaattgtggattcaagctggaggggacagagagaacataccctcgatttgggaagcaccaccgtcgagtgaaccaccaaacaacgtgagcacaaattcggaatgggaagcaccgacccagaaacccaaatttccaaagccttgcaattggaggaaaaacgaattcaaaaaatggaccaaattggcatcccaaggccgcggaattgtaaattttgaaagagacaaaattagtaaccattggatccaatactacagacgcatacctcacaggaaactcctcactgcactacaactcagggccaacgtttaccccacgagagaatttctagccaggggtagacaagaccaatacatcaaggcgtgtaggcactgcgatgcggacattgaatcctgcgcccacatcatcggcaactgcccagtgacacaggacgcccgaatcaagaggcacaattacatctgcgaactgcttctcgaggaggcgaagaagaaggactgggtagtgttcaaggaaccgcacataagggattccaacaaggaactgtacaaacctgacctgatatttgtgaaggatgcccgtgcacttgtcgtggatgtgacagtacggtatgaagcagccaaatcatcgctggaggaagccgctgcagagaaagtgagaaagtacaaacacctggaaacggaagtaagacatctcacgaatgcaaaggacgttacttttgtgggctttcccctaggagcgcgggggaaatggcaccaagataactttaaacttttgactgagcttggcctctccaaatcgaggcaagtgaaaatggcagagactttttccacagtagcgctcttttcatctgtggacattgtacatatgtttgccagtagggccagaaaatctatggttatgtgataataggctgccttctgcggggcttgccttctggccatgcccttcttctctcccttgcacctgtacctcttggtctttgaataaagcctgagtaggaaggaccggtaaaaaaaaaaaaaaaaaaaaaaaaaaaaaaacgttgactaaaaaaaaaaaaaaaaaaaaaaaaaaaaaaaaaaaaaaaaaaaaaaaaaaaaaaaaaaaaaaaaaaaaaa

SEQ ID NO: 11631 - DNA, 5407 bp, synthetic construct
  source 1..5407: mol_type = other DNA
ggtctagttacaactgggcatcgctgcagagatcgcacctcctcgtggtcccgctggtagcccttcgaagggtgactaagtcgatctctgccccaggtacggagccgttgggactcaccagtccaacgtaactcctgcctaaattcggtgaaacaaattcctcggtaaaaagccccatgggaactgcactaacaccgctcctgacgaagttcgccacgcgctacgagatgggtaccacgcctgaagaagtggcgaacacgctcaagcagacctgtttcaagggccaggtcaatgattcgcagatggtcgccctgctgatcgtggcagaccagtacaagcttaaccccttcaccaaggagttgtacgcattccccgacaagaacaacggcatcgtgccggttgttggtgtggatggctgggctcggatcatcaacgagaacccacagttcgatggcatggaattctcaatggaccagcagggaaccgaatgcacctgcaagatctatcggaaggaccgcagccatgccatcagcgcgactgagtacatggccgagtgcaagcggaacacccagccttggcagtcccatccgcgccggatgcttcgccacaaggcaatgatccagtgcgcacgcctcgcgttcgggttcgccggcatatacgaccaggacgaggccgagcggatcgttgaacgagacgtcactcccgcagagcagtacgaggacgtcagcgaggcgatctgcctgatcaaggactccccaacaatggaggacttgcaggcagcattcagcaatgcctggaaagcctataagacaaagggcgcgcgcgaccagcttacggcggccaaggaccagcggaagaaagaattgctggacgcccctatagacgttgaattcgaggagaccggcgatgatcgagcagcgtctggaggatctagcggaggatcctctggcagcgagacaccaggaacaagcgagtcagcaacaccagagagcagtggcggcagcagcggcggcagcagcatggcttcttgcccgaaacctggccccccggtttcagcaggggcaatgagtttggaaagtggactgaccacccactccgttctcgccatcgaacgtggtcccaattcgttggcaaattccggatcagactttgggggggggggtctggggctaccgttacgcctattgagggtatcggtcggcactcagacctcccgctccgactgggtagacctggtgtcctggagccacccaggacccacgtctaagtcccagcaggttgacctggtgtctttatttcctaaacaccgggttgacctgttatccaaaaacgaccaggtagacctggtggctcaatttttaccatctaaatttccccccaatttggcagaaaatgatttggctttgctggtgaacttagagttctacagatcggatttgcatgtgtatgagtgtgttcattttgctgcacattgggagggattaagtggtttgcctgaggtgtatgaacaacttgcaccacaaccgtgtgtgggagaaactttacattctagcctcccacgagacagtgaactgtttgtgcctgaagaggggagcagcgagaaggagagcgaggacgcgccaaaaacatctcctccgacgcctgggaaacatggtttggaacagactggggaggaaaaagtgatggtgactgttcctgacaaaaatccaccttgtccttgctgtggtacccgggtaaactctgtgttgaatctgattgaacatctgaaagtgtcacacgggaaaaggggggtttgttttcggtgtgcaaaatgtggaaaggaaaatagtaactatcacagtgttgtttgtcattttaagaaatgcaggggtccagagacggagaaagccccagctggggagtggatttgtgaggtatgcaacagagattttacaaccaaaattggcctgggacaacacaagagattggcacacccagcagtgagaaatcaggaaaggatcgttgcttcccaaccgaaagaaacatcaaatagaggtgctcacaaaaggtgctggacaaaggaggaggaagaattactaataagactggaggctcagttcgagggaaacaaaaatattaataagcttattgcagaacacataaccaccaaaacagctaagcagatcagtgacaaaaggcgattgctgtccagaaagccagcagaggagccacgtgaggagcctggaacgtgtcatcacaccaggagagcagctgcgagcctgagaacggagcctgagatgagtcatcacgcccaggcagaggacagagataatggacctgggagacgccctctgccaggcagggcagctgccggagggagaacaatggacgagataagacgccaccctgataagggcaacggacagcagagacccaccaagcaaaaatcagaagaacagctgcaggcttactataaaaagacactagaggaacgactttcagctggggcacttaacaccttcccccgagcattcaagcaggtaatggaaggccgggatataaagctagtaatcaatcagacagcgcaggactgcttcggatgcctggaatccataagccaaataagaacggcaacccgagataaaaagtacacggtgacccgggagaaacacccaaagaaaccttttcagaagtggatgaagaagagagcaatcaaaaaaggtaattatcttcggttccagcgtttattttatcttgatagagggaaactggctaaaatcattttagatgatattgaatgcttgtcttgtgacataccactcagtgaaatttattcggtttttaaaacaagatgggaaacaactggtagctttaaaagccttggggactttaaaacttacgggaaggctgacaacactgccttcagagaattaattacggctaaagaaattgagaaaaatgtgcaggaaatgagcaaaggctcggctcccggtccagacgggattactcttggggacgtcgtaaagatggatcccgagttttccctgaccatggagattttcaatttatggttaacaactggtaaaatcccggacatggtgagggggtgcagaaccgttttgattccaaaatcatcaaagccggatcgtttgaaagacattaataactggagacctatcacgatcggttccatcttgctgagactgttctccaggattgtaacagctaggctgagcaaagcgtgccccctgaacccaaggcaaagaggctttatcagagcggcgggatgctctgaaaacttaaaactcctgcaaactataatttggtcggccaaaagagaacacagaccactgggtgttgtattcgtggacatcgccaaggcttttgacaccgtaagccaccagcacatcattcatgctttgcagcaaagagaggtggatccccacatcgtcggtctggtgagcaatatgtacgagaacatcagtacgtatatcaccacaaagaggaacacacacacagacaaaatccagatccgggttggagtaaagcagggtgacccgatgtcgccccttttatttaacctggcaatggaccctctattatgcaagctggaagagagtggcaaaggataccaccgaggacagagcagcatcacagcgatggcatttgcagacgatctggttttgctgagcgactcctgggaaaatatgaatacaaatattagcatactggagaccttctgcaatctgaccggactcaaaacacaggggcaaaagtgccacggcttttacatcaagccgacaaaggactcttacaccatcaatgactgcgctgcctggactatcaacggcacacccctgaacatgatcgaccccggcgaatctgagaaatacctcggcctgcagtttgacccgtggattggaatagcaaggtccggtctctccacaaaactagatttttggcttcagcggatcgatcaagcaccacttaaacctctgcagaaaactgatattctcaaaacatacaccatccctcggctgatctacatagctgaccactcagaagtgaaagccgcactactcgaaacccttgaccagaagatccggacagcggtcaaggaatggcttcacctacctccgtgcacctgcgatgccatcctgtactcgagcacgagagacggcggtttgggcatcaccaaattggcaggactgatccccagcgtgcaggcccgtagactgcatcggatcgcacagtcatctgacgatacgatgaaatgcttcatggaaaaagagaaaatggaacagctgcataagaaattgtggattcaagctggaggggacagagagaacataccctcgatttgggaagcaccaccgtcgagtgaaccaccaaacaacgtgagcacaaattcggaatgggaagcaccgacccagaaacccaaatttccaaagccttgcaattggaggaaaaacgaattcaaaaaatggaccaaattggcatcccaaggccgcggaattgtaaattttgaaagagacaaaattagtaaccattggatccaatactacagacgcatacctcacaggaaactcctcactgcactacaactcagggccaacgtttaccccacgagagaatttctagccaggggtagacaagaccaatacatcaaggcgtgtaggcactgcgatgcggacattgaatcctgcgcccacatcatcggcaactgcccagtgacacaggacgcccgaatcaagaggcacaattacatctgcgaactgcttctcgaggaggcgaagaagaaggactgggtagtgttcaaggaaccgcacataagggattccaacaaggaactgtacaaacctgacctgatatttgtgaaggatgcccgtgcacttgtcgtggatgtgacagtacggtatgaagcagccaaatcatcgctggaggaagccgctgcagagaaagtgagaaagtacaaacacctggaaacggaagtaagacatctcacgaatgcaaaggacgttacttttgtgggctttcccctaggagcgcgggggaaatggcaccaagataactttaaacttttgactgagcttggcctctccaaatcgaggcaagtgaaaatggcagagactttttccacagtagcgctcttttcatctgtggacattgtacatatgtttgccagtagggccagaaaatctatggttatgtgataataggctgccttctgcggggcttgccttctggccatgcccttcttctctcccttgcacctgtacctcttggtctttgaataaagcctgagtaggaaggaccggtaaaaaaaaaaaaaaaaaaaaaaaaaaaaaaacgttgactaaaaaaaaaaaaaaaaaaaaaaaaaaaaaaaaaaaaaaaaaaaaaaaaaaaaaaaaaaaaaaaaaaaaaa

SEQ ID NO: 11632 - DNA, 4919 bp, synthetic construct
  source 1..4919: mol_type = other DNA
gaaataagagagaaaagaagagtaagaagaaatataagagaattcgccaccatggcccctaagaaaaagcggaaggtgaatatcagcggctctagctgcggcagccccaacagcgccgacaccagcagcgacttcaaggacctgtggaccaagctgaaggaatgccacgaccgggaagtgcagggactccaggtgaaggtcaccaaactcaagcaagaaagaatcctggacgcccagagactggaagaattcttcaccaagaaccagcagctgagagagcagcagaaagtgctgcacgagacaatcaaggttctggaagatagactgcgggccggcctgtgcgacagatgcgccgtgaccgaggaacacatgcgcaaaaagcagcaggagttcgagaacattagacagcaaaatctgaaattgatcacagagctgatgaacgagagaaacacactgcaggaggagaacaagaagctgagcgagcagctgcaacagaagatcgagaatgatcagcaacaccaggccgctgagctggaatgtgaagaggacgtgatccccgacagcccaatcacagctttcagcttttctggcgtgaacagactgaggcggaaggaaaacccccacgtgcggtacatcgagcagacccataccaagctggaacacagcgtgtgtgccaacgagatgagaaaggtgtccaagtcctccacccatccccagcacaaccctaacgaaaatgagatcctggtggctgatacctacgaccagtctcagagccctatggccaaggcccacggcaccagctcttatacccctgataagagctccttcaacctggccaccgtggtggccgagacactgggcctgggcgtgcaggaggaaagcgagacacagggcccaatgagccctctgggagatgagctgtaccactgcctggaaggcaaccacaagaaacagccttttgagtccggctccgagactcctggaacaagcgagagcgctacacctgagggcagctatgaacaacttgcaccacaaccgtgtgtgggagaaactttacattctagcctcccacgagacagtgaactgtttgtgcctgaagaggggagcagcgagaaggagagcgaggacgcgccaaaaacatctcctccgacgcctgggaaacatggtttggaacagactggggaggaaaaagtgatggtgactgttcctgacaaaaatccaccttgtccttgctgtggtacccgggtaaactctgtgttgaatctgattgaacatctgaaagtgtcacacgggaaaaggggggtttgttttcggtgtgcaaaatgtggaaaggaaaatagtaactatcacagtgttgtttgtcattttaagaaatgcaggggtccagagacggagaaagccccagctggggagtggatttgtgaggtatgcaacagagattttacaaccaaaattggcctgggacaacacaagagattggcacacccagcagtgagaaatcaggaaaggatcgttgcttcccaaccgaaagaaacatcaaatagaggtgctcacaaaaggtgctggacaaaggaggaggaagaattactaataagactggaggctcagttcgagggaaacaaaaatattaataagcttattgcagaacacataaccaccaaaacagctaagcagatcagtgacaaaaggcgattgctgtccagaaagccagcagaggagccacgtgaggagcctggaacgtgtcatcacaccaggagagcagctgcgagcctgagaacggagcctgagatgagtcatcacgcccaggcagaggacagagataatggacctgggagacgccctctgccaggcagggcagctgccggagggagaacaatggacgagataagacgccaccctgataagggcaacggacagcagagacccaccaagcaaaaatcagaagaacagctgcaggcttactataaaaagacactagaggaacgactttcagctggggcacttaacaccttcccccgagcattcaagcaggtaatggaaggccgggatataaagctagtaatcaatcagacagcgcaggactgcttcggatgcctggaatccataagccaaataagaacggcaacccgagataaaaaggacacggtgacccgggagaaacacccaaagaaaccttttcagaagtggatgaagaagagagcaatcaaaaaaggtaattatcttcggttccagcgtttattttatcttgatagagggaaactggctaaaatcattttagatgatattgaatgcttgtcttgtgacataccactcagtgaaatttattcggtttttaaaacaagatgggaaacaactggtagctttaaaagccttggggactttaaaacttacgggaaggctgacaacactgccttcagagaattaattacggctaaagaaattgagaaaaatgtgcaggaaatgagcaaaggctcggctcccggtccagacgggattactcttggggacgtcgtaaagatggatcccgagttttcccggaccatggagattttcaatttatggttaacaactggtaaaatcccggacatggtgagggggtgcagaaccgttttgattccaaaatcatcagacccggatcgtttgaaagacattaataactggagacctatcacgatcggttccatcttgctgagactgttctccaggattgtaacagctaggctgagcaaagcgtgccccctgaacccaaggcaaagaggctttatcagagcggcgggatgctctgaaaacttaaaactcctgcaaactataatttggtcggccaaaagagaacacagaccactgggtgttgtattcgtggacatcgccaaggcttttgacaccgtaagccaccagcacatcattcatgctttgcagcaaagagaggtggatccccacatcgtcggtctggtgagcaatatgtacgagaacatcagtacgtatatcaccacaaagaggaacacacacacagacaaaatccagatccgggttggagtaaagcagggtgacccgatgtcgccccttttatttaacctggcaatggaccctctattatgcaagctggaagagagtggcaaaggataccaccgaggacagagcagcatcacagcgatggcatttgcagacgatctggttttgctgagcgactcctgggaaaatatgaatacaaatattagcatactggagaccttctgcaatctgaccggactcaaaacacaggggcaaaagtgccacggcttttacatcaagccgacaaaggactcttacaccatcaatgactgcgctgcctggactatcaacggcacacccctgaacatgatcgaccccggcgaatctgagaaatacctcggcctgcagtttgacccgtggattggaatagcaaggtccggtctctccacaaaactagatttttggcttcagcggatcgatcaagcaccacttaaacctctgcagaaaactgatattctcaaaacatacaccatccctcggctgatctacatagctgaccactcagaagtgaaaagcgcactactcgaaacccttgaccagaagatccggacagcggtcaaggaatggcttcacctacctccgtgcacctgcgatgccatcctgtactcgagcacgagagacggcggtttgggcatcaccaaattggcaggactgatccccagcgtgcaggcccgtagactgcatcggatcgcacagtcatctgacgatacgatgaaatgcttcatggaaaaagagaaaatggaacagctgcataagaaattgtggattcaagctggaggggacagagagaacataccctcgatttgggaagcaccaccgtcgagtgaaccaccaaacaacgtgagcacaaattcggaatgggaagcaccgacccagaaagataaatttccaaagccttgcaattggaggaaaaacgaattcaaaaaatggaccaaattggcatcccaaggccgcggaattgtaaattttgaaagagacaaaattagtaaccattggatccaatactacagacgcatacctcacaggaaactcctcactgcactacaactcagggccaacgtttaccccacgagagaatttctagccaggggtagacaagaccaatacatcaaggcgtgtaggcactgcgatgcggacaacgaatcctgcgcccacatcatcggcaactgcccagtgacacaggacgcccgaatcaagaggcacaattacatctgcgaactgcttctcgaggaggcgaagaagaaggactgggtagtgttcaaggaaccgcacataagggattccaacaaggaactgtacaaacctgacctgatatttgtgaaggatgggcgtgcacttgtcgtggatgtgacagtacggtatgaagcagccaaatcatcgctggaggaagccgctgcagagaaagtgagaaagtacaaacacctggaaacggaagtaagacatctcacgaatgcaaaggacgttacttttgtgggctttcccctaggagcgcgggggaaatggcaccaagataactttaaacttttgactgagcttggcctctccaaatcgaggcaagtgaaaatggcagagactttttccacagtagcgctcttttcatctgtggacattgtacatatgtttgccagtagggccagaaaatctatggttatgtgataataggctgccttctgcggggcttgccttctggccatgcccttcttctctcccttgcacctgtacctcttggtctttgaataaagcctgagtaggaaggaccggtaaaaaaaaaaaaaaaaaaaaaaaaaaaaaaacgttgactaaaaaaaaaaaaaaaaaaaaaaaaaaaaaaaaaaaaaaaaaaaaaaaaaaaaaaaaaaaaaaaaaaaaaa

SEQ ID NO: 11633 - skipped

SEQ ID NO: 11634 - DNA, 4502 bp, synthetic construct
  source 1..4502: mol_type = other DNA
gaaataagagagaaaagaagagtaagaagaaatataagagaattcgccaccatggcttcttgcccgaaacctggccccccggtttcagcaggggcaatgagtttggaaagtggactgaccacccactccgttctcgccatcgaacgtggtcccaattcgttggcaaattccggatcagactttgggggggggggtctggggctaccgttacgcctattgagggtatcggtcggcactcagacctcccgctccgactgggtagacctggtgtcctggagccacccaggacccacgtctaagtcccagcaggttgacctggtgtctttatttcctaaacaccgggttgacctgttatccaaaaacgaccaggtagacctggtggctcaatttttaccatctaaatttccccccaatttggcagaaaatgatttggctttgctggtgaacttagagttctacagatcggatttgcatgtgtatgagtgtgttcataaggctgcacattgggagggattaagtggtttgcctgaggtgtatgaacaacttgcaccacaaccgtgtgtgggagaaactttacattctagcctcccacgagacagtgaactgtttgtgcctgaagaggggagcagcgagaaggagagcgaggacgcgccaaaaacatctcctccgacgcctgggaaacatggtttggaacagactggggaggaaaaagtgatggtgactgttcctgacaaaaatccaccttgtccttgctgtggtacccgggtaaactctgtgttgaatctgattgaacatctgaaagtgtcacacgggaaaaggggggtttgttttcggtgtgcaaaatgtggaaaggaaaatagtaactatcacagtgttgtttgtcattttaagaaatgcaggggtccagagacggagaaagccccagctggggagtggatttgtgaggtatgcaacagagattttacaaccaaaattggcctgggacaacacaagagattggcacacccagcagtgagaaatcaggaaaggatcgttgcttcccaaccgaaagaaacatcaaatagaggtgctcacaaaaggtgctggacaaaggaggaggaagaattactaataagactggaggctcagttcgagggaaacaaaaatattaataagcttattgcagaacacataaccaccaaaacagctaagcagatcagtgacaaaaggcgattgctgtccagaaagccagcagaggagccacgtgaggagcctggaacgtgtcatcacaccaggagagcagctgcgagcctgagaacggagcctgagatgagtcatcacgcccaggcagaggacagagataatggacctgggagacgccctctgccaggcagggcagctgccggagggagaacaatggacgagataagacgccaccctgataagggcaacggacagcagagacccaccaagcaaaaatcagaagaacagctgcaggcttactataaaaagacactagaggaacgactttcagctggggcacttaacaccttcccccgagcattcaagcaggtaatggaaggccgggatataaagctagtaatcaatcagacagcgcaggactgcttcggatgcctggaatccataagccaaataagaacggcaacccgagataaaaaggacacggtgacccgggagaaacacccaaagaaaccttttcagaagtggatgaagaagagagcaatcaaaaaaggtaattatcttcggttccagcgtttattttatcttgatagagggaaactggctaaaatcattttagatgatattgaatgcttgtcttgtgacataccactcagtgaaatttattcggtttttaaaacaagatgggaaacaactggtagctttaaaagccttggggactttaaaacttacgggaaggctgacaacactgccttcagagaattaattacggctaaagaaattgagaaaaatgtgcaggaaatgagcaaaggctcggctcccggtccagacgggattactcttggggacgtcgtaaagatggatcccgagttttcccggaccatggagattttcaatttatggttaacaactggtaaaatcccggacatggtgagggggtgcagaaccgttttgattccaaaatcatcaaagccggatcgtttgaaagacattaataactggagacctatcacgatcggttccatcttgctgagactgttctccaggattgtaacagctaggctgagcaaagcgtgccccctgaacccaaggcaaagaggctttatcagagcggcgggatgctctgaaaacttaaaactcctgcaaactataatttggtcggccaaaagagaacacagaccactgggtgttgtattcgtggacatcgccaaggcttttgacaccgtaagccaccagcacatcattcatgctttgcagcaaagagaggtggatccccacatcgtcggtctggtgagcaatatgtacgagaacatcagtacgtatatcaccacaaagaggaacacacacacagacaaaatccagatccgggttggagtaaagcagggtgacccgatgtcgccccttttatttaacctggcaatggaccctctattatgcaagctggaagagagtggcaaaggataccaccgaggacagagcagcatcacagcgatggcatttgcagacgatctggttttgctgagcgactcctgggaaaatatgaatacaaatattagcatactggagaccttctgcaatctgaccggactcaaaacacaggggcaaaagtgccacggcttttacatcaagccgacaaaggactcttacaccatcaatgactgcgctgcctggactatcaacggcacacccctgaacatgatcgaccccggcgaatctgagaaatacctcggcctgcagtttgacccgtggattggaatagcaaggtccggtctctccacaaaactagatttttggcttcagcggatcgatcaagcaccacttaaacctctgcagaaaactgatattctcaaaacatacaccatccctcggctgatctacatagctgaccactcagaagtgaaaagcgcactactcgaaacccttgaccagaagatccggacagcggtcaaggaatggcttcacctacctccgtgcacctgcgatgccatcctgtactcgagcacgagagacggcggtttgggcatcaccaaattggcaggactgatccccagcgtgcaggcccgtagactgcatcggatcgcacagtcatctgacgatacgatgaaatgcttcatggaaaaagagaaaatggaacagctgcataagaaattgtggattcaagctggaggggacagagagaacataccctcgatttgggaagcaccaccgtcgagtgaaccaccaaacaacgtgagcacaaattcggaatgggaagcaccgacccagaaagataaatttccaaagccttgcaattggaggaaaaacgaattcaaaaaatggaccaaattggcatcccaaggccgcggaattgtaaattttgaaagagacaaaattagtaaccattggatccaatactacagacgcatacctcacaggaaactcctcactgcactacaactcagggccaacgtttaccccacgagagaatttctagccaggggtagacaagaccaatacatcaaggcgtgtaggcactgcgatgcggacaacgaatcctgcgcccacatcatcggcaactgcccagtgacacaggacgcccgaatcaagaggcacaattacatctgcgaactgcttctcgaggaggcgaagaagaaggactgggtagtgttcaaggaaccgcacataagggattccaacaaggaactgtacaaacctgacctgatatttgtgaaggatgggcgtgcacttgtcgtggatgtgacagtacggtatgaagcagccaaatcatcgctggaggaagccgctgcagagaaagtgagaaagtacaaacacctggaaacggaagtaagacatctcacgaatgcaaaggacgttacttttgtgggctttcccctaggagcgcgggggaaatggcaccaagataactttaaacttttgactgagcttggcctctccaaatcgaggcaagtgaaaatggcagagactttttccacagtagcgctcttttcatctgtggacattgtacatatgtttgccagtagggccagaaaatctatggttatgtctggcggctcaaaaagaaccgccgacggcagcgaattcgagcccaagaagaagaggaaagtctgataataggctgccttctgcggggcttgccttctggccatgcccttcttctctcccttgcacctgtacctcttggtctttgaataaagcctgagtaggaaggaccggtaaaaaaaaaaaaaaaaaaaaaaaaaaaaaaacgttgactaaaaaaaaaaaaaaaaaaaaaaaaaaaaaaaaaaaaaaaaaaaaaaaaaaaaaaaaaaaaaaaaaaaaaa

SEQ ID NO: 11635 - DNA, 4730 bp, synthetic construct
  source 1..4730: mol_type = other DNA
ggtctagttacaactgggcatcgctgcagagatcgcacctcctcgtggtcccgctggtagcccttcgaagggtgactaagtcgatctctgccccaggtacggagccgttgggactcaccagtccaacgtaactcctgcctaaattcggtgaaacaaattcctcggtaaaaagccccatggcttcttgcccgaaacctggccccccggtttcagcaggggcaatgagtttggaaagtggactgaccacccactccgttctcgccatcgaacgtggtcccaattcgttggcaaattccggatcagactttgggggggggggtctggggctaccgttacgcctattgagggtatcggtcggcactcagacctcccgctccgactgggtagacctggtgtcctggagccacccaggacccacgtctaagtcccagcaggttgacctggtgtctttatttcctaaacaccgggttgacctgttatccaaaaacgaccaggtagacctggtggctcaatttttaccatctaaatttccccccaatttggcagaaaatgatttggctttgctggtgaacttagagttctacagatcggatttgcatgtgtatgagtgtgttcattttgctgcacattgggagggattaagtggtttgcctgaggtgtatgaacaacttgcaccacaaccgtgtgtgggagaaactttacattctagcctcccacgagacagtgaactgtttgtgcctgaagaggggagcagcgagaaggagagcgaggacgcgccaaaaacatctcctccgacgcctgggaaacatggtttggaacagactggggaggaaaaagtgatggtgactgttcctgacaaaaatccaccttgtccttgctgtggtacccgggtaaactctgtgttgaatctgattgaacatctgaaagtgtcacacgggaaaaggggggtttgttttcggtgtgcaaaatgtggaaaggaaaatagtaactatcacagtgttgtttgtcattttaagaaatgcaggggtccagagacggagaaagccccagctggggagtggatttgtgaggtatgcaacagagattttacaaccaaaattggcctgggacaacacaagagattggcacacccagcagtgagaaatcaggaaaggatcgttgcttcccaaccgaaagaaacatcaaatagaggtgctcacaaaaggtgctggacaaaggaggaggaagaattactaataagactggaggctcagttcgagggaaacaaaaatattaataagcttattgcagaacacataaccaccaaaacagctaagcagatcagtgacaaaaggcgattgctgtccagaaagccagcagaggagccacgtgaggagcctggaacgtgtcatcacaccaggagagcagctgcgagcctgagaacggagcctgagatgagtcatcacgcccaggcagaggacagagataatggacctgggagacgccctctgccaggcagggcagctgccggagggagaacaatggacgagataagacgccaccctgataagggcaacggacagcagagacccaccaagcaaaaatcagaagaacagctgcaggcttactataaaaagacactagaggaacgactttcagctggggcacttaacaccttcccccgagcattcaagcaggtaatggaaggccgggatataaagctagtaatcaatcagacagcgcaggactgcttcggatgcctggaatccataagccaaataagaacggcaacccgagataaaaaggacacggtgacccgggagaaacacccaaagaaaccttttcagaagtggatgaagaagagagcaatcaaaaaaggtaattatcttcggttccagcgtttattttatcttgatagagggaaactggctaaaatcattttagatgatattgaatgcttgtcttgtgacataccactcagtgaaatttattcggtttttaaaacaagatgggaaacaactggtagctttaaaagccttggggactttaaaacttacgggaaggctgacaacactgccttcagagaattaattacggctaaagaaattgagaaaaatgtgcaggaaatgagcaaaggctcggctcccggtccagacgggattactcttggggacgtcgtaaagatggatcccgagttttcccggaccatggagattttcaatttatggttaacaactggtaaaatcccggacatggtgagggggtgcagaaccgttttgattccaaaatcatcaaagccggatcgtttgaaagacattaataactggagacctatcacgatcggttccatcttgctgagactgttctccaggattgtaacagctaggctgagcaaagcgtgccccctgaacccaaggcaaagaggctttatcagagcggcgggatgctctgaaaacttaaaactcctgcaaactataatttggtcggccaaaagagaacacagaccactgggtgttgtattcgtggacatcgccaaggcttttgacaccgtaagccaccagcacatcattcatgctttgcagcaaagagaggtggatccccacatcgtcggtctggtgagcaatatgtacgagaacatcagtacgtatatcaccacaaagaggaacacacacacagacaaaatccagatccgggttggagtaaagcagggtgacccgatgtcgccccttttatttaacctggcaatggaccctctattatgcaagctggaagagagtggcaaaggataccaccgaggacagagcagcatcacagcgatggcatttgcagacgatctggttttgctgagcgactcctgggaaaatatgaatacaaatattagcatactggagaccttctgcaatctgaccggactcaaaacacaggggcaaaagtgccacggcttttacatcaagccgacaaaggactcttacaccatcaatgactgcgctgcctggactatcaacggcacacccctgaacatgatcgaccccggcgaatctgagaaatacctcggcctgcagtttgacccgtggattggaatagcaaggtccggtctctccacaaaactagatttttggcttcagcggatcgatcaagcaccacttaaacctctgcagaaaactgatattctcaaaacatacaccatccctcggctgatctacatagctgaccactcagaagtgaaaactgcactactcgaaacccttgaccagaagatccggacagcggtcaaggaatggcttcacctacctccgtgcacctgcgatgccatcctgtactcgagcacgagagacggcggtttgggcatcaccaaattggcaggactgatccccagcgtgcaggcccgtagactgcatcggatcgcacagtcatctgacgatacgatgaaatgcttcatggaaaaagagaaaatggaacagctgcataagaaattgtggattcaagctggaggggacagagagaacataccctcgatttgggaagcaccaccgtcgagtgaaccaccaaacaacgtgagcacaaattcggaatgggaagcaccgacccagaaagataaatttccaaagccttgcaattggaggaaaaacgaattcaaaaaatggaccaaattggcatcccaaggccgcggaattgtaaattttgaaagagacaaaattagtaaccattggatccaatactacagacgcatacctcacaggaaactcctcactgcactacaactcagggccaacgtttaccccacgagagaatttctagccaggggtagacaagaccaatacatcaaggcgtgtaggcactgcgatgcggacattgaatcctgcgcccacatcatcggcaactgcccagtgacacaggacgcccgaatcaagaggcacaattacatctgcgaactgcttctcgaggaggcgaagaagaaggactgggtagtgttcaaggaaccgcacataagggattccaacaaggaactgtacaaacctgacctgatatttgtgaaggatgcccgtgcacttgtcgtggatgtgacagtacggtatgaagcagccaaatcatcgctggaggaagccgctgcagagaaagtgagaaagtacaaacacctggaaacggaagtaagacatctcacgaatgcaaaggacgttacttttgtgggctttcccctaggagcgcgggggaaatggcaccaagataactttaaacttttgactgagcttggcctctccaaatcgaggcaagtgaaaatggcagagactttttccacagtagcgctcttttcatctgtggacattgtacatatgtttgccagtagggccagaaaatctatggttatgaggaagaagaggaggcagaggaggaggtgataataggctgccttctgcggggcttgccttctggccatgcccttcttctctcccttgcacctgtacctcttggtctttgaataaagcctgagtaggaaggaccggtagacatgataagatacattgatgagtttggacaaaccacaactagaatgcagtgaaaaaaatgctttatttgtgaaatttgtgatgctattgctttatttgtaaccattataagctgcaataaacaagttaacaacaacaaaaaaaaaaaaaaaaaaaaaaaaaaaaaaacgttgactaaaaaaaaaaaaaaaaaaaaaaaaaaaaaaaaaaaaaaaaaaaaaaaaaaaaaaaaaaaaaaaaaaaaaa

SEQ ID NO: 11636 - DNA, 4703 bp, synthetic construct
  source 1..4703: mol_type = other DNA
ggtctagttacaactgggcatcgctgcagagatcgcacctcctcgtggtcccgctggtagcccttcgaagggtgactaagtcgatctctgccccaggtacggagccgttgggactcaccagtccaacgtaactcctgcctaaattcggtgaaacaaattcctcggtaaaaagccccatggcttcttgcccgaaacctggccccccggtttcagcaggggcaatgagtttggaaagtggactgaccacccactccgttctcgccatcgaacgtggtcccaattcgttggcaaattccggatcagactttgggggggggggtctggggctaccgttacgcctattgagggtatcggtcggcactcagacctcccgctccgactgggtagacctggtgtcctggagccacccaggacccacgtctaagtcccagcaggttgacctggtgtctttatttcctaaacaccgggttgacctgttatccaaaaacgaccaggtagacctggtggctcaatttttaccatctaaatttccccccaatttggcagaaaatgatttggctttgctggtgaacttagagttctacagatcggatttgcatgtgtatgagtgtgttcataaggctgcacattgggagggattaagtggtttgcctgaggtgtatgaacaacttgcaccacaaccgtgtgtgggagaaactttacattctagcctcccacgagacagtgaactgtttgtgcctgaagaggggagcagcgagaaggagagcgaggacgcgccaaaaacatctcctccgacgcctgggaaacatggtttggaacagactggggaggaaaaagtgatggtgactgttcctgacaaaaatccaccttgtccttgctgtggtacccgggtaaactctgtgttgaatctgattgaacatctgaaagtgtcacacgggaaaaggggggtttgttttcggtgtgcaaaatgtggaaaggaaaatagtaactatcacagtgttgtttgtcattttaagaaatgcaggggtccagagacggagaaagccccagctggggagtggatttgtgaggtatgcaacagagattttacaaccaaaattggcctgggacaacacaagagattggcacacccagcagtgagaaatcaggaaaggatcgttgcttcccaaccgaaagaaacatcaaatagaggtgctcacaaaaggtgctggacaaaggaggaggaagaattactaataagactggaggctcagttcgagggaaacaaaaatattaataagcttattgcagaacacataaccaccaaaacagctaagcagatcagtgacaaaaggcgattgctgtccagaaagccagcagaggagccacgtgaggagcctggaacgtgtcatcacaccaggagagcagctgcgagcctgagaacggagcctgagatgagtcatcacgcccaggcagaggacagagataatggacctgggagacgccctctgccaggcagggcagctgccggagggagaacaatggacgagataagacgccaccctgataagggcaacggacagcagagacccaccaagcaaaaatcagaagaacagctgcaggcttactataaaaagacactagaggaacgactttcagctggggcacttaacaccttcccccgagcattcaagcaggtaatggaaggccgggatataaagctagtaatcaatcagacagcgcaggactgcttcggatgcctggaatccataagccaaataagaacggcaacccgagataaaaaggacacggtgacccgggagaaacacccaaagaaaccttttcagaagtggatgaagaagagagcaatcaaaaaaggtaattatcttcggttccagcgtttattttatcttgatagagggaaactggctaaaatcattttagatgatattgaatgcttgtcttgtgacataccactcagtgaaatttattcggtttttaaaacaagatgggaaacaactggtagctttaaaagccttggggactttaaaacttacgggaaggctgacaacactgccttcagagaattaattacggctaaagaaattgagaaaaatgtgcaggaaatgagcaaaggctcggctcccggtccagacgggattactcttggggacgtcgtaaagatggatcccgagttttcccggaccatggagattttcaatttatggttaacaactggtaaaatcccggacatggtgagggggtgcagaaccgttttgattccaaaatcaacccagccggatcgtttgaaagacattaataactggagacctatcacgatcggttccatcttgctgagactgttctccaggattatcacagctaggatgaccaaagcgtgccccctgaacccaaggcaaagaggctttatcagagcggcgggatgctctgaaaacttaaaactcctgcaaactataattaggtcggccaaaagcgaacacagaccactgggtgttgtattcgtggacatcgccaaggcttttgacaccgtaagccaccagcacatcctgcatgtgttgcagcaaagaggcgtggatccccacatcatcggtctggtgagcaatatgtacaaggacatcagtacgttcgtgaccacaaagaaggacacacacacagacaaaatccagatccgggttggagtaaagcagggtgacccgctgtcgccccttttatttaacctggcaatggaccctctattatgcaagctggaagagagtggcaacggattccaccgaggaggccacaccatcacagcgatggcatttgcagacgatctggttttgctgagcgactcctgggaaaatatggagaagaatattgagatactggaggccttctgcgacctgaccggactcaaaacacaggggcaaaagtgccacggcttttacatcaagccgacaaaggactcttacaccgtgaataactgcgctgcctggactatctacggcacacccctgaacatgatcaaccccggcgactctgagaaatacctcggcctgcagtttgacccgtggattggaatagcaaggtccggtctctccacaaaactagatttttggcttcagcggatcgatcaagcaccacttaaacctctgcagaaaactgatattctcaaaacatacaccatccctcggctgatctacatagctgaccactcagaagtgaaaagcgcactactcgaaacccttgaccagaagatccggacagcggtcaaggaatggcttcacctacctccgtgcacctgcgatgccatcctgtactcgagcacgagagacggcggtttgggcatcaccaaattggcaggactgatccccagcgtgcaggcccgtagactgcatcggatcgcacagtcatctgacgatacgatgaaatgcttcatggaaaaagagaaaatggaacagctgcataagaaattgtggattcaagctggaggggacagagagaacataccctcgatttgggaagcaccaccgtcgagtgaaccaccaaacaacgtgagcacaaattcggaatgggaagcaccgacccagaaagataaatttccaaagccttgcaattggaggaaaaacgaattcaaaaaatggaccaaattggcatcccaaggccgcggaattgtaaattttgaaagagacaaaattagtaaccattggatccaatactacagacgcatacctcacaggaaactcctcactgcactacaactcagggccaacgtttaccccacgagagaatttctagccaggggtagacaagaccaatacatcaaggcgtgtaggcactgcgatgcggacaacgaatcctgcgcccacatcatcggcaactgcccagtgacacaggacgcccgaatcaagaggcacaattacatctgcgaactgcttctcgaggaggcgaagaagaaggactgggtagtgttcaaggaaccgcacataagggattccaacaaggaactgtacaaacctgacctgatatttgtgaaggatggccgtgcacttgtcgtggatgtgacagtacggtatgaagcagccaaatcatcgctggaggaagccgctgcagagaaagtgagaaagtacaaacacctggaaacggaagtaagacatctcacgaatgcaaaggacgttacttttgtgggctttcccctaggagcgcgggggaaatggcaccaagataactttaaacttttgactgagcttggcctctccaaatcgaggcaagtgaaaatggcagagactttttccacagtagcgctcttttcatctgtggacattgtacatatgtttgccagtagggccagaaaatctatggttatgtgataataggctgccttctgcggggcttgccttctggccatgcccttcttctctcccttgcacctgtacctcttggtctttgaataaagcctgagtaggaaggaccggtagacatgataagatacattgatgagtttggacaaaccacaactagaatgcagtgaaaaaaatgctttatttgtgaaatttgtgatgctattgctttatttgtaaccattataagctgcaataaacaagttaacaacaacaaaaaaaaaaaaaaaaaaaaaaaaaaaaaaacgttgactaaaaaaaaaaaaaaaaaaaaaaaaaaaaaaaaaaaaaaaaaaaaaaaaaaaaaaaaaaaaaaaaaaaaaa

SEQ ID NO: 11637 - DNA, 4703 bp, synthetic construct
  source 1..4703: mol_type = other DNA
ggtctagttacaactgggcatcgctgcagagatcgcacctcctcgtggtcccgctggtagcccttcgaagggtgactaagtcgatctctgccccaggtacggagccgttgggactcaccagtccaacgtaactcctgcctaaattcggtgaaacaaattcctcggtaaaaagccccatggcttcttgcccgaaacctggccccccggtttcagcaggggcaatgagtttggaaagtggactgaccacccactccgttctcgccatcgaacgtggtcccaattcgttggcaaattccggatcagactttgggggggggggtctggggctaccgttacgcctattgagggtatcggtcggcactcagacctcccgctccgactgggtagacctggtgtcctggagccacccaggacccacgtctaagtcccagcaggttgacctggtgtctttatttcctaaacaccgggttgacctgttatccaaaaacgaccaggtagacctggtggctcaatttttaccatctaaatttccccccaatttggcagaaaatgatttggctttgctggtgaacttagagttctacagatcggatttgcatgtgtatgagtgtgttcattttgctgcacattgggagggattaagtggtttgcctgaggtgtatgaacaacttgcaccacaaccgtgtgtgggagaaactttacattctagcctcccacgagacagtgaactgtttgtgcctgaagaggggagcagcgagaaggagagcgaggacgcgccaaaaacatctcctccgacgcctgggaaacatggtttggaacagactggggaggaaaaagtgatggtgactgttcctgacaaaaatccaccttgtccttgctgtggtacccgggtaaactctgtgttgaatctgattgaacatctgaaagtgtcacacgggaaaaggggggtttgttttcggtgtgcaaaatgtggaaaggaaaatagtaactatcacagtgttgtttgtcattttaagaaatgcaggggtccagagacggagaaagccccagctggggagtggatttgtgaggtatgcaacagagattttacaaccaaaattggcctgggacaacacaagagaaggtggcacccagcagtgagaaatcaggaaaggatcgttgcttcccaaccgaaagaaacatcaaatagaggtgctcacaaaaggtgctggacaaaggaggagagggaattactaataagactggaggctcagttcgagggaaacaaaaatattaataagcttattgcagaacacataaccaccaaaacagctaagcagatcagtgacaaaaggcgattgctgtccagaaagccagcagaggagccacgtatgatgcctggaacgtgtcatcacaccaggagagcagctgcgagcctgagaacggagcctgagatgagtcatcacgcccaggcagaggacagagataatggacctgggagacgccctctgccaggcagggcagctgccggagggagaacaatggacgagataagacgccaccctgataagggcaacggacagcagagacccaccaagcaaaaatcagaagaacagctgcaggcttactataaaaagacactagaggaacgactttcagctggggcacttaacaccttcccccgagcattcaagcaggtaatggaaggccgggatataaagctagtaatcaatcagacagcgcaggactgcttcggatgcctggaatccataagccaaataagaacggcaacccgagataaaaagtacacggtgacccgggagaaacacccaaagaaaccttttcagaagtggatgaagaagagagcaatcaaaaaaggtaattatcttcggttccagcgtttattttatcttgatagagggaaactggctaaaatcattttagatgatattgaatgcttgtcttgtgacataccactcagtgaaatttattcggtttttaaaacaagatgggaaacaactggtagctttaaaagccttggggactttaaaacttacgggaaggctgacaacactgccttcagagaattaattacggctaaagaaattgagaaaaatgtgcaggaaatgagcaaaggctcggctcccggtccagacgggattactcttggggacgtcgtaaagatggatcccgagggctcccggaccatggagattttcaatttatggttaacaactggtaaaatcccggacatggtgagggggtgcagaaccgttttgattccaaaatcatcagacccggatcgtttgaaagacattaataactggagacctatcacgatcggttccatcttgctgagactgttctccaggattgtaacagctaggctgagcaaagcgtgccccctgaacccaaggcaaagaggctttatcagagcggcgggatgctctgaaaacttaaaactcctgcaaactataatttggtcggccaaaagagaacacagaccactgggtgttgtattcgtggacatcgccaaggcttttgacaccgtaagccaccagcacatcattcatgctttgcagcaaagagaggtggatccccacatcgtcggtctggtgagcaatatgtacgagaacatcagtacgtatatcaccacaaagaggaacacacacacagacaaaatccagatccgggttggagtaaagcagggtgacccgatgtcgccccttttatttaacctggcaatggaccctctattatgcaagctggaagagagtggcaaaggataccaccgaggacagagcagcatcacagcgatggcatttgcagacgatctggttttgctgagcgactcctgggaaggcatgaatacaaatattagcatactggagaccttctgcaatctgaccggactcaaaacacaggggcaaaagtgccacggcttttacatcaagccgacaaagaagtcttacaccatcaatgactgcgctgcctggactatcaacggcacacccctgaacatgatcgaccccggcgaatctgagaaatacctcggcctgcagtttgacccgtggattggaatagcaaggtccggtctctccacaaaactagatttttggcttcagcggatcgatcaagcaccacttaaacctctgcagaaactggatattctcaaaacatacaccatccctcggctgatctacatagctgaccactcagaagtgaaaagcgcactactcgaaacccttgaccagaagatccggacagcggtcaaggaatggcttcacctacctccgtgcacctgcgatgccatcctgtactcgagcacgagagacggcggtttgggcatcaccaaattggcaggactgatccccagcgtgcaggcccgtagactgcatcggatcgcacagtcatctgacgatacgatgaaatgcttcatggaaaaagagaaaatggaacagctgcataagaaattgtggattcaagctggaggggacagagagaacataccctcgatttgggaagcaccaccgtcgagtgaaccaccaaacaacgtgagcacaaattcggaatgggaagcaccgacccagaaagataaatttccaaagccttgcaattggaggaaaaacgaattcaaaaaatggaccaaattggcatcccaaggccgcggaattgtaaattttgaaagagacaaaattagtaaccattggatccaatactacagacgcatacctcacaggaaactcctcactgcactacaactcagggccaacgtttaccccacgagagaatttctagccaggggtagacaagaccaatacatcaaggcgtgtaggcactgcgatgcggacaacgaatcctgcgcccacatcatcggcaactgcccagtgacacaggacgcccgaatcaagaggcacaataagatctgcgaactgcttctcgaggaggcgaagaagaaggactgggtagtgttcaaggaaccgcacataagggattccaacaaggaactgtacaaacctgacctgatatttgtgaaggatgcccgtgcacttgtcgtggatgtgacagtacggtatgaagcagccaaatcatcgctggaggaagccgctgcagagaaagtgagaaagtacaaacacctggaaacggaagtaagacatctcacgaatgcaaaggacgttacttttgtgggctttcccctaggagcgcgggggaaatggcaccaagataactttaaacttttgactgagcttggcctctccaaatcgaggcaagtgaaaatggcagagactttttccacagtagcgctcttttcatctgtggacattgtacatatgtttgccagtagggccagaaaatctatggttatgtgataataggctgccttctgcggggcttgccttctggccatgcccttcttctctcccttgcacctgtacctcttggtctttgaataaagcctgagtaggaaggaccggtagacatgataagatacattgatgagtttggacaaaccacaactagaatgcagtgaaaaaaatgctttatttgtgaaatttgtgatgctattgctttatttgtaaccattataagctgcaataaacaagttaacaacaacaaaaaaaaaaaaaaaaaaaaaaaaaaaaaaacgttgactaaaaaaaaaaaaaaaaaaaaaaaaaaaaaaaaaaaaaaaaaaaaaaaaaaaaaaaaaaaaaaaaaaaaaa

SEQ ID NO: 11638 - DNA, 4564 bp, synthetic construct
  source 1..4564: mol_type = other DNA
ggtctagttacaactgggcatcgctgcagagatcgcacctcctcgtggtcccgctggtagcccttcgaagggtgactaagtcgatctctgccccaggtacggagccgttgggactcaccagtccaacgtaactcctgcctaaattcggtgaaacaaattcctcggtaaaaagccccatggcttcttgcccgaaacctggccccccggtttcagcaggggcaatgagtttggaaagtggactgaccacccactccgttctcgccatcgaacgtggtcccaattcgttggcaaattccggatcagactttgggggggggggtctggggctaccgttacgcctattgagggtatcggtcggcactcagacctcccgctccgactgggtagacctggtgtcctggagccacccaggacccacgtctaagtcccagcaggttgacctggtgtctttatttcctaaacaccgggttgacctgttatccaaaaacgaccaggtagacctggtggctcaatttttaccatctaaatttccccccaatttggcagaaaatgatttggctttgctggtgaacttagagttctacagatcggatttgcatgtgtatgagggcgttcataaggctgcacattgggagggattaagtggtttgcctgaggtgtatgaacaacttgcaccacaaccgtgtgtgggagaaactttacattctagcctcccacgagacagtgaactgtttgtgcctgaagaggggagcagcgagaaggagagcgaggacgcgccaaaaacatctcctccgacgcctgggaaacatggtttggaacagactggggaggaaaaagtgatggtgactgttcctgacaaaaatccaccttgtccttgctgtggtacccgggtaaactctgtgttgaatctgattgaacatctgaaagtgtcacacgggaaaaggggggtttgttttcggtgtgcaaaatgtggaaaggaaaatagtaactatcacagtgttgtttgtcattttaagaaatgcaggggtccagagacggagaaagccccagctggggagtggatttgtgaggtatgcaacagagattttacaaccaaaattggcctgggacaacacaagagattggcacacccagcagtgagaaatcaggaaaggatcgttgcttcccaaccgaaagaaacatcaaatagaggtgctcacaaaaggtgctggacaaaggaggaggaagaattactaataagactggaggctcagttcgagggaaacaaaaatattaataagcttattgcagaacacataaccaccaaaacagctaagcagatcagtgacaaaaggcgattgctgtccagaaagccagcagaggagccacgtgaggagcctggaacgtgtcatcacaccaggagagcagctgcgagcctgagaacggagcctgagatgagtcatcacgcccaggcagaggacagagataatggacctgggagacgccctctgccaggcagggcagctgccggagggagaacaatggacgagataagacgccaccctgataagggcaacggacagcagagacccaccaagcaaaaatcagaagaacagctgcaggcttactataaaaagacactagaggaacgactttcagctggggcacttaacaccttcccccgagcattcaagcaggtaatggaaggccgggatataaagctagtaatcaatcagacagcgcaggactacttcggatgcctggaatccataagccaaataagaacggcaacccgagataaaaaggacacggtgacccggaagaaacacccaaagaaaccttttcagaagtggatgaagaagagagcaatcaaaaaaggtaattatcttcggttccagcgtttattttatcttgatagagggaaactggctaaaatcattttagatgatattgaatgcttgtcttgtgacataccactcagtgaaatttattcggtttttaaaacaagatgggaaacaactggtagctttaaaagccttggggactttaaaacttacgggaaggctgacaacactgccttcagagacttaattacggctaaagaaattgagaaaaatgtgcaggaaatgagcaaaggctcggctcccggtccagacgggattactcttggggacgtcgtaaagatggatcccgagggctcccggaccatggagattttcaatttatggttaacaactggtaaaatcccggacatggtgagggggtgcagaaccgttttgattccaaaatcatcagacccggatcgtttgaaagacattaataactggagacctatcacgatcggttccatcttgctgagactgttctccaggattgtaacagctaggctgagcaaagcgtgccccctgaacccaaggcaaagaggctttatcagagcggcgggatgctctgaaaacttaaaactcctgcaaactataatttggtcggccaaaagagaacacagaccactgggtgttgtattcgtggacatcgccaaggcttttgacaccgtaagccaccagcacatcattcatgctttgcagcaaagagaggtggatccccacatcgtcggtctggtgagcaatatgtacgagaacatcagtacgtatatcaccacaaagaggaacacacacacagacaaaatccagatccgggttggagtaaagcagggtgacccgatgtcgccccttttatttaacctggcaatggaccctctattatgcaagctggaagagagtggcaaaggataccaccgaggacagagcagcatcacagcgatggcatttgcagacgatctggttttgctgagcgactcctgggaaggcatgaatacaaatattagcatactggagaccttctgcaatctgaccggactcaaaacacaggggcaaaagtgccacggcttttacatcaagccgacaaagaagtcttacaccatcaatgactgcgctgcctggactatcaacggcacacccctgaacatgatcgaccccggcgaatctgagaaatacctcggcctgcagtttgacccgtggattggaatagcaaggtccggtctctccacaaaactagatttttggcttcagcggatcgatcaagcaccacttaaacctctgcagaaactggatattctcaaaacatacaccatccctcggctgatctacatagctgaccactcagaagtgaaaactgcactactcgaaacccttgaccagaagatccggacagcggtcaaggaatggcttcacctacctccgtgcacctgcgatgccatcctgtactcgagcacgagagacggcggtttgggcatcaccaaattggcaggactgatccccagcgtgcaggcccgtagactgcatcggatcgcacagtcatctgacgatacgatgaaatgcttcatggaaaaagagaaaatggaacagctgcataagaaattgtggattcaagctggaggggacagagagaacataccctcgatttgggaagcaccaccgtcgagtgaaccaccaaacaacgtgagcacaaattcggaatgggaagcaccgacccagaaagataaatttccaaagccttgcaattggaggaaaaacgaattcaaaaaatggaccaaattggcatcccaaggccgcggaattgtaaattttgaaagagacaaaattagtaaccattggatccaatactacagacgcatacctcacaggaaactcctcactgcactacaactcagggccaacgtttaccccacgagagaatttctagccaggggtagacaagaccaatacatcaaggcgtgtaggcactgcgatgcggacattgaatcctgcgcccacatcatcggcaactgcccagtgacacaggacgcccgaatcaagaggcacaataagatctgcgaactgcttctcgaggaggcgaagaagaaggactgggtagtgttcaaggaaccgcacataagggattccaacaaggaactgtacaaacctgacctgatatttgtgaaggatgcccgtgcacttgtcgtggatgtgacagtacggtatgaagcagccaaatcatcgctggaggaagccgctgcagagaaagtgagaaagtacaaacacctggaaacggaagtaagacatctcacgaatgcaaaggacgttacttttgtgggctttcccctaggagcgcgggggaaatggcaccaagataactttaaacttttgactgagcttggcctctccaaatcgaggcaagtgaaaatggcagagactttttccacagtagcgctcttttcatctgtggacattgtacatatgtttgccagtagggccagaaaatctatggttatgtgataataggctgccttctgcggggcttgccttctggccatgcccttcttctctcccttgcacctgtacctcttggtctttgaataaagcctgagtaggaaggaccggtaaaaaaaaaaaaaaaaaaaaaaaaaaaaaaacgttgactaaaaaaaaaaaaaaaaaaaaaaaaaaaaaaaaaaaaaaaaaaaaaaaaaaaaaaaaaaaaaaaaaaaaaa

SEQ ID NO: 11639 - DNA, 4564 bp, synthetic construct
  source 1..4564: mol_type = other DNA
ggtctagttacaactgggcatcgctgcagagatcgcacctcctcgtggtcccgctggtagcccttcgaagggtgactaagtcgatctctgccccaggtacggagccgttgggactcaccagtccaacgtaactcctgcctaaattcggtgaaacaaattcctcggtaaaaagccccatggcttcttgcccgaaacctggccccccggtttcagcaggggcaatgagtttggaaagtggactgaccacccactccgttctcgccatcgaacgtggtcccaattcgttggcaaattccggatcagactttgggggggggggtctggggctaccgttacgcctattgagggtatcggtcggcactcagacctcccgctccgactgggtagacctggtgtcctggagccacccaggacccacgtctaagtcccagcaggttgacctggtgtctttatttcctaaacaccgggttgacctgttatccaaaaacgaccaggtagacctggtggctcaatttttaccatctaaatttccccccaatttggcagaaaatgatttggctttgctggtgaacttagagttctacagatcggatttgcatgtgtatgagggcgttcataaggctgcacattgggagggattaagtggtttgcctgaggtgtatgaacaacttgcaccacaaccgtgtgtgggagaaactttacattctagcctcccacgagacagtgaactgtttgtgcctgaagaggggagcagcgagaaggagagcgaggacgcgccaaaaacatctcctccgacgcctgggaaacatggtaagaggcagactggggaggaaaaagtgatggtgactgttcctgacaaaaatccaccttgtccttgctgtggtacccgggtaaactctgtgttgaatctgattgaacatctgaaagtgtcacacgggaaaaggagggtttgttttcggtgtgcaaaatgtggaaaggaaaatagtaactatcacagtgttgtttgtcattttaagaaatgcaggggtccagagacggagaaagccccagctggggagtggatttgtgaggtatgcaacagagattttacaaccaaaattggcctgggacaacacaagagattggcacacccagcagtgagaaatcaggaaaggatcgttgcttcccaaccgaaagaaacatcaaatagaggtgctcacaaaaggtgctggacaaaggaggaggaagaattactaataagactggaggctcagttcgagggaaacaaaaatattaataagcttattgcagaacacataaccaccaaaacagctaagcagatcagtgacaaaaggcgattgctgtccagaaagccagcagaggagccacgtgaggagcctggaacgtgtcatcacaccaggagagcagctgcgagcctgagaacggagcctgagatgagtcatcacgcccaggcagaggacagagataatggacctgggagacgccctctgccaggcagggcagctgccggagggagaacaatggacgagataagacgccaccctgataagggcaacggacagcagagacccaccaagcaaaaatcagaagaacagctgcaggcttactataaaaagacactagaggaacgactttcagctggggcacttaacaccttcccccgagcattcaagcaggtaatggaaggccgggatataaagctagtaatcaatcagacagcgcaggactgcttcggatgcctggaatccataagccaaataagaacggcaacccgagataaaaagtacacggtgacccgggagaaacacccaaagaaaccttttcagaagtggatgaagaagagagcaatcaaaaaaggtaattatcttcggttccagcgtttattttatcttgatagagggaaactggctaaaatcattttagatgatattgaatgcttgtcttgtgacataccactcagtgaaatttattcggtttttaaaacaagatgggaaacaactggtagctttaaaagccttggggactttaaaacttacgggaaggctgacaacactgccttcagagaattaattacggctaaagaaattgagaaaaatgtgcaggaaatgagcaaaggctcggctcccggtccagacgggattactcttggggacgtcgtaaagatggatcccgagttttcccggaccatggagattttcaatttatggttaacaactggtaaaatcccggacatggtgagggggtgcagaaccgttttgattccaaaatcatcaaagccggatcgtttgaaagacattaataactggagacctatcacgatcggttccatcttgctgagactgttctccaggattgtaacagctaggctgagcaaagcgtgccccctgaacccaaggcaaagaggctttatcagagcggcgggatgctctgaaaacttaaaactcctgcaaactataatttggtcggccaaaagagaacacagaccactgggtgttgtattcgtggacatcgccaaggcttttgacaccgtaagccaccagcacatcattcatgctttgcagcaaagagaggtggatccccacatcgtcggtctggtgagcaatatgtacgagaacatcagtacgtatatcaccacaaagaggaacacacacacagacaaaatccagatccgggttggagtaaagcagggtgacccgatgtcgccccttttatttaacctggcaatggaccctctattatgcaagctggaagagagtggcaaaggataccaccgaggacagagcagcatcacagcgatggcatttgcagacgatctggttttgctgagcgactcctgggaaaatatgaatacaaatattagcatactggagaccttctgcaatctgaccggactcaaaacacaggggcaaaagtgccacggcttttacatcaagccgacaaaggactcttacaccatcaatgactgcgctgcctggactatcaacggcacacccctgaacatgatcgaccccggcgaatctgagaaatacctcggcctgcagtttgacccgtggattggaatagcaaggtccggtctctccacaaaactagatttttggcttcagcggatcgatcaagcaccacttaaacctctgcagaaaactgatattctcaaaacatacaccatccctcggctgatctacatagctgaccactcagaagtgaaaactgcactactcgaaacccttgaccagaagatccggacagcggtcaaggaatggcttcacctacctccgtgcacctgcgatgccatcctgtactcgagcacgagagacggcggtttgggcatcaccaaattggcaggactgatccccagcgtgcaggcccgtagactgcatcggatcgcacagtcatctgacgatacgatgaaatgcttcatggaaaaagagaaaatggaacagctgcataagaaattgtggattcaagctggaggggacagagagaacataccctcgatttgggaagcaccaccgtcgagtgaaccaccaaacaacgtgagcacaaattcggaatgggaagcaccgacccagaaagataaatttccaaagccttgcaattggaggaaaaacgaattcaaaaaatggaccaaattggcatcccaaggccgcggaattgtaaattttgaaagagacaaaattagtaaccattggatccaatactacagacgcatacctcacaggaaactcctcactgcactacaactcagggccaacgtttaccccacgagagaatttctagccaggggtagacaagaccaatacatcaaggcgtgtaggcactgcgatgcggacattgaatcctgcgcccacatcatcggcaactgcccagtgacacaggacgcccgaatcaagaggcacaattacatctgcgaactgcttctcgaggaggcgaagaagaaggactgggtagtgttcaaggaaccgcacataagggattccaacaaggaactgtacaaacctgacctgatatttgtgaaggatggccgtgcacttgtcgtggatgtgacagtacggtatgaagcagccaaatcatcgctggaggaagccgctgcagagaaagtgagaaagtacaaacacctggaaacggaagtaagacatctcacgaatgcaaaggacgttacttttgtgggctttcccctaggagcgcgggggaaatggcaccaagataactttaaacttttgactgagcttggcctctccaaatcgaggcaagtgaaaatggcagagactttttccacagtagcgctcttttcatctgtggacattgtacatatgtttgccagtagggccagaaaatctatggttatgtgataataggctgccttctgcggggcttgccttctggccatgcccttcttctctcccttgcacctgtacctcttggtctttgaataaagcctgagtaggaaggaccggtaaaaaaaaaaaaaaaaaaaaaaaaaaaaaaacgttgactaaaaaaaaaaaaaaaaaaaaaaaaaaaaaaaaaaaaaaaaaaaaaaaaaaaaaaaaaaaaaaaaaaaaaa

SEQ ID NO: 11640 - DNA, 4564 bp, synthetic construct
  source 1..4564: mol_type = other DNA
ggtctagttacaactgggcatcgctgcagagatcgcacctcctcgtggtcccgctggtagcccttcgaagggtgactaagtcgatctctgccccaggtacggagccgttgggactcaccagtccaacgtaactcctgcctaaattcggtgaaacaaattcctcggtaaaaagccccatggcttcttgcccgaaacctggccccccggtttcagcaggggcaatgagtttggaaagtggactgaccacccactccgttctcgccatcgaacgtggtcccaattcgttggcaaattccggatcagactttgggggggggggtctggggctaccgttacgcctattgagggtatcggtcggcactcagacctcccgctccgactgggtagacctggtgtcctggagccacccaggacccacgtctaagtcccagcaggttgacctggtgtctttatttcctaaacaccgggttgacctgttatccaaaaacgaccaggtagacctggtggctcaatttttaccatctaaatttccccccaatttggcagaaaatgatttggctttgctggtgaacttagagttctacagatcggatttgcatgtgtatgagggcgttcataaggctgcacattgggagggattaagtggtttgcctgaggtgtatgaacaacttgcaccacaaccgtgtgtgggagaaactttacattctagcctcccacgagacagtgaactgtttgtgcctgaagaggggagcagcgagaaggagagcgaggacgcgccaaaaacatctcctccgacgcctgggaaacatggtaagaggcagactggggaggaaaaagtgatggtgactgttcctgacaaaaatccaccttgtccttgctgtggtacccgggtaaactctgtgttgaatctgattgaacatctgaaagtgtcacacgggaaaaggagggtttgttttcggtgtgcaaaatgtggaaaggaaaatagtaactatcacagtgttgtttgtcattttaagaaatgcaggggtccagagacggagaaagccccagctggggagtggatttgtgaggtatgcaacagagattttacaaccaaaattggcctgggacaacacaagagattggcacacccagcagtgagaaatcaggaaaggatcgttgcttcccaaccgaaagaaacatcaaatagaggtgctcacaaaaggtgctggacaaaggaggaggaagaattactaataagactggaggctcagttcgagggaaacaaaaatattaataagcttattgcagaacacataaccaccaaaacagctaagcagatcagtgacaaaaggcgattgctgtccagaaagccagcagaggagccacgtgaggagcctggaacgtgtcatcacaccaggagagcagctgcgagcctgagaacggagcctgagatgagtcatcacgcccaggcagaggacagagataatggacctgggagacgccctctgccaggcagggcagctgccggagggagaacaatggacgagataagacgccaccctgataagggcaacggacagcagagacccaccaagcaaaaatcagaagaacagctgcaggcttactataaaaagacactagaggaacgactttcagctggggcacttaacaccttcccccgagcattcaagcaggtaatggaaggccgggatataaagctagtaatcaatcagacagcgcaggactgcttcggatgcctggaatccataagccaaataagaacggcaacccgagataaaaagtacacggtgacccgggagaaacacccaaagaaaccttttcagaagtggatgaagaagagagcaatcaaaaaaggtaattatcttcggttccagcgtttattttatcttgatagagggaaactggctaaaatcattttagatgatattgaatgcttgtcttgtgacataccactcagtgaaatttattcggtttttaaaacaagatgggaaacaactggtagctttaaaagccttggggactttaaaacttacgggaaggctgacaacactgccttcagagaattaattacggctaaagaaattgagaaaaatgtgcaggaaatgagcaaaggctcggctcccggtccagacgggattactcttggggacgtcgtaaagatggatcccgagggctcccggaccatggagattttcaatttatggttaacaactggtaaaatcccggacatggtgagggggtgcagaaccgttttgattccaaaatcatcagacccggatcgtttgaaagacattaataactggagacctatcacgatcggttccatcttgctgagactgttctccaggattgtaacagctaggctgagcaaagcgtgccccctgaacccaaggcaaagaggctttatcagagcggcgggatgctctgaaaacttaaaactcctgcaaactataatttggtcggccaaaagagaacacagaccactgggtgttgtattcgtggacatcgccaaggcttttgacaccgtaagccaccagcacatcattcatgctttgcagcaaagagaggtggatccccacatcgtcggtctggtgagcaatatgtacgagaacatcagtacgtatatcaccacaaagaggaacacacacacagacaaaatccagatccgggttggagtaaagcagggtgacccgatgtcgccccttttatttaacctggcaatggaccctctattatgcaagctggaagagagtggcaaaggataccaccgaggacagagcagcatcacagcgatggcatttgcagacgatctggttttgctgagcgactcctgggaaaatatgaatacaaatattagcatactggagaccttctgcaatctgaccggactcaaaacacaggggcaaaagtgccacggcttttacatcaagccgacaaaggactcttacaccatcaatgactgcgctgcctggactatcaacggcacacccctgaacatgatcgaccccggcgaatctgagaaatacctcggcctgcagtttgacccgtggattggaatagcaaggtccggtctctccacaaaactagatttttggcttcagcggatcgatcaagcaccacttaaacctctgcagaaaactgatattctcaaaacatacaccatccctcggctgatctacatagctgaccactcagaagtgaaaactgcactactcgaaacccttgaccagaagatccggacagcggtcaaggaatggcttcacctacctccgtgcacctgcgatgccatcctgtactcgagcacgagagacggcggtttgggcatcaccaaattggcaggactgatccccagcgtgcaggcccgtagactgcatcggatcgcacagtcatctgacgatacgatgaaatgcttcatggaaaaagagaaaatggaacagctgcataagaaattgtggattcaagctggaggggacagagagaacataccctcgatttgggaagcaccaccgtcgagtgaaccaccaaacaacgtgagcacaaattcggaatgggaagcaccgacccagaaagataaatttccaaagccttgcaattggaggaaaaacgaattcaaaaaatggaccaaattggcatcccaaggccgcggaattgtaaattttgaaagagacaaaattagtaaccattggatccaatactacagacgcatacctcacaggaaactcctcactgcactacaactcagggccaacgtttaccccacgagagaatttctagccaggggtagacaagaccaatacatcaaggcgtgtaggcactgcgatgcggacattgaatcctgcgcccacatcatcggcaactgcccagtgacacaggacgcccgaatcaagaggcacaattacatctgcgaactgcttctcgaggaggcgaagaagaaggactgggtagtgttcaaggaaccgcacataagggattccaacaaggaactgtacaaacctgacctgatatttgtgaaggatggccgtgcacttgtcgtggatgtgacagtacggtatgaagcagccaaatcatcgctggaggaagccgctgcagagaaagtgagaaagtacaaacacctggaaacggaagtaagacatctcacgaatgcaaaggacgttacttttgtgggctttcccctaggagcgcgggggaaatggcaccaagataactttaaacttttgactgagcttggcctctccaaatcgaggcaagtgaaaatggcagagactttttccacagtagcgctcttttcatctgtggacattgtacatatgtttgccagtagggccagaaaatctatggttatgtgataataggctgccttctgcggggcttgccttctggccatgcccttcttctctcccttgcacctgtacctcttggtctttgaataaagcctgagtaggaaggaccggtaaaaaaaaaaaaaaaaaaaaaaaaaaaaaaacgttgactaaaaaaaaaaaaaaaaaaaaaaaaaaaaaaaaaaaaaaaaaaaaaaaaaaaaaaaaaaaaaaaaaaaaaa

SEQ ID NO: 11641 - DNA, 4564 bp, synthetic construct
  source 1..4564: mol_type = other DNA
ggtctagttacaactgggcatcgctgcagagatcgcacctcctcgtggtcccgctggtagcccttcgaagggtgactaagtcgatctctgccccaggtacggagccgttgggactcaccagtccaacgtaactcctgcctaaattcggtgaaacaaattcctcggtaaaaagccccatggcttcttgcccgaaacctggccccccggtttcagcaggggcaatgagtttggaaagtggactgaccacccactccgttctcgccatcgaacgtggtcccaattcgttggcaaattccggatcagactttgggggggggggtctggggctaccgttacgcctattgagggtatcggtcggcactcagacctcccgctccgactgggtagacctggtgtcctggagccacccaggacccacgtctaagtcccagcaggttgacctggtgtctttatttcctaaacaccgggttgacctgttatccaaaaacgaccaggtagacctggtggctcaatttttaccatctaaatttccccccaatttggcagaaaatgatttggctttgctggtgaacttagagttctacagatcggatttgcatgtgtatgagtgtgttcataaggctgcacattgggagggattaagtggtttgcctgaggtgtatgaacaacttgcaccacaaccgtgtgtgggagaaactttacattctagcctcccacgagacagtgaactgtttgtgcctgaagaggggagcagcgagaaggagagcgaggacgcgccaaaaacatctcctccgacgcctgggaaacatggtttggaacagactggggaggaaaaagtgatggtgactgttcctgacaaaaatccaccttgtccttgctgtggtacccgggtaaactctgtgttgaatctgattgaacatctgaaagtgtcacacgggaaaaggggggtttgttttcggtgtgcaaaatgtggaaaggaaaatagtaactatcacagtgttgtttgtcattttaagaaatgcaggggtccagagacggagaaagccccagctggggagtggatttgtgaggtatgcaacagagattttacaaccaaaattggcctgggacaacacaagagattggcacacccagcagtgagaaatcaggaaaggatcgttgcttcccaaccgaaagaaacatcaaatagaggtgctcacaaaaggtgctggacaaaggaggaggaagaattactaataagactggaggctcagttcgagggaaacaaaaatattaataagcttattgcagaacacataaccaccaaaacagctaagcagatcagtgacaaaaggcgattgctgtccagaaagccagcagaggagccacgtgaggagcctggaacgtgtcatcacaccaggagagcagctgcgagcctgagaacggagcctgagatgagtcatcacgcccaggcagaggacagagataatggacctgggagacgccctctgccaggcagggcagctgccggagggagaacaatggacgagataagacgccaccctgataagggcaacggacagcagagacccaccaagcaaaaatcagaagaacagctgcaggcttactataaaaagacactagaggaacgactttcagctggggcacttaacaccttcccccgagcattcaagcaggtaatggaaggccgggatataaagctagtaatcaatcagacagcgcaggactgcttcggatgcctggaatccataagccaaataagaacggcaacccgagataaaaagtacacggtgacccgggagaaacacccaaagaaaccttttcagaagtggatgaagaagagagcaatcaaaaaaggtaattatcttcggttccagcgtttattttatcttgatagagggaaactggctaaaatcattttagatgatattgaatgcttgtcttgtgacataccactcagtgaaatttattcggtttttaaaacaagatgggaaacaactggtagctttaaaagccttggggactttaaaacttacgggaaggctgacaacactgccttcagagaattaattacggctaaagaaattgagaaaaatgtgcaggaaatgagcaaaggctcggctcccggtccagacgggattactcttggggacgtcgtaaagatggatcccgagttttccctgaccatggagattttcaatttatggttaacaactggtaaaatcccggacatggtgagggggtgcagaaccgttttgattccaaaatcatcaaagccggatcgtttgaaagacattaataactggagacctatcacgatcggttccatcttgctgagactgttctccaggattgtaacagctaggctgagcaaagcgtgccccctgaacccaaggcaaagaggctttatcagagcggcgggatgctctgaaaacttaaaactcctgcaaactataatttggtcggccaaaagagaacacagaccactgggtgttgtattcgtggacatcgccaaggcttttgacaccgtaagccaccagcacatcattcatgctttgcagcaaagagaggtggatccccacatcgtcggtctggtgagcaatatgtacgagaacatcagtacgtatatcaccacaaagaggaacacacacacagacaaaatccagatccgggttggagtaaagcagggtgacccgatgtcgccccttttatttaacctggcaatggaccctctattatgcaagctggaagagagtggcaaaggataccaccgaggacagagcagcatcacagcgatggcatttgcagacgatctggttttgctgagcgactcctgggaaaatatgaatacaaatattagcatactggagaccttctgcaatctgaccggactcaaaacacaggggcaaaagtgccacggcttttacatcaagccgacaaaggactcttacaccatcaatgactgcgctgcctggactatcaacggcacacccctgaacatgatcgaccccggcgaatctgagaaatacctcggcctgcagtttgacccgtggattggaatagcaaggtccggtctctccacaaaactagatgagtggcttcagcggatcgatcaagcaccacttaaacctctgcagaaaactgatattctcaaaacatacaccatccctcggctgatctacatagctgaccactcagaagtgaaagccgcactactcgaaacccttgaccagaagatccggacagcggtcaaggaatggcttcacctacctccgtgcacctgcgatgccatcctgtactcgagcacgagagacggcggtttgggcatcaccaaattggcaggactgatccccagcgtgcaggcccgtagactgcatcggatcgcacagtcatctgacgatacgatgaaatgcttcatggaaaaagagaaaatggaacagctgcataagaaattgtggattcaagctggaggggacagagagaacataccctcgatttgggaagcaccaccgtcgagtgaaccaccaaacaacgtgagcacaaattcggaatgggaagcaccgacccagaaacccaaatttccaaagccttgcaattggaggaaaaacgaattcaaaaaatggaccaaattggcatcccaaggccgcggaattgtaaattttgaaagagacaaaattagtaaccattggatccaatactacagacgcatacctcacaggaaactcctcactgcactacaactcagggccaacgtttaccccacgagagaatttctagccaggggtagacaagaccaatacatcaaggcgtgtaggcactgcgatgcggacattgaatcctgcgcccacatcatcggcaactgcccagtgacacaggacgcccgaatcaagaggcacaattacatctgcgaactgcttctcgaggaggcgaagaagaaggactgggtagtgttcaaggaaccgcacataagggattccaacaaggaactgtacaaacctgacctgatatttgtgaaggatgcccgtgcacttgtcgtggatgtgacagtacggtatgaagcagccaaatcatcgctggaggaagccgctgcagagaaagtgagaaagtacaaacacctggaaacggaagtaagacatctcacgaatgcaaaggacgttacttttgtgggctttcccctaggagcgcgggggaaatggcaccaagataactttaaacttttgactgagcttggcctctccaaatcgaggcaagtgaaaatggcagagactttttccacagtagcgctcttttcatctgtggacattgtacatatgtttgccagtagggccagaaaatctatggttatgtgataataggctgccttctgcggggcttgccttctggccatgcccttcttctctcccttgcacctgtacctcttggtctttgaataaagcctgagtaggaaggaccggtaaaaaaaaaaaaaaaaaaaaaaaaaaaaaaacgttgactaaaaaaaaaaaaaaaaaaaaaaaaaaaaaaaaaaaaaaaaaaaaaaaaaaaaaaaaaaaaaaaaaaaaaa

SEQ ID NO: 11642 - DNA, 5407 bp, synthetic construct
  source 1..5407: mol_type = other DNA
ggtctagttacaactgggcatcgctgcagagatcgcacctcctcgtggtcccgctggtagcccttcgaagggtgactaagtcgatctctgccccaggtacggagccgttgggactcaccagtccaacgtaactcctgcctaaattcggtgaaacaaattcctcggtaaaaagccccatgggaactgcactaacaccgctcctgacgaagttcgccacgcgctacgagatgggtaccacgcctgaagaagtggcgaacacgctcaagcagacctgtttcaagggccaggtcaatgattcgcagatggtcgccctgctgatcgtggcagaccagtacaagcttaaccccttcaccaaggagttgtacgcattccccgacaagaacaacggcatcgtgccggttgttggtgtggatggctgggctcggatcatcaacgagaacccacagttcgatggcatggaattctcaatggaccagcagggaaccgaatgcacctgcaagatctatcggaaggaccgcagccatgccatcagcgcgactgagtacatggccgagtgcaagcggaacacccagccttggcagtcccatccgcgccggatgcttcgccacaaggcaatgatccagtgcgcacgcctcgcgttcgggttcgccggcatatacgaccaggacgaggccgagcggatcgttgaacgagacgtcactcccgcagagcagtacgaggacgtcagcgaggcgatctgcctgatcaaggactccccaacaatggaggacttgcaggcagcattcagcaatgcctggaaagcctataagacaaagggcgcgcgcgaccagcttacggcggccaaggaccagcggaagaaagaattgctggacgcccctatagacgttgaattcgaggagaccggcgatgatcgagcagcgtctggaggatctagcggaggatcctctggcagcgagacaccaggaacaagcgagtcagcaacaccagagagcagtggcggcagcagcggcggcagcagcatggcttcttgcccgaaacctggccccccggtttcagcaggggcaatgagtttggaaagtggactgaccacccactccgttctcgccatcgaacgtggtcccaattcgttggcaaattccggatcagactttgggggggggggtctggggctaccgttacgcctattgagggtatcggtcggcactcagacctcccgctccgactgggtagacctggtgtcctggagccacccaggacccacgtctaagtcccagcaggttgacctggtgtctttatttcctaaacaccgggttgacctgttatccaaaaacgaccaggtagacctggtggctcaatttttaccatctaaatttccccccaatttggcagaaaatgatttggctttgctggtgaacttagagttctacagatcggatttgcatgtgtatgagtgtgttcattttgctgcacattgggagggattaagtggtttgcctgaggtgtatgaacaacttgcaccacaaccgtgtgtgggagaaactttacattctagcctcccacgagacagtgaactgtttgtgcctgaagaggggagcagcgagaaggagagcgaggacgcgccaaaaacatctcctccgacgcctgggaaacatggtttggaacagactggggaggaaaaagtgatggtgactgttcctgacaaaaatccaccttgtccttgctgtggtacccgggtaaactctgtgttgaatctgattgaacatctgaaagtgtcacacgggaaaaggggggtttgttttcggtgtgcaaaatgtggaaaggaaaatagtaactatcacagtgttgtttgtcattttccaaaatgcaggggtccagagacggagaaagccccagctggggagtggatttgtgaggtatgcaacagagattttacaaccaaaattggcctgggacaacacaagagattggcacacccagcagtgagaaatcaggaaaggatcgttgcttcccaaccgaaagaaacatcaaatagaggtgctcacaaaaggtgctggacaaaggaggaggaagaattactaataagactggaggctcagttcgagggaaacaaaaatattaataagcttattgcagaacacataaccaccaaaacagctaagcagatcagtgacaaaaggcgattgctgtccagaaagccagcagaggagccacgtgaggagcctggaacgtgtcatcacaccaggagagcagctgcgagcctgagaacggagcctgagatgagtcatcacgcccaggcagaggacagagataatggacctgggagacgccctctgccaggcagggcagctgccggagggagaacaatggacgagataagacgccaccctgataagggcaacggacagcagagacccaccaagcaaaaatcagaagaacagctgcaggcttactataaaaagacactagaggaacgactttcagctggggcacttaacaccttcccccgagcattcaagcaggtaatggaaggccgggatataaagctagtaatcaatcagacagcgcaggactgcttcggatgcctggaatccataagccaaataagaacggcaacccgagataaaaaggacacggtgacccgggagaaacacccaaagaaaccttttcagaagtggatgaaggacagagcaatcaaaaaaggtaattatcttcggttccagcgtttattttatcttgatagagggaaactggctaaaatcattttagatgatattgaatgcttgtcttgtgacataccactcagtgaaatttattcggtttttaaaacaagatgggaaacaactggtagctttaaaagccttggggactttaaaacttacgggaaggctgacaacactgccttcagagaattaattacggctaaagaaattgagaaaaatgtgcaggaaatgagcaaaggctcggctcccggtccagacgggattactcttggggacgtcgtaaagatggatcccgagttttccctgaccatggagattttcaatttatggttaacaactggtaaaatcccggacatggtgagggggtgcagaaccgttttgattccaaaatcatcaaagccggatcgtttgaaagacattaataactggagacctatcacgatcggttccatcttgctgagactgttctccaggattgtaacagctaggctgagcaaagcgtgccccctgaacccaaggcaaagaggctttatcagagcggcgggatgctctgaaaacttaaaactcctgcaaactataatttggtcggccaaaagagaacacagaccactgggtgttgtattcgtggacatcgccaaggcttttgacaccgtaagccaccagcacatcattcatgctttgcagcaaagagaggtggatccccacatcgtcggtctggtgagcaatatgtacgagaacatcagtacgtatatcaccacaaagaggaacacacacacagacaaaatccagatccgggttggagtaaagcagggtgacccgatgtcgccccttttatttaacctggcaatggaccctctattatgcaagctggaagagagtggcaaaggataccaccgaggacagagcagcatcacagcgatggcatttgcagacgatctggttttgctgagcgactcctgggaaaatatgaatacaaatattagcatactggagaccttctgcaatctgaccggactcaaaacacaggggcaaaagtgccacggcttttacatcaagccgacaaaggactcttacaccatcaatgactgcgctgcctggactatcaacggcacacccctgaacatgatcgaccccggcgaatctgagaaatacctcggcctgcagtttgacccgtggattggaatagcaaggtccggtctctccacaaaactagatttttggcttcagcggatcgatcaagcaccacttaaacctctgcagaaaactgatattctcaaaacatacaccatccctcggctgatctacatagctgaccactcagaagtgaaaactgcactactcgaaacccttgaccagaagatccggacagcggtcaaggaatggcttcacctacctccgtgcacctgcgatgccatcctgtactcgagcacgagagacggcggtttgggcatcaccaaattggcaggactgatccccagcgtgcaggcccgtagactgcatcggatcgcacagtcatctgacgatacgatgaaatgcttcatggaaaaagagaaaatggaacagctgcataagaaattgtggattcaagctggaggggacagagagaacataccctcgatttgggaagcaccaccgtcgagtgaaccaccaaacaacgtgagcacaaattcggaatgggaagcaccgacccagaaacccaaatttccaaagccttgcaattggaggaaaaacgaattcaaaaaatggaccaaattggcatcccaaggccgcggaattgtaaattttgaaagagacaaaattagtaaccattggatccaatactacagacgcatacctcacaggaaactcctcactgcactacaactcagggccaacgtttaccccacgagagaatttctagccaggggtagacaagaccaatacatcaaggcgtgtaggcactgcgatgcggacattgaatcctgcgcccacatcatcggcaactgcccagtgacacaggacgcccgaatcaagaggcacaattacatctgcgaactgcttctcgaggaggcgaagaagaaggactgggtagtgttcaaggaaccgcacataagggattccaacaaggaactgtacaaacctgacctgatatttgtgaaggatgcccgtgcacttgtcgtggatgtgacagtacggtatgaagcagccaaatcatcgctggaggaagccgctgcagagaaagtgagaaagtacaaacacctggaaacggaagtaagacatctcacgaatgcaaaggacgttacttttgtgggctttcccctaggagcgcgggggaaatggcaccaagataactttaaacttttgactgagcttggcctctccaaatcgaggcaagtgaaaatggcagagactttttccacagtagcgctcttttcatctgtggacattgtacatatgtttgccagtagggccagaaaatctatggttatgtgataataggctgccttctgcggggcttgccttctggccatgcccttcttctctcccttgcacctgtacctcttggtctttgaataaagcctgagtaggaaggaccggtaaaaaaaaaaaaaaaaaaaaaaaaaaaaaaacgttgactaaaaaaaaaaaaaaaaaaaaaaaaaaaaaaaaaaaaaaaaaaaaaaaaaaaaaaaaaaaaaaaaaaaaaa

SEQ ID NO: 11643 - DNA, 5407 bp, synthetic construct
  source 1..5407: mol_type = other DNA
ggtctagttacaactgggcatcgctgcagagatcgcacctcctcgtggtcccgctggtagcccttcgaagggtgactaagtcgatctctgccccaggtacggagccgttgggactcaccagtccaacgtaactcctgcctaaattcggtgaaacaaattcctcggtaaaaagccccatgggaactgcactaacaccgctcctgacgaagttcgccacgcgctacgagatgggtaccacgcctgaagaagtggcgaacacgctcaagcagacctgtttcaagggccaggtcaatgattcgcagatggtcgccctgctgatcgtggcagaccagtacaagcttaaccccttcaccaaggagttgtacgcattccccgacaagaacaacggcatcgtgccggttgttggtgtggatggctgggctcggatcatcaacgagaacccacagttcgatggcatggaattctcaatggaccagcagggaaccgaatgcacctgcaagatctatcggaaggaccgcagccatgccatcagcgcgactgagtacatggccgagtgcaagcggaacacccagccttggcagtcccatccgcgccggatgcttcgccacaaggcaatgatccagtgcgcacgcctcgcgttcgggttcgccggcatatacgaccaggacgaggccgagcggatcgttgaacgagacgtcactcccgcagagcagtacgaggacgtcagcgaggcgatctgcctgatcaaggactccccaacaatggaggacttgcaggcagcattcagcaatgcctggaaagcctataagacaaagggcgcgcgcgaccagcttacggcggccaaggaccagcggaagaaagaattgctggacgcccctatagacgttgaattcgaggagaccggcgatgatcgagcagcgtctggaggatctagcggaggatcctctggcagcgagacaccaggaacaagcgagtcagcaacaccagagagcagtggcggcagcagcggcggcagcagcatggcttcttgcccgaaacctggccccccggtttcagcaggggcaatgagtttggaaagtggactgaccacccactccgttctcgccatcgaacgtggtcccaattcgttggcaaattccggatcagactttgggggggggggtctggggctaccgttacgcctattgagggtatcggtcggcactcagacctcccgctccgactgggtagacctggtgtcctggagccacccaggacccacgtctaagtcccagcaggttgacctggtgtctttatttcctaaacaccgggttgacctgttatccaaaaacgaccaggtagacctggtggctcaatttttaccatctaaatttccccccaatttggcagaaaatgatttggctttgctggtgaacttagagttctacagatcggatttgcatgtgtatgagtgtgttcataaggctgcacattgggagggattaagtggtttgcctgaggtgtatgaacaacttgcaccacaaccgtgtgtgggagaaactttacattctagcctcccacgagacagtgaactgtttgtgcctgaagaggggagcagcgagaaggagagcgaggacgcgccaaaaacatctcctccgacgcctgggaaacatggtttggaacagactggggaggaaaaagtgatggtgactgttcctgacaaaaatccaccttgtccttgctgtggtacccgggtaaactctgtgttgaatctgattgaacatctgaaagtgtcacacgggaaaaggggggtttgttttcggtgtgcaaaatgtggaaaggaaaatagtaactatcacagtgttgtttgtcattttccaaaatgcaggggtccagagacggagaaagccccagctggggagtggatttgtgaggtatgcaacagagattttacaaccaaaattggcctgggacaacacaagagattggcacacccagcagtgagaaatcaggaaaggatcgttgcttcccaaccgaaagaaacatcaaatagaggtgctcacaaaaggtgctggacaaaggaggaggaagaattactaataagactggaggctcagttcgagggaaacaaaaatattaataagcttattgcagaacacataaccaccaaaacagctaagcagatcagtgacaaaaggcgattgctgtccagaaagccagcagaggagccacgtgaggagcctggaacgtgtcatcacaccaggagagcagctgcgagcctgagaacggagcctgagatgagtcatcacgcccaggcagaggacagagataatggacctgggagacgccctctgccaggcagggcagctgccggagggagaacaatggacgagataagacgccaccctgataagggcaacggacagcagagacccaccaagcaaaaatcagaagaacagctgcaggcttactataaaaagacactagaggaacgactttcagctggggcacttaacaccttcccccgagcattcaagcaggtaatggaaggccgggatataaagctagtaatcaatcagacagcgcaggactgcttcggatgcctggaatccataagccaaataagaacggcaacccgagataaaaagtacacggtgacccgggagaaacacccaaagaaaccttttcagaagtggatgaaggacagagcaatcaaaaaaggtaattatcttcggttccagcgtttattttatcttgatagagggaaactggctaaaatcattttagatgatattgaatgcttgtcttgtgacataccactcagtgaaatttattcggtttttaaaacaagatgggaaacaactggtagctttaaaagccttggggactttaaaacttacgggaaggctgacaacactgccttcagagaattaattacggctaaagaaattgagaaaaatgtgcaggaaatgagcaaaggctcggctcccggtccagacgggattactcttggggacgtcgtaaagatggatcccgagttttccctgaccatggagattttcaatttatggttaacaactggtaaaatcccggacatggtgagggggtgcagaaccgttttgattccaaaatcatcaaagccggatcgtttgaaagacattaataactggagacctatcacgatcggttccatcttgctgagactgttctccaggattgtaacagctaggctgagcaaagcgtgccccctgaacccaaggcaaagaggctttatcagagcggcgggatgctctgaaaacttaaaactcctgcaaactataatttggtcggccaaaagagaacacagaccactgggtgttgtattcgtggacatcgccaaggcttttgacaccgtaagccaccagcacatcattcatgctttgcagcaaagagaggtggatccccacatcgtcggtctggtgagcaatatgtacgagaacatcagtacgtatatcaccacaaagaggaacacacacacagacaaaatccagatccgggttggagtaaagcagggtgacccgatgtcgccccttttatttaacctggcaatggaccctctattatgcaagctggaagagagtggcaaaggataccaccgaggacagagcagcatcacagcgatggcatttgcagacgatctggttttgctgagcgactcctgggaaaatatgaatacaaatattagcatactggagaccttctgcaatctgaccggactcaaaacacaggggcaaaagtgccacggcttttacatcaagccgacaaaggactcttacaccatcaatgactgcgctgcctggactatcaacggcacacccctgaacatgatcgaccccggcgaatctgagaaatacctcggcctgcagtttgacccgtggattggaatagcaaggtccggtctctccacaaaactagatgagtggcttcagcggatcgatcaagcaccacttaaacctctgcagaaaactgatattctcaaaacatacaccatccctcggctgatctacatagctgaccactcagaagtgaaagccgcactactcgaaacccttgaccagaagatccggacagcggtcaaggaatggcttcacctacctccgtgcacctgcgatgccatcctgtactcgagcacgagagacggcggtttgggcatcaccaaattggcaggactgatccccagcgtgcaggcccgtagactgcatcggatcgcacagtcatctgacgatacgatgaaatgcttcatggaaaaagagaaaatggaacagctgcataagaaattgtggattcaagctggaggggacagagagaacataccctcgatttgggaagcaccaccgtcgagtgaaccaccaaacaacgtgagcacaaattcggaatgggaagcaccgacccagaaacccaaatttccaaagccttgcaattggaggaaaaacgaattcaaaaaatggaccaaattggcatcccaaggccgcggaattgtaaattttgaaagagacaaaattagtaaccattggatccaatactacagacgcatacctcacaggaaactcctcactgcactacaactcagggccaacgtttaccccacgagagaatttctagccaggggtagacaagaccaatacatcaaggcgtgtaggcactgcgatgcggacattgaatcctgcgcccacatcatcggcaactgcccagtgacacaggacgcccgaatcaagaggcacaattacatctgcgaactgcttctcgaggaggcgaagaagaaggactgggtagtgttcaaggaaccgcacataagggattccaacaaggaactgtacaaacctgacctgatatttgtgaaggatgcccgtgcacttgtcgtggatgtgacagtacggtatgaagcagccaaatcatcgctggaggaagccgctgcagagaaagtgagaaagtacaaacacctggaaacggaagtaagacatctcacgaatgcaaaggacgttacttttgtgggctttcccctaggagcgcgggggaaatggcaccaagataactttaaacttttgactgagcttggcctctccaaatcgaggcaagtgaaaatggcagagactttttccacagtagcgctcttttcatctgtggacattgtacatatgtttgccagtagggccagaaaatctatggttatgtgataataggctgccttctgcggggcttgccttctggccatgcccttcttctctcccttgcacctgtacctcttggtctttgaataaagcctgagtaggaaggaccggtaaaaaaaaaaaaaaaaaaaaaaaaaaaaaaacgttgactaaaaaaaaaaaaaaaaaaaaaaaaaaaaaaaaaaaaaaaaaaaaaaaaaaaaaaaaaaaaaaaaaaaaaa

SEQ ID NO: 11644 - DNA, 5407 bp, synthetic construct
  source 1..5407: mol_type = other DNA
ggtctagttacaactgggcatcgctgcagagatcgcacctcctcgtggtcccgctggtagcccttcgaagggtgactaagtcgatctctgccccaggtacggagccgttgggactcaccagtccaacgtaactcctgcctaaattcggtgaaacaaattcctcggtaaaaagccccatgggaactgcactaacaccgctcctgacgaagttcgccacgcgctacgagatgggtaccacgcctgaagaagtggcgaacacgctcaagcagacctgtttcaagggccaggtcaatgattcgcagatggtcgccctgctgatcgtggcagaccagtacaagcttaaccccttcaccaaggagttgtacgcattccccgacaagaacaacggcatcgtgccggttgttggtgtggatggctgggctcggatcatcaacgagaacccacagttcgatggcatggaattctcaatggaccagcagggaaccgaatgcacctgcaagatctatcggaaggaccgcagccatgccatcagcgcgactgagtacatggccgagtgcaagcggaacacccagccttggcagtcccatccgcgccggatgcttcgccacaaggcaatgatccagtgcgcacgcctcgcgttcgggttcgccggcatatacgaccaggacgaggccgagcggatcgttgaacgagacgtcactcccgcagagcagtacgaggacgtcagcgaggcgatctgcctgatcaaggactccccaacaatggaggacttgcaggcagcattcagcaatgcctggaaagcctataagacaaagggcgcgcgcgaccagcttacggcggccaaggaccagcggaagaaagaattgctggacgcccctatagacgttgaattcgaggagaccggcgatgatcgagcagcgtctggaggatctagcggaggatcctctggcagcgagacaccaggaacaagcgagtcagcaacaccagagagcagtggcggcagcagcggcggcagcagcatggcttcttgcccgaaacctggccccccggtttcagcaggggcaatgagtttggaaagtggactgaccacccactccgttctcgccatcgaacgtggtcccaattcgttggcaaattccggatcagactttgggggggggggtctggggctaccgttacgcctattgagggtatcggtcggcactcagacctcccgctccgactgggtagacctggtgtcctggagccacccaggacccacgtctaagtcccagcaggttgacctggtgtctttatttcctaaacaccgggttgacctgttatccaaaaacgaccaggtagacctggtggctcaatttttaccatctaaatttccccccaatttggcagaaaatgatttggctttgctggtgaacttagagttctacagatcggatttgcatgtgtatgagtgtgttcataaggctgcacattgggagggattaagtggtttgcctgaggtgtatgaacaacttgcaccacaaccgtgtgtgggagaaactttacattctagcctcccacgagacagtgaactgtttgtgcctgaagaggggagcagcgagaaggagagcgaggacgcgccaaaaacatctcctccgacgcctgggaaacatggtttggaacagactggggaggaaaaagtgatggtgactgttcctgacaaaaatccaccttgtccttgctgtggtacccgggtaaactctgtgttgaatctgattgaacatctgaaagtgtcacacgggaaaaggggggtttgttttcggtgtgcaaaatgtggaaaggaaaatagtaactatcacagtgttgtttgtcattttccaaaatgcaggggtccagagacggagaaagccccagctggggagtggatttgtgaggtatgcaacagagattttacaaccaaaattggcctgggacaacacaagagattggcacacccagcagtgagaaatcaggaaaggatcgttgcttcccaaccgaaagaaacatcaaatagaggtgctcacaaaaggtgctggacaaaggaggaggaagaattactaataagactggaggctcagttcgagggaaacaaaaatattaataagcttattgcagaacacataaccaccaaaacagctaagcagatcagtgacaaaaggcgattgctgtccagaaagccagcagaggagccacgtgaggagcctggaacgtgtcatcacaccaggagagcagctgcgagcctgagaacggagcctgagatgagtcatcacgcccaggcagaggacagagataatggacctgggagacgccctctgccaggcagggcagctgccggagggagaacaatggacgagataagacgccaccctgataagggcaacggacagcagagacccaccaagcaaaaatcagaagaacagctgcaggcttactataaaaagacactagaggaacgactttcagctggggcacttaacaccttcccccgagcattcaagcaggtaatggaaggccgggatataaagctagtaatcaatcagacagcgcaggactgcttcggatgcctggaatccataagccaaataagaacggcaacccgagataaaaagtacacggtgacccgggagaaacacccaaagaaaccttttcagaagtggatgaaggacagagcaatcaaaaaaggtaattatcttcggttccagcgtttattttatcttgatagagggaaactggctaaaatcattttagatgatattgaatgcttgtcttgtgacataccactcagtgaaatttattcggtttttaaaacaagatgggaaacaactggtagctttaaaagccttggggactttaaaacttacgggaaggctgacaacactgccttcagagaattaattacggctaaagaaattgagaaaaatgtgcaggaaatgagcaaaggctcggctcccggtccagacgggattactcttggggacgtcgtaaagatggatcccgagttttccctgaccatggagattttcaatttatggttaacaactggtaaaatcccggacatggtgagggggtgcagaaccgttttgattccaaaatcatcaaagccggatcgtttgaaagacattaataactggagacctatcacgatcggttccatcttgctgagactgttctccaggattgtaacagctaggctgagcaaagcgtgccccctgaacccaaggcaaagaggctttatcagagcggcgggatgctctgaaaacttaaaactcctgcaaactataatttggtcggccaaaagagaacacagaccactgggtgttgtattcgtggacatcgccaaggcttttgacaccgtaagccaccagcacatcattcatgctttgcagcaaagagaggtggatccccacatcgtcggtctggtgagcaatatgtacgagaacatcagtacgtatatcaccacaaagaggaacacacacacagacaaaatccagatccgggttggagtaaagcagggtgacccgatgtcgccccttttatttaacctggcaatggaccctctattatgcaagctggaagagagtggcaaaggataccaccgaggacagagcagcatcacagcgatggcatttgcagacgatctggttttgctgagcgactcctgggaaaatatgaatacaaatattagcatactggagaccttctgcaatctgaccggactcaaaacacaggggcaaaagtgccacggcttttacatcaagccgacaaaggactcttacaccatcaatgactgcgctgcctggactatcaacggcacacccctgaacatgatcgaccccggcgaatctgagaaatacctcggcctgcagtttgacccgtggattggaatagcaaggtccggtctctccacaaaactagatgagtggcttcagcggatcgatcaagcaccacttaaacctctgcagaaaactgatattctcaaaacatacaccatccctcggctgatctacatagctgaccactcagaagtgaaagccgcactactcgaaacccttgaccagaagatccggacagcggtcaaggaatggcttcacctacctccgtgcacctgcgatgccatcctgtactcgagcacgagagacggcggtttgggcatcaccaaattggcaggactgatccccagcgtgcaggcccgtagactgcatcggatcgcacagtcatctgacgatacgatgaaatgcttcatggaaaaagagaggatggaacagctgcataagaaattgtggattcaagctggaggggacagagagaacataccctcgatttgggaagcaccaccgtcgagtgaaccaccaaacaacgtgagcacaaattcggaatgggaagcaccgacccagaaacccaaatttccaaagccttgcaattggaggaaaaacgaattcaaaaaatggaccaaattggcatcccaaggccgcggaattgtaaattttgaaagagacaaaattagtaaccattggatccaatactacagacgcatacctcacaggaaactcctcactgcactacaactcagggccaacgtttaccccacgagagaatttctagccaggggtagacaagaccaatacatcaaggcgtgtaggcactgcgatgcggacattgaatcctgcgcccacatcatcggcaactgcccagtgacacaggacgcccgaatcaagaggcacaattacatctgcgaactgcttctcgaggaggcgaagaagaaggactgggtagtgttcaaggaaccgcacataagggattccaacaaggaactgtacaaacctgacctgatatttgtgaaggatgcccgtgcacttgtcgtggatgtgacagtacggtatgaagcagccaaatcatcgctggaggaagccgctgcagagaaagtgagaaagtacaaacacctggaaacggaagtaagacatctcacgaatgcaaaggacgttacttttgtgggctttcccctaggagcgcgggggaaatggcaccaagataactttaaacttttgactgagcttggcctctccaaatcgaggcaagtgaaaatggcagagactttttccacagtagcgctcttttcatctgtggacattgtacatatgtttgccagtagggccagaaaatctatggttatgtgataataggctgccttctgcggggcttgccttctggccatgcccttcttctctcccttgcacctgtacctcttggtctttgaataaagcctgagtaggaaggaccggtaaaaaaaaaaaaaaaaaaaaaaaaaaaaaaacgttgactaaaaaaaaaaaaaaaaaaaaaaaaaaaaaaaaaaaaaaaaaaaaaaaaaaaaaaaaaaaaaaaaaaaaaa

SEQ ID NO: 11645 - DNA, 5407 bp, synthetic construct
  source 1..5407: mol_type = other DNA
ggtctagttacaactgggcatcgctgcagagatcgcacctcctcgtggtcccgctggtagcccttcgaagggtgactaagtcgatctctgccccaggtacggagccgttgggactcaccagtccaacgtaactcctgcctaaattcggtgaaacaaattcctcggtaaaaagccccatgggaactgcactaacaccgctcctgacgaagttcgccacgcgctacgagatgggtaccacgcctgaagaagtggcgaacacgctcaagcagacctgtttcaagggccaggtcaatgattcgcagatggtcgccctgctgatcgtggcagaccagtacaagcttaaccccttcaccaaggagttgtacgcattccccgacaagaacaacggcatcgtgccggttgttggtgtggatggctgggctcggatcatcaacgagaacccacagttcgatggcatggaattctcaatggaccagcagggaaccgaatgcacctgcaagatctatcggaaggaccgcagccatgccatcagcgcgactgagtacatggccgagtgcaagcggaacacccagccttggcagtcccatccgcgccggatgcttcgccacaaggcaatgatccagtgcgcacgcctcgcgttcgggttcgccggcatatacgaccaggacgaggccgagcggatcgttgaacgagacgtcactcccgcagagcagtacgaggacgtcagcgaggcgatctgcctgatcaaggactccccaacaatggaggacttgcaggcagcattcagcaatgcctggaaagcctataagacaaagggcgcgcgcgaccagcttacggcggccaaggaccagcggaagaaagaattgctggacgcccctatagacgttgaattcgaggagaccggcgatgatcgagcagcgtctggaggatctagcggaggatcctctggcagcgagacaccaggaacaagcgagtcagcaacaccagagagcagtggcggcagcagcggcggcagcagcatggcttcttgcccgaaacctggccccccggtttcagcaggggcaatgagtttggaaagtggactgaccacccactccgttctcgccatcgaacgtggtcccaattcgttggcaaattccggatcagactttgggggggggggtctggggctaccgttacgcctattgagggtatcggtcggcactcagacctcccgctccgactgggtagacctggtgtcctggagccacccaggacccacgtctaagtcccagcaggttgacctggtgtctttatttcctaaacaccgggttgacctgttatccaaaaacgaccaggtagacctggtggctcaatttttaccatctaaatttccccccaatttggcagaaaatgatttggctttgctggtgaacttagagttctacagatcggatttgcatgtgtatgagtgtgttcattttgctgcacattgggagggattaagtggtttgcctgaggtgtatgaacaacttgcaccacaaccgtgtgtgggagaaactttacattctagcctcccacgagacagtgaactgtttgtgcctgaagaggggagcagcgagaaggagagcgaggacgcgccaaaaacatctcctccgacgcctgggaaacatggtttggaacagactggggaggaaaaagtgatggtgactgttcctgacaaaaatccaccttgtccttgctgtggtacccgggtaaactctgtgttgaatctgattgaacatctgaaagtgtcacacgggaaaaggggggtttgttttcggtgtgcaaaatgtggaaaggaaaatagtaactatcacagtgttgtttgtcattttaagaaatgcaggggtccagagacggagaaagccccagctggggagtggatttgtgaggtatgcaacagagattttacaaccaaaattggcctgggacaacacaagagattggcacacccagcagtgagaaatcaggaaaggatcgttgcttcccaaccgaaagaaacatcaaatagaggtgctcacaaaaggtgctggacaaaggaggaggaagaattactaataagactggaggctcagttcgagggaaacaaaaatattaataagcttattgcagaacacataaccaccaaaacagctaagcagatcagtgacaaaaggcgattgctgtccagaaagccagcagaggagccacgtgaggagcctggaacgtgtcatcacaccaggagagcagctgcgagcctgagaacggagcctgagatgagtcatcacgcccaggcagaggacagagataatggacctgggagacgccctctgccaggcagggcagctgccggagggagaacaatggacgagataagacgccaccctgataagggcaacggacagcagagacccaccaagcaaaaatcagaagaacagctgcaggcttactataaaaagacactagaggaacgactttcagctggggcacttaacaccttcccccgagcattcaagcaggtaatggaaggccgggatataaagctagtaatcaatcagacagcgcaggactgcttcggatgcctggaatccataagccaaataagaacggcaacccgagataaaaaggacacggtgacccgggagaaacacccaaagaaaccttttcagaagtggatgaagaagagagcaatcaaaaaaggtaattatcttcggttccagcgtttattttatcttgatagagggaaactggctaaaatcattttagatgatattgaatgcttgtcttgtgacataccactcagtgaaatttattcggtttttaaaacaagatgggaaacaactggtagctttaaaagccttggggactttaaaacttacgggaaggctgacaacactgccttcagagaattaattacggctaaagaaattgagaaaaatgtgcaggaaatgagcaaaggctcggctcccggtccagacgggattactcttggggacgtcgtaaagatggatcccgagttttccctgaccatggagattttcaatttatggttaacaactggtaaaatcccggacatggtgagggggtgcagaaccgttttgattccaaaatcatcaaagccggatcgtttgaaagacattaataactggagacctatcacgatcggttccatcttgctgagactgttctccaggattgtaacagctaggctgagcaaagcgtgccccctgaacccaaggcaaagaggctttatcagagcggcgggatgctctgaaaacttaaaactcctgcaaactataatttggtcggccaaaagagaacacagaccactgggtgttgtattcgtggacatcgccaaggcttttgacaccgtaagccaccagcacatcattcatgctttgcagcaaagagaggtggatccccacatcgtcggtctggtgagcaatatgtacgagaacatcagtacgtatatcaccacaaagaggaacacacacacagacaaaatccagatccgggttggagtaaagcagggtgacccgatgtcgccccttttatttaacctggcaatggaccctctattatgcaagctggaagagagtggcaaaggataccaccgaggacagagcagcatcacagcgatggcatttgcagacgatctggttttgctgagcgactcctgggaaaatatgaatacaaatattagcatactggagaccttctgcaatctgaccggactcaaaacacaggggcaaaagtgccacggcttttacatcaagccgacaaaggactcttacaccatcaatgactgcgctgcctggactatcaacggcacacccctgaacatgatcgaccccggcgaatctgagaaatacctcggcctgcagtttgacccgtggattggaatagcaaggtccggtctctccacaaaactagatttttggcttcagcggatcgatcaagcaccacttaaacctctgcagaaaactgatattctcaaaacatacaccatccctcggctgatctacatagctgaccactcagaagtgaaaactgcactactcgaaacccttgaccagaagatccggacagcggtcaaggaatggcttcacctacctccgtgcacctgcgatgccatcctgtactcgagcacgagagacggcggtttgggcatcaccaaattggcaggactgatccccagcgtgcaggcccgtagactgcatcggatcgcacagtcatctgacgatacgatgaaatgcttcatggaaaaagagaaaatggaacagctgcataagaaattgtggattcaagctggaggggacagagagaacataccctcgatttgggaagcaccaccgtcgagtgaaccaccaaacaacgtgagcacaaattcggaatgggaagcaccgacccagaaacccaaatttccaaagccttgcaattggaggaaaaacgaattcaaaaaatggaccaaattggcatcccaaggccgcggaattgtaaattttgaaagagacaaaattagtaaccattggatccaatactacagacgcatacctcacaggaaactcctcactgcactacaactcagggccaacgtttaccccacgagagaatttctagccaggggtagacaagaccaatacatcaaggcgtgtaggcactgcgatgcggacattgaatcctgcgcccacatcatcggcaactgcccagtgacacaggacgcccgaatcaagaggcacaattacatctgcgaactgcttctcgaggaggcgaagaagaaggactgggtagtgttcaaggaaccgcacataagggattccaacaaggaactgtacaaacctgacctgatatttgtgaaggatgcccgtgcacttgtcgtggatgtgacagtacggtatgaagcagccaaatcatcgctggaggaagccgctgcagagaaagtgagaaagtacaaacacctggaaacggaagtaagacatctcacgaatgcaaaggacgttacttttgtgggctttcccctaggagcgcgggggaaatggcaccaagataactttaaacttttgactgagcttggcctctccaaatcgaggcaagtgaaaatggcagagactttttccacagtagcgctcttttcatctgtggacattgtacatatgtttgccagtagggccagaaaatctatggttatgtgataataggctgccttctgcggggcttgccttctggccatgcccttcttctctcccttgcacctgtacctcttggtctttgaataaagcctgagtaggaaggaccggtaaaaaaaaaaaaaaaaaaaaaaaaaaaaaaacgttgactaaaaaaaaaaaaaaaaaaaaaaaaaaaaaaaaaaaaaaaaaaaaaaaaaaaaaaaaaaaaaaaaaaaaaa

SEQ ID NO: 11646 - DNA, 4703 bp, synthetic construct
  source 1..4703: mol_type = other DNA
ggtctagttacaactgggcatcgctgcagagatcgcacctcctcgtggtcccgctggtagcccttcgaagggtgactaagtcgatctctgccccaggtacggagccgttgggactcaccagtccaacgtaactcctgcctaaattcggtgaaacaaattcctcggtaaaaagccccatggcttcttgcccgaaacctggccccccggtttcagcaggggcaatgagtttggaaagtggactgaccacccactccgttctcgccatcgaacgtggtcccaattcgttggcaaattccggatcagactttgggggggggggtctggggctaccgttacgcctattgagggtatcggtcggcactcagacctcccgctccgactgggtagacctggtgtcctggagccacccaggacccacgtctaagtcccagcaggttgacctggtgtctttatttcctaaacaccgggttgacctgttatccaaaaacgaccaggtagacctggtggctcaatttttaccatctaaatttccccccaatttggcagaaaatgatttggctttgctggtgaacttagagttctacagatcggatttgcatgtgtatgagtgtgttcataaggctgcacattgggagggattaagtggtttgcctgaggtgtatgaacaacttgcaccacaaccgtgtgtgggagaaactttacattctagcctcccacgagacagtgaactgtttgtgcctgaagaggggagcagcgagaaggagagcgaggacgcgccaaaaacatctcctccgacgcctgggaaacatggtttggaacagactggggaggaaaaagtgatggtgactgttcctgacaaaaatccaccttgtccttgctgtggtacccgggtaaactctgtgttgaatctgattgaacatctgaaagtgtcacacgggaaaaggggggtttgttttcggtgtgcaaaatgtggaaaggaaaatagtaactatcacagtgttgtttgtcattttaagaaatgcaggggtccagagacggagaaagccccagctggggagtggatttgtgaggtatgcaacagagattttacaaccaaaattggcctgggacaacacaagagattggcacacccagcagtgagaaatcaggaaaggatcgttgcttcccaaccgaaagaaacatcaaatagaggtgctcacaaaaggtgctggacaaaggaggaggaagaattactaataagactggaggctcagttcgagggaaacaaaaatattaataagcttattgcagaacacataaccaccaaaacagctaagcagatcagtgacaaaaggcgattgctgtccagaaagccagcagaggagccacgtgaggagcctggaacgtgtcatcacaccaggagagcagctgcgagcctgagaacggagcctgagatgagtcatcacgcccaggcagaggacagagataatggacctgggagacgccctctgccaggcagggcagctgccggagggagaacaatggacgagataagacgccaccctgataagggcaacggacagcagagacccaccaagcaaaaatcagaagaacagctgcaggcttactataaaaagacactagaggaacgactttcagctggggcacttaacaccttcccccgagcattcaagcaggtaatggaaggccgggatataaagctagtaatcaatcagacagcgcaggactgcttcggatgcctggaatccataagccaaataagaacggcaacccgagataaaaaggacacggtgacccgggagaaacacccaaagaaaccttttcagaagtggatgaagaagagagcaatcaaaaaaggtaattatcttcggttccagcgtttattttatcttgatagagggaaactggctaaaatcattttagatgatattgaatgcttgtcttgtgacataccactcagtgaaatttattcggtttttaaaacaagatgggaaacaactggtagctttaaaagccttggggactttaaaacttacgggaaggctgacaacactgccttcagagaattaattacggctaaagaaattgagaaaaatgtgcaggaaatgagcaaaggctcggctcccggtccagacgggattactcttggggacgtcgtaaagatggatcccgagttttcccggaccatggagattttcaatttatggttaacaactggtaaaatcccggacatggtgagggggtgcagaaccgttttgattccaaaatcaacccagccggatcgtttgaaagacattaataactggagacctatcacgatcggttccatcttgctgagactgttctccaggattatcacagctaggatgaccaaagcgtgccccctgaacccaaggcaaagaggctttatcagagcggcgggatgctctgaaaacttaaaactcctgcaaactataattaggtcggccaaaagcgaacacagaccactgggtgttgtattcgtggacatcgccaaggcttttgacaccgtaagccaccagcacatcctgcatgtgttgcagcaaagaggcgtggatccccacatcatcggtctggtgagcaatatgtacaaggacatcagtacgttcgtgaccacaaagaaggacacacacacagacaaaatccagatccgggttggagtaaagcagggtgacccgctgtcgccccttttatttaacctggcaatggaccctctattatgcaagctggaagagagtggcaacggattccaccgaggaggccacaccatcacagcgatggcatttgcagacgatctggttttgctgagcgactcctgggaaaatatggagaagaatattgagatactggaggccttctgcgacctgaccggactcaaaacacaggggcaaaagtgccacggcttttacatcaagccgacaaaggactcttacaccgtgaataactgcgctgcctggactatctacggcacacccctgaacatgatcaaccccggcgactctgagaaatacctcggcctgcagtttgacccgtggattggaatagcaaggtccggtctctccacaaaactagatttttggcttcagcggatcgatcaagcaccacttaaacctctgcagaaaactgatattctcaaaacatacaccatccctcggctgatctacatagctgaccactcagaagtgaaaactgcactactcgaaacccttgaccagaagatccggacagcggtcaaggaatggcttcacctacctccgtgcacctgcgatgccatcctgtactcgagcacgagagacggcggtttgggcatcaccaaattggcaggactgatccccagcgtgcaggcccgtagactgcatcggatcgcacagtcatctgacgatacgatgaaatgcttcatggaaaaagagaaaatggaacagctgcataagaaattgtggattcaagctggaggggacagagagaacataccctcgatttgggaagcaccaccgtcgagtgaaccaccaaacaacgtgagcacaaattcggaatgggaagcaccgacccagaaagataaatttccaaagccttgcaattggaggaaaaacgaattcaaaaaatggaccaaattggcatcccaaggccgcggaattgtaaattttgaaagagacaaaattagtaaccattggatccaatactacagacgcatacctcacaggaaactcctcactgcactacaactcagggccaacgtttaccccacgagagaatttctagccaggggtagacaagaccaatacatcaaggcgtgtaggcactgcgatgcggacattgaatcctgcgcccacatcatcggcaactgcccagtgacacaggacgcccgaatcaagaggcacaattacatctgcgaactgcttctcgaggaggcgaagaagaaggactgggtagtgttcaaggaaccgcacataagggattccaacaaggaactgtacaaacctgacctgatatttgtgaaggatgcccgtgcacttgtcgtggatgtgacagtacggtatgaagcagccaaatcatcgctggaggaagccgctgcagagaaagtgagaaagtacaaacacctggaaacggaagtaagacatctcacgaatgcaaaggacgttacttttgtgggctttcccctaggagcgcgggggaaatggcaccaagataactttaaacttttgactgagcttggcctctccaaatcgaggcaagtgaaaatggcagagactttttccacagtagcgctcttttcatctgtggacattgtacatatgtttgccagtagggccagaaaatctatggttatgtgataataggctgccttctgcggggcttgccttctggccatgcccttcttctctcccttgcacctgtacctcttggtctttgaataaagcctgagtaggaaggaccggtagacatgataagatacattgatgagtttggacaaaccacaactagaatgcagtgaaaaaaatgctttatttgtgaaatttgtgatgctattgctttatttgtaaccattataagctgcaataaacaagttaacaacaacaaaaaaaaaaaaaaaaaaaaaaaaaaaaaaacgttgactaaaaaaaaaaaaaaaaaaaaaaaaaaaaaaaaaaaaaaaaaaaaaaaaaaaaaaaaaaaaaaaaaaaaaa

SEQ ID NO: 11647 - DNA, 5183 bp, synthetic construct
  source 1..5183: mol_type = other DNA
ggtctagttacaactgggcatcgctgcagagatcgcacctcctcgtggtcccgctggtagcccttcgaagggtgactaagtcgatctctgccccaggtacggagccgttgggactcaccagtccaacgtaactcctgcctaaattcggtgaaacaaattcctcggtaaaaagccccatggcccctaagaaaaagcggaaggtgaatatcagcggctctagctgcggcagccccaacagcgccgacaccagcagcgacttcaaggacctgtggaccaagctgaaggaatgccacgaccgggaagtgcagggactccaggtgaaggtcaccaaactcaagcaagaaagaatcctggacgcccagagactggaagaattcttcaccaagaaccagcagctgagagagcagcagaaagtgctgcacgagacaatcaaggttctggaagatagactgcgggccggcctgtgcgacagatgcgccgtgaccgaggaacacatgcgcaaaaagcagcaggagttcgagaacattagacagcaaaatctgaaattgatcacagagctgatgaacgagagaaacacactgcaggaggagaacaagaagctgagcgagcagctgcaacagaagatcgagaatgatcagcaacaccaggccgctgagctggaatgtgaagaggacgtgatccccgacagcccaatcacagctttcagcttttctggcgtgaacagactgaggcggaaggaaaacccccacgtgcggtacatcgagcagacccataccaagctggaacacagcgtgtgtgccaacgagatgagaaaggtgtccaagtcctccacccatccccagcacaaccctaacgaaaatgagatcctggtggctgatacctacgaccagtctcagagccctatggccaaggcccacggcaccagctcttatacccctgataagagctccttcaacctggccaccgtggtggccgagacactgggcctgggcgtgcaggaggaaagcgagacacagggcccaatgagccctctgggagatgagctgtaccactgcctggaaggcaaccacaagaaacagccttttgagtccggctccgagactcctggaacaagcgagagcgctacacctgagggcagctatgaacaacttgcaccacaaccgtgtgtgggagaaactttacattctagcctcccacgagacagtgaactgtttgtgcctgaagaggggagcagcgagaaggagagcgaggacgcgccaaaaacatctcctccgacgcctgggaaacatggtttggaacagactggggaggaaaaagtgatggtgactgttcctgacaaaaatccaccttgtccttgctgtggtacccgggtaaactctgtgttgaatctgattgaacatctgaaagtgtcacacgggaaaaggggggtttgttttcggtgtgcaaaatgtggaaaggaaaatagtaactatcacagtgttgtttgtcattttaagaaatgcaggggtccagagacggagaaagccccagctggggagtggatttgtgaggtatgcaacagagattttacaaccaaaattggcctgggacaacacaagagattggcacacccagcagtgagaaatcaggaaaggatcgttgcttcccaaccgaaagaaacatcaaatagaggtgctcacaaaaggtgctggacaaaggaggaggaagaattactaataagactggaggctcagttcgagggaaacaaaaatattaataagcttattgcagaacacataaccaccaaaacagctaagcagatcagtgacaaaaggcgattgctgtccagaaagccagcagaggagccacgtgaggagcctggaacgtgtcatcacaccaggagagcagctgcgagcctgagaacggagcctgagatgagtcatcacgcccaggcagaggacagagataatggacctgggagacgccctctgccaggcagggcagctgccggagggagaacaatggacgagataagacgccaccctgataagggcaacggacagcagagacccaccaagcaaaaatcagaagaacagctgcaggcttactataaaaagacactagaggaacgactttcagctggggcacttaacaccttcccccgagcattcaagcaggtaatggaaggccgggatataaagctagtaatcaatcagacagcgcaggactgcttcggatgcctggaatccataagccaaataagaacggcaacccgagataaaaaggacacggtgacccgggagaaacacccaaagaaaccttttcagaagtggatgaagaagagagcaatcaaaaaaggtaattatcttcggttccagcgtttattttatcttgatagagggaaactggctaaaatcattttagatgatattgaatgcttgtcttgtgacataccactcagtgaaatttattcggtttttaaaacaagatgggaaacaactggtagctttaaaagccttggggactttaaaacttacgggaaggctgacaacactgccttcagagaattaattacggctaaagaaattgagaaaaatgtgcaggaaatgagcaaaggctcggctcccggtccagacgggattactcttggggacgtcgtaaagatggatcccgagttttcccggaccatggagattttcaatttatggttaacaactggtaaaatcccggacatggtgagggggtgcagaaccgttttgattccaaaatcaacccagccggatcgtttgaaagacattaataactggagacctatcacgatcggttccatcttgctgagactgttctccaggattatcacagctaggatgaccaaagcgtgccccctgaacccaaggcaaagaggctttatcagagcggcgggatgctctgaaaacttaaaactcctgcaaactataattaggtcggccaaaagcgaacacagaccactgggtgttgtattcgtggacatcgccaaggcttttgacaccgtaagccaccagcacatcctgcatgtgttgcagcaaagaggcgtggatccccacatcatcggtctggtgagcaatatgtacaaggacatcagtacgttcgtgaccacaaagaaggacacacacacagacaaaatccagatccgggttggagtaaagcagggtgacccgctgtcgccccttttatttaacctggcaatggaccctctattatgcaagctggaagagagtggcaacggattccaccgaggaggccacaccatcacagcgatggcatttgcagacgatctggttttgctgagcgactcctgggaaaatatggagaagaatattgagatactggaggccttctgcgacctgaccggactcaaaacacaggggcaaaagtgccacggcttttacatcaagccgacaaaggactcttacaccgtgaataactgcgctgcctggactatctacggcacacccctgaacatgatcaaccccggcgactctgagaaatacctcggcctgcagtttgacccgtggattggaatagcaaggtccggtctctccacaaaactagatttttggcttcagcggatcgatcaagcaccacttaaacctctgcagaaaactgatattctcaaaacatacaccatccctcggctgatctacatagctgaccactcagaagtgaaaactgcactactcgaaacccttgaccagaagatccggacagcggtcaaggaatggcttcacctacctccgtgcacctgcgatgccatcctgtactcgagcacgagagacggcggtttgggcatcaccaaattggcaggactgatccccagcgtgcaggcccgtagactgcatcggatcgcacagtcatctgacgatacgatgaaatgcttcatggaaaaagagaaaatggaacagctgcataagaaattgtggattcaagctggaggggacagagagaacataccctcgatttgggaagcaccaccgtcgagtgaaccaccaaacaacgtgagcacaaattcggaatgggaagcaccgacccagaaagataaatttccaaagccttgcaattggaggaaaaacgaattcaaaaaatggaccaaattggcatcccaaggccgcggaattgtaaattttgaaagagacaaaattagtaaccattggatccaatactacagacgcatacctcacaggaaactcctcactgcactacaactcagggccaacgtttaccccacgagagaatttctagccaggggtagacaagaccaatacatcaaggcgtgtaggcactgcgatgcggacattgaatcctgcgcccacatcatcggcaactgcccagtgacacaggacgcccgaatcaagaggcacaattacatctgcgaactgcttctcgaggaggcgaagaagaaggactgggtagtgttcaaggaaccgcacataagggattccaacaaggaactgtacaaacctgacctgatatttgtgaaggatgcccgtgcacttgtcgtggatgtgacagtacggtatgaagcagccaaatcatcgctggaggaagccgctgcagagaaagtgagaaagtacaaacacctggaaacggaagtaagacatctcacgaatgcaaaggacgttacttttgtgggctttcccctaggagcgcgggggaaatggcaccaagataactttaaacttttgactgagcttggcctctccaaatcgaggcaagtgaaaatggcagagactttttccacagtagcgctcttttcatctgtggacattgtacatatgtttgccagtagggccagaaaatctatggttatgtgataataggctgccttctgcggggcttgccttctggccatgcccttcttctctcccttgcacctgtacctcttggtctttgaataaagcctgagtaggaaggaccggtagacatgataagatacattgatgagtttggacaaaccacaactagaatgcagtgaaaaaaatgctttatttgtgaaatttgtgatgctattgctttatttgtaaccattataagctgcaataaacaagttaacaacaacaaaaaaaaaaaaaaaaaaaaaaaaaaaaaaacgttgactaaaaaaaaaaaaaaaaaaaaaaaaaaaaaaaaaaaaaaaaaaaaaaaaaaaaaaaaaaaaaaaaaaaaaa

SEQ ID NO: 11648 - DNA, 5156 bp, synthetic construct
  source 1..5156: mol_type = other DNA
ggtctagttacaactgggcatcgctgcagagatcgcacctcctcgtggtcccgctggtagcccttcgaagggtgactaagtcgatctctgccccaggtacggagccgttgggactcaccagtccaacgtaactcctgcctaaattcggtgaaacaaattcctcggtaaaaagccccatggcttcttgcccgaaacctggccccccggtttcagcaggggcaatgagtttggaaagtggactgaccacccactccgttctcgccatcgaacgtggtcccaattcgttggcaaattccggatcagactttgggggggggggtctggggctaccgttacgcctattgagggtatcggtcggcactcagacctcccgctccgactgggtagacctggtgtcctggagccacccaggacccacgtctaagtcccagcaggttgacctggtgtctttatttcctaaacaccgggttgacctgttatccaaaaacgaccaggtagacctggtggctcaatttttaccatctaaatttccccccaatttggcagaaaatgatttggctttgctggtgaacttagagttctacagatcggatttgcatgtgtatgagtgtgttcattttgctgcacattgggagggattaagtggtttgcctgaggtgtatgaacaacttgcaccacaaccgtgtgtgggagaaactttacattctagcctcccacgagacagtgaactgtttgtgcctgaagaggggagcagcgagaaggagagcgaggacgcgccaaaaacatctcctccgacgcctgggaaacatggtttggaacagactggggaggaaaaagtgatggtgactgttcctgacaaaaatccaccttgtccttgctgtggtacccgggtaaactctgtgttgaatctgattgaacatctgaaagtgtcacacgggaaaaggggggtttgttttcggtgtgcaaaatgtggaaaggaaaatagtaactatcacagtgttgtttgtcattttaagaaatgcaggggtccagagacggagaaagccccagctggggagtggatttgtgaggtatgcaacagagattttacaaccaaaattggcctgggacaacacaagagattggcacacccagcagtgagaaatcaggaaaggatcgttgcttcccaaccgaaagaaacatcaaatagaggtgctcacaaaaggtgctggacaaaggaggaggaagaattactaataagactggaggctcagttcgagggaaacaaaaatattaataagcttattgcagaacacataaccaccaaaacagctaagcagatcagtgacaaaaggcgattgctgtccagaaagccagcagaggagccacgtgaggagcctggaacgtgtcatcacaccaggagagcagctgcgagcctgagaacggagcctgagatgagtcatcacgcccaggcagaggacagagataatggacctgggagacgccctctgccaggcagggcagctgccggagggagaacaatggacgagataagacgccaccctgataagggcaacggacagcagagacccaccaagcaaaaatcagaagaacagctgcaggcttactataaaaagacactagaggaacgactttcagctggggcacttaacaccttcccccgagcattcaagcaggtaatggaaggccgggatataaagctagtaatcaatcagacagcgcaggactgcttcggatgcctggaatccataagccaaataagaacggcaacccgagataaaaaggacacggtgacccgggagaaacacccaaagaaaccttttcagaagtggatgaagaagagagcaatcaaaaaaggtaattatcttcggttccagcgtttattttatcttgatagagggaaactggctaaaatcattttagatgatattgaatgcttgtcttgtgacataccactcagtgaaatttattcggtttttaaaacaagatgggaaacaactggtagctttaaaagccttggggactttaaaacttacgggaaggctgacaacactgccttcagagaattaattacggctaaagaaattgagaaaaatgtgcaggaaatgagcaaaggctcggctcccggtccagacgggattactcttggggacgtcgtaaagatggatcccgagttttcccggaccatggagattttcaatttatggttaacaactggtaaaatcccggacatggtgagggggtgcagaaccgttttgattgacacttcaaacctcatggagcagatcctttcatctgacaacctcaacagggcttacttgcaagtggttcgcaacaaaggggctgagggcgtggacggaatgaagtacacggagttgaaggagcatctcgcgaagaacggagagacaataaagggacaactcagaactgctgcttataagcctcaaccggcgagacgggtagagatacccaagcccgacggtggcgtgaggaacctcggcgtccctacagtcacggaccgcttcatccaacaagccatcgctcaagtcctcactccaatctacgaggagcaattccacgaccattcctacgggttccggccaaaccggtgcgcccaacaagctatacttacagctttgaacataatgaacgacggaaacgactggattgtcgacatagatctcgagaagttcttcgacacagtcaatcatgacaagttgatgactctcatcgggcgcaccattgcagacggcgacgtaatctccattgttcgaaagtacctcgtgtccggaatcatgatagacgacgagtacgaggactcaatcgtgggaaccccacaaggcggcaacttgtctccccttcttgcaaacatcatgcttaacgagttggataaggaaatggaagctgcaggccttaacttcgtcaggtacgcagacgactgtatcatcatggtgggatctgagatgtctgccaaccgggtcatgaggaacatctcaagatttattgaggagaagttggggcttaaggtgaatatgacgaagtctaaggtggaccggcccagcggacttaagtatctcggattcggcttttacttcgaccccagagctcatcaattcaaggccaagcctcacgcgaagagtgtcgcgaagtttaagaagagaatgaaggagctcacgtgcaggagttggggcgtgtctaactcctacaaggtcgagaagctcaatcaattgatccgtggctggattaattactttaagatcgggagtatgaaaacactctgtaaggaacttgactcacgcatcagatacaggctccggatgtgcatctggaagcaatggaaaactccacaaaaccaggagaagaacttggtaaagctcgggatcgaccgcaacacggccaggcgggtggcgtacactggcaagcgaatcgcctacgtctgtaacaagggagctgtgaacgtcgcgataagtaacaagaggctcgcttcattccagtttgacccgtggattggaatagcaaggtccggtctctccacaaaactagatttttggcttcagcggatcgatcaagcaccacttaaacctctgcagaaaactgatattctcaaaacatacaccatccctcggctgatctacatagctgaccactcagaagtgaaaactgcactactcgaaacccttgaccagaagatccggacagcggtcaaggaatggcttcacctacctccgtgcacctgcgatgccatcctgtactcgagcacgagagacggcggtttgggcatcaccaaattggcaggactgatccccagcgtgcaggcccgtagactgcatcggatcgcacagtcatctgacgatacgatgaaatgcttcatggaaaaagagaaaatggaacagctgcataagaaattgtggattcaagctggaggggacagagagaacataccctcgatttgggaagcaccaccgtcgagtgaaccaccaaacaacgtgagcacaaattcggaatgggaagcaccgacccagaaagataaatttccaaagccttgcaattggaggaaaaacgaattcaaaaaatggaccaaattggcatcccaaggccgcggaattgtaaattttgaaagagacaaaattagtaaccattggatccaatactacagacgcatacctcacaggaaactcctcactgcactacaactcagggccaacgtttaccccacgagagaatttctagccaggggtagacaagaccaatacatcaaggcgtgtaggcactgcgatgcggacattgaatcctgcgcccacatcatcggcaactgcccagtgacacaggacgcccgaatcaagaggcacaattacatctgcgaactgcttctcgaggaggcgaagaagaaggactgggtagtgttcaaggaaccgcacataagggattccaacaaggaactgtacaaacctgacctgatatttgtgaaggatgcccgtgcacttgtcgtggatgtgacagtacggtatgaagcagccaaatcatcgctggaggaagccgctgcagagaaagtgagaaagtacaaacacctggaaacggaagtaagacatctcacgaatgcaaaggacgttacttttgtgggctttcccctaggagcgcgggggaaatggcaccaagataactttaaacttttgactgagcttggcctctccaaatcgaggcaagtgaaaatggcagagactttttccacagtagcgctcttttcatctgtggacattgtacatatgtttgccagtagggccagaaaatctatggttatgtgataataggctgccttctgcggggcttgccttctggccatgcccttcttctctcccttgcacctgtacctcttggtctttgaataaagcctgagtaggaaggaccggtagacatgataagatacattgatgagtttggacaaaccacaactagaatgcagtgaaaaaaatgctttatttgtgaaatttgtgatgctattgctttatttgtaaccattataagctgcaataaacaagttaacaacaacaaaaaaaaaaaaaaaaaaaaaaaaaaaaaaacgttgactaaaaaaaaaaaaaaaaaaaaaaaaaaaaaaaaaaaaaaaaaaaaaaaaaaaaaaaaaaaaaaaaaaaaaa

SEQ ID NO: 11649 - DNA, 5156 bp, synthetic construct
  source 1..5156: mol_type = other DNA
ggtctagttacaactgggcatcgctgcagagatcgcacctcctcgtggtcccgctggtagcccttcgaagggtgactaagtcgatctctgccccaggtacggagccgttgggactcaccagtccaacgtaactcctgcctaaattcggtgaaacaaattcctcggtaaaaagccccatggcttcttgcccgaaacctggccccccggtttcagcaggggcaatgagtttggaaagtggactgaccacccactccgttctcgccatcgaacgtggtcccaattcgttggcaaattccggatcagactttgggggggggggtctggggctaccgttacgcctattgagggtatcggtcggcactcagacctcccgctccgactgggtagacctggtgtcctggagccacccaggacccacgtctaagtcccagcaggttgacctggtgtctttatttcctaaacaccgggttgacctgttatccaaaaacgaccaggtagacctggtggctcaatttttaccatctaaatttccccccaatttggcagaaaatgatttggctttgctggtgaacttagagttctacagatcggatttgcatgtgtatgagtgtgttcataaggctgcacattgggagggattaagtggtttgcctgaggtgtatgaacaacttgcaccacaaccgtgtgtgggagaaactttacattctagcctcccacgagacagtgaactgtttgtgcctgaagaggggagcagcgagaaggagagcgaggacgcgccaaaaacatctcctccgacgcctgggaaacatggtttggaacagactggggaggaaaaagtgatggtgactgttcctgacaaaaatccaccttgtccttgctgtggtacccgggtaaactctgtgttgaatctgattgaacatctgaaagtgtcacacgggaaaaggggggtttgttttcggtgtgcaaaatgtggaaaggaaaatagtaactatcacagtgttgtttgtcattttaagaaatgcaggggtccagagacggagaaagccccagctggggagtggatttgtgaggtatgcaacagagattttacaaccaaaattggcctgggacaacacaagagattggcacacccagcagtgagaaatcaggaaaggatcgttgcttcccaaccgaaagaaacatcaaatagaggtgctcacaaaaggtgctggacaaaggaggaggaagaattactaataagactggaggctcagttcgagggaaacaaaaatattaataagcttattgcagaacacataaccaccaaaacagctaagcagatcagtgacaaaaggcgattgctgtccagaaagccagcagaggagccacgtgaggagcctggaacgtgtcatcacaccaggagagcagctgcgagcctgagaacggagcctgagatgagtcatcacgcccaggcagaggacagagataatggacctgggagacgccctctgccaggcagggcagctgccggagggagaacaatggacgagataagacgccaccctgataagggcaacggacagcagagacccaccaagcaaaaatcagaagaacagctgcaggcttactataaaaagacactagaggaacgactttcagctggggcacttaacaccttcccccgagcattcaagcaggtaatggaaggccgggatataaagctagtaatcaatcagacagcgcaggactgcttcggatgcctggaatccataagccaaataagaacggcaacccgagataaaaaggacacggtgacccgggagaaacacccaaagaaaccttttcagaagtggatgaagaagagagcaatcaaaaaaggtaattatcttcggttccagcgtttattttatcttgatagagggaaactggctaaaatcattttagatgatattgaatgcttgtcttgtgacataccactcagtgaaatttattcggtttttaaaacaagatgggaaacaactggtagctttaaaagccttggggactttaaaacttacgggaaggctgacaacactgccttcagagaattaattacggctaaagaaattgagaaaaatgtgcaggaaatgagcaaaggctcggctcccggtccagacgggattactcttggggacgtcgtaaagatggatcccgagttttcccggaccatggagattttcaatttatggttaacaactggtaaaatcccggacatggtgagggggtgcagaaccgttttgattgacacttcaaacctcatggagcagatcctttcatctgacaacctcaacagggcttacttgcaagtggttcgcaacaaaggggctgagggcgtggacggaatgaagtacacggagttgaaggagcatctcgcgaagaacggagagacaataaagggacaactcagaactgctgcttataagcctcaaccggcgagacgggtagagatacccaagcccgacggtggcgtgaggaacctcggcgtccctacagtcacggaccgcttcatccaacaagccatcgctcaagtcctcactccaatctacgaggagcaattccacgaccattcctacgggttccggccaaaccggtgcgcccaacaagctatacttacagctttgaacataatgaacgacggaaacgactggattgtcgacatagatctcgagaagttcttcgacacagtcaatcatgacaagttgatgactctcatcgggcgcaccattgcagacggcgacgtaatctccattgttcgaaagtacctcgtgtccggaatcatgatagacgacgagtacgaggactcaatcgtgggaaccccacaaggcggcaacttgtctccccttcttgcaaacatcatgcttaacgagttggataaggaaatggaagctgcaggccttaacttcgtcaggtacgcagacgactgtatcatcatggtgggatctgagatgtctgccaaccgggtcatgaggaacatctcaagatttattgaggagaagttggggcttaaggtgaatatgacgaagtctaaggtggaccggcccagcggacttaagtatctcggattcggcttttacttcgaccccagagctcatcaattcaaggccaagcctcacgcgaagagtgtcgcgaagtttaagaagagaatgaaggagctcacgtgcaggagttggggcgtgtctaactcctacaaggtcgagaagctcaatcaattgatccgtggctggattaattactttaagatcgggagtatgaaaacactctgtaaggaacttgactcacgcatcagatacaggctccggatgtgcatctggaagcaatggaaaactccacaaaaccaggagaagaacttggtaaagctcgggatcgaccgcaacacggccaggcgggtggcgtacactggcaagcgaatcgcctacgtctgtaacaagggagctgtgaacgtcgcgataagtaacaagaggctcgcttcattccagtttgacccgtggattggaatagcaaggtccggtctctccacaaaactagatttttggcttcagcggatcgatcaagcaccacttaaacctctgcagaaaactgatattctcaaaacatacaccatccctcggctgatctacatagctgaccactcagaagtgaaaactgcactactcgaaacccttgaccagaagatccggacagcggtcaaggaatggcttcacctacctccgtgcacctgcgatgccatcctgtactcgagcacgagagacggcggtttgggcatcaccaaattggcaggactgatccccagcgtgcaggcccgtagactgcatcggatcgcacagtcatctgacgatacgatgaaatgcttcatggaaaaagagaaaatggaacagctgcataagaaattgtggattcaagctggaggggacagagagaacataccctcgatttgggaagcaccaccgtcgagtgaaccaccaaacaacgtgagcacaaattcggaatgggaagcaccgacccagaaagataaatttccaaagccttgcaattggaggaaaaacgaattcaaaaaatggaccaaattggcatcccaaggccgcggaattgtaaattttgaaagagacaaaattagtaaccattggatccaatactacagacgcatacctcacaggaaactcctcactgcactacaactcagggccaacgtttaccccacgagagaatttctagccaggggtagacaagaccaatacatcaaggcgtgtaggcactgcgatgcggacattgaatcctgcgcccacatcatcggcaactgcccagtgacacaggacgcccgaatcaagaggcacaattacatctgcgaactgcttctcgaggaggcgaagaagaaggactgggtagtgttcaaggaaccgcacataagggattccaacaaggaactgtacaaacctgacctgatatttgtgaaggatgcccgtgcacttgtcgtggatgtgacagtacggtatgaagcagccaaatcatcgctggaggaagccgctgcagagaaagtgagaaagtacaaacacctggaaacggaagtaagacatctcacgaatgcaaaggacgttacttttgtgggctttcccctaggagcgcgggggaaatggcaccaagataactttaaacttttgactgagcttggcctctccaaatcgaggcaagtgaaaatggcagagactttttccacagtagcgctcttttcatctgtggacattgtacatatgtttgccagtagggccagaaaatctatggttatgtgataataggctgccttctgcggggcttgccttctggccatgcccttcttctctcccttgcacctgtacctcttggtctttgaataaagcctgagtaggaaggaccggtagacatgataagatacattgatgagtttggacaaaccacaactagaatgcagtgaaaaaaatgctttatttgtgaaatttgtgatgctattgctttatttgtaaccattataagctgcaataaacaagttaacaacaacaaaaaaaaaaaaaaaaaaaaaaaaaaaaaaacgttgactaaaaaaaaaaaaaaaaaaaaaaaaaaaaaaaaaaaaaaaaaaaaaaaaaaaaaaaaaaaaaaaaaaaaaa

SEQ ID NO: 11650 - DNA, 5636 bp, synthetic construct
  source 1..5636: mol_type = other DNA
ggtctagttacaactgggcatcgctgcagagatcgcacctcctcgtggtcccgctggtagcccttcgaagggtgactaagtcgatctctgccccaggtacggagccgttgggactcaccagtccaacgtaactcctgcctaaattcggtgaaacaaattcctcggtaaaaagccccatggcccctaagaaaaagcggaaggtgaatatcagcggctctagctgcggcagccccaacagcgccgacaccagcagcgacttcaaggacctgtggaccaagctgaaggaatgccacgaccgggaagtgcagggactccaggtgaaggtcaccaaactcaagcaagaaagaatcctggacgcccagagactggaagaattcttcaccaagaaccagcagctgagagagcagcagaaagtgctgcacgagacaatcaaggttctggaagatagactgcgggccggcctgtgcgacagatgcgccgtgaccgaggaacacatgcgcaaaaagcagcaggagttcgagaacattagacagcaaaatctgaaattgatcacagagctgatgaacgagagaaacacactgcaggaggagaacaagaagctgagcgagcagctgcaacagaagatcgagaatgatcagcaacaccaggccgctgagctggaatgtgaagaggacgtgatccccgacagcccaatcacagctttcagcttttctggcgtgaacagactgaggcggaaggaaaacccccacgtgcggtacatcgagcagacccataccaagctggaacacagcgtgtgtgccaacgagatgagaaaggtgtccaagtcctccacccatccccagcacaaccctaacgaaaatgagatcctggtggctgatacctacgaccagtctcagagccctatggccaaggcccacggcaccagctcttatacccctgataagagctccttcaacctggccaccgtggtggccgagacactgggcctgggcgtgcaggaggaaagcgagacacagggcccaatgagccctctgggagatgagctgtaccactgcctggaaggcaaccacaagaaacagccttttgagtccggctccgagactcctggaacaagcgagagcgctacacctgagggcagctatgaacaacttgcaccacaaccgtgtgtgggagaaactttacattctagcctcccacgagacagtgaactgtttgtgcctgaagaggggagcagcgagaaggagagcgaggacgcgccaaaaacatctcctccgacgcctgggaaacatggtttggaacagactggggaggaaaaagtgatggtgactgttcctgacaaaaatccaccttgtccttgctgtggtacccgggtaaactctgtgttgaatctgattgaacatctgaaagtgtcacacgggaaaaggggggtttgttttcggtgtgcaaaatgtggaaaggaaaatagtaactatcacagtgttgtttgtcattttaagaaatgcaggggtccagagacggagaaagccccagctggggagtggatttgtgaggtatgcaacagagattttacaaccaaaattggcctgggacaacacaagagattggcacacccagcagtgagaaatcaggaaaggatcgttgcttcccaaccgaaagaaacatcaaatagaggtgctcacaaaaggtgctggacaaaggaggaggaagaattactaataagactggaggctcagttcgagggaaacaaaaatattaataagcttattgcagaacacataaccaccaaaacagctaagcagatcagtgacaaaaggcgattgctgtccagaaagccagcagaggagccacgtgaggagcctggaacgtgtcatcacaccaggagagcagctgcgagcctgagaacggagcctgagatgagtcatcacgcccaggcagaggacagagataatggacctgggagacgccctctgccaggcagggcagctgccggagggagaacaatggacgagataagacgccaccctgataagggcaacggacagcagagacccaccaagcaaaaatcagaagaacagctgcaggcttactataaaaagacactagaggaacgactttcagctggggcacttaacaccttcccccgagcattcaagcaggtaatggaaggccgggatataaagctagtaatcaatcagacagcgcaggactgcttcggatgcctggaatccataagccaaataagaacggcaacccgagataaaaaggacacggtgacccgggagaaacacccaaagaaaccttttcagaagtggatgaagaagagagcaatcaaaaaaggtaattatcttcggttccagcgtttattttatcttgatagagggaaactggctaaaatcattttagatgatattgaatgcttgtcttgtgacataccactcagtgaaatttattcggtttttaaaacaagatgggaaacaactggtagctttaaaagccttggggactttaaaacttacgggaaggctgacaacactgccttcagagaattaattacggctaaagaaattgagaaaaatgtgcaggaaatgagcaaaggctcggctcccggtccagacgggattactcttggggacgtcgtaaagatggatcccgagttttcccggaccatggagattttcaatttatggttaacaactggtaaaatcccggacatggtgagggggtgcagaaccgttttgattgacacttcaaacctcatggagcagatcctttcatctgacaacctcaacagggcttacttgcaagtggttcgcaacaaaggggctgagggcgtggacggaatgaagtacacggagttgaaggagcatctcgcgaagaacggagagacaataaagggacaactcagaactgctgcttataagcctcaaccggcgagacgggtagagatacccaagcccgacggtggcgtgaggaacctcggcgtccctacagtcacggaccgcttcatccaacaagccatcgctcaagtcctcactccaatctacgaggagcaattccacgaccattcctacgggttccggccaaaccggtgcgcccaacaagctatacttacagctttgaacataatgaacgacggaaacgactggattgtcgacatagatctcgagaagttcttcgacacagtcaatcatgacaagttgatgactctcatcgggcgcaccattgcagacggcgacgtaatctccattgttcgaaagtacctcgtgtccggaatcatgatagacgacgagtacgaggactcaatcgtgggaaccccacaaggcggcaacttgtctccccttcttgcaaacatcatgcttaacgagttggataaggaaatggaagctgcaggccttaacttcgtcaggtacgcagacgactgtatcatcatggtgggatctgagatgtctgccaaccgggtcatgaggaacatctcaagatttattgaggagaagttggggcttaaggtgaatatgacgaagtctaaggtggaccggcccagcggacttaagtatctcggattcggcttttacttcgaccccagagctcatcaattcaaggccaagcctcacgcgaagagtgtcgcgaagtttaagaagagaatgaaggagctcacgtgcaggagttggggcgtgtctaactcctacaaggtcgagaagctcaatcaattgatccgtggctggattaattactttaagatcgggagtatgaaaacactctgtaaggaacttgactcacgcatcagatacaggctccggatgtgcatctggaagcaatggaaaactccacaaaaccaggagaagaacttggtaaagctcgggatcgaccgcaacacggccaggcgggtggcgtacactggcaagcgaatcgcctacgtctgtaacaagggagctgtgaacgtcgcgataagtaacaagaggctcgcttcattccagtttgacccgtggattggaatagcaaggtccggtctctccacaaaactagatttttggcttcagcggatcgatcaagcaccacttaaacctctgcagaaaactgatattctcaaaacatacaccatccctcggctgatctacatagctgaccactcagaagtgaaaactgcactactcgaaacccttgaccagaagatccggacagcggtcaaggaatggcttcacctacctccgtgcacctgcgatgccatcctgtactcgagcacgagagacggcggtttgggcatcaccaaattggcaggactgatccccagcgtgcaggcccgtagactgcatcggatcgcacagtcatctgacgatacgatgaaatgcttcatggaaaaagagaaaatggaacagctgcataagaaattgtggattcaagctggaggggacagagagaacataccctcgatttgggaagcaccaccgtcgagtgaaccaccaaacaacgtgagcacaaattcggaatgggaagcaccgacccagaaagataaatttccaaagccttgcaattggaggaaaaacgaattcaaaaaatggaccaaattggcatcccaaggccgcggaattgtaaattttgaaagagacaaaattagtaaccattggatccaatactacagacgcatacctcacaggaaactcctcactgcactacaactcagggccaacgtttaccccacgagagaatttctagccaggggtagacaagaccaatacatcaaggcgtgtaggcactgcgatgcggacattgaatcctgcgcccacatcatcggcaactgcccagtgacacaggacgcccgaatcaagaggcacaattacatctgcgaactgcttctcgaggaggcgaagaagaaggactgggtagtgttcaaggaaccgcacataagggattccaacaaggaactgtacaaacctgacctgatatttgtgaaggatgcccgtgcacttgtcgtggatgtgacagtacggtatgaagcagccaaatcatcgctggaggaagccgctgcagagaaagtgagaaagtacaaacacctggaaacggaagtaagacatctcacgaatgcaaaggacgttacttttgtgggctttcccctaggagcgcgggggaaatggcaccaagataactttaaacttttgactgagcttggcctctccaaatcgaggcaagtgaaaatggcagagactttttccacagtagcgctcttttcatctgtggacattgtacatatgtttgccagtagggccagaaaatctatggttatgtgataataggctgccttctgcggggcttgccttctggccatgcccttcttctctcccttgcacctgtacctcttggtctttgaataaagcctgagtaggaaggaccggtagacatgataagatacattgatgagtttggacaaaccacaactagaatgcagtgaaaaaaatgctttatttgtgaaatttgtgatgctattgctttatttgtaaccattataagctgcaataaacaagttaacaacaacaaaaaaaaaaaaaaaaaaaaaaaaaaaaaaacgttgactaaaaaaaaaaaaaaaaaaaaaaaaaaaaaaaaaaaaaaaaaaaaaaaaaaaaaaaaaaaaaaaaaaaaaa

SEQ ID NO: 11651 - DNA, 4564 bp, synthetic construct
  source 1..4564: mol_type = other DNA
ggtctagttacaactgggcatcgctgcagagatcgcacctcctcgtggtcccgctggtagcccttcgaagggtgactaagtcgatctctgccccaggtacggagccgttgggactcaccagtccaacgtaactcctgcctaaattcggtgaaacaaattcctcggtaaaaagccccatggcttcttgcccgaaacctggccccccggtttcagcaggggcaatgagtttggaaagtggactgaccacccactccgttctcgccatcgaacgtggtcccaattcgttggcaaattccggatcagactttgggggggggggtctggggctaccgttacgcctattgagggtatcggtcggcactcagacctcccgctccgactgggtagacctggtgtcctggagccacccaggacccacgtctaagtcccagcaggttgacctggtgtctttatttcctaaacaccgggttgacctgttatccaaaaacgaccaggtagacctggtggctcaatttttaccatctaaatttccccccaatttggcagaaaatgatttggctttgctggtgaacttagagttctacagatcggatttgcatgtgtatgagggcgttcataaggctgcacattgggagggattaagtggtttgcctgaggtgtatgaacaacttgcaccacaaccgtgtgtgggagaaactttacattctagcctcccacgagacagtgaactgtttgtgcctgaagaggggagcagcgagaaggagagcgaggacgcgccaaaaacatctcctccgacgcctgggaaacatggtaagaggcagactggggaggaaaaagtgatggtgactgttcctgacaaaaatccaccttgtccttgctgtggtacccgggtaaactctgtgttgaatctgattgaacatctgaaagtgtcacacgggaaaaggagggtttgttttcggtgtgcaaaatgtggaaaggaaaatagtaactatcacagtgttgtttgtcattttaagaaatgcaggggtccagagacggagaaagccccagctggggagtggatttgtgaggtatgcaacagagattttacaaccaaaattggcctgggacaacacaagagattggcacacccagcagtgagaaatcaggaaaggatcgttgcttcccaaccgaaagaaacatcaaatagaggtgctcacaaaaggtgctggacaaaggaggaggaagaattactaataagactggaggctcagttcgagggaaacaaaaatattaataagcttattgcagaacacataaccaccaaaacagctaagcagatcagtgacaaaaggcgattgctgtccagaaagccagcagaggagccacgtgaggagcctggaacgtgtcatcacaccaggagagcagctgcgagcctgagaacggagcctgagatgagtcatcacgcccaggcagaggacagagataatggacctgggagacgccctctgccaggcagggcagctgccggagggagaacaatggacgagataagacgccaccctgataagggcaacggacagcagagacccaccaagcaaaaatcagaagaacagctgcaggcttactataaaaagacactagaggaacgactttcagctggggcacttaacaccttcccccgagcattcaagcaggtaatggaaggccgggatataaagctagtaatcaatcagacagcgcaggactgcttcggatgcctggaatccataagccaaataagaacggcaacccgagataaaaagtacacggtgacccgggagaaacacccaaagaaaccttttcagaagtggatgaagaagagagcaatcaaaaaaggtaattatcttcggttccagcgtttattttatcttgatagagggaaactggctaaaatcattttagatgatattgaatgcttgtcttgtgacataccactcagtgaaatttattcggtttttaaaacaagatgggaaacaactggtagctttaaaagccttggggactttaaaacttacgggaaggctgacaacactgccttcagagaattaattacggctaaagaaattgagaaaaatgtgcaggaaatgagcaaaggctcggctcccggtccagacgggattactcttggggacgtcgtaaagatggatcccgagggctcccggaccatggagattttcaatttatggttaacaactggtaaaatcccggacatggtgagggggtgcagaaccgttttgattccaaaatcatcagacccggatcgtttgaaagacattaataactggagacctatcacgatcggttccatcttgctgagactgttctccaggattgtaacagctaggctgagcaaagcgtgccccctgaacccaaggcaaagaggctttatcagagcggcgggatgctctgaaaacttaaaactcctgcaaactataatttggtcggccaaaagagaacacagaccactgggtgttgtattcgtggacatcgccaaggcttttgacaccgtaagccaccagcacatcattcatgctttgcagcaaagagaggtggatccccacatcgtcggtctggtgagcaatatgtacgagaacatcagtacgtatatcaccacaaagaggaacacacacacagacaaaatccagatccgggttggagtaaagcagggtgacccgatgtcgccccttttatttaacctggcaatggaccctctattatgcaagctggaagagagtggcaaaggataccaccgaggacagagcagcatcacagcgatggcatttgcagacgatctggttttgctgagcgactcctgggaaaatatgaatacaaatattagcatactggagaccttctgcaatctgaccggactcaaaacacaggggcaaaagtgccacggcttttacatcaagccgacaaaggactcttacaccatcaatgactgcgctgcctggactatcaacggcacacccctgaacatgatcgaccccggcgaatctgagaaatacctcggcctgcagtttgacccgtggattggaatagcaaggtccggtctctccacaaaactagatttttggcttcagcggatcgatcaagcaccacttaaacctctgcagaaaactgatattctcaaaacatacaccatccctcggctgatctacatagctgaccactcagaagtgaaaactgcactactcgaaacccttgaccagaagatccggacagcggtcaaggaatggcttcacctacctccgtgcacctgcgatgccatcctgtactcgagcacgagagacggcggtttgggcatcaccaaattggcaggactgatccccagcgtgcaggcccgtagactgcatcggatcgcacagtcatctgacgatacgatgaaatgcttcatggaaaaagagaaaatggaacagctgcataagaaattgtggattcaagctggaggggacagagagaacataccctcgatttgggaagcaccaccgtcgagtgaaccaccaaacaacgtgagcacaaattcggaatgggaagcaccgacccagaaagataaatttccaaagccttgcaattggaggaaaaacgaattcaaaaaatggaccaaattggcatcccaaggccgcggaattgtaaattttgaaagagacaaaattagtaaccattggatccaatactacagacgcatacctcacaggaaactcctcactgcactacaactcagggccaacgtttaccccacgagagaatttctagccaggggtagacaagaccaatacatcaaggcgtgtaggcactgcgatgcggacattgaatcctgcgcccacatcatcggcaactgcccagtgacacaggacgcccgaatcaagaggcacaataagatctgcgaactgcttctcgaggaggcgaagaagaaggactgggtagtgttcaaggaaccgcacataagggattccaacaaggaactgtacaaacctgacctgatatttgtgaaggatggccgtgcacttgtcgtggatgtgacagtacggtatgaagcagccaaatcatcgctggaggaagccgctgcagagaaagtgagaaagtacaaacacctggaaacggaagtaagacatctcacgaatgcaaaggacgttacttttgtgggctttcccctaggagcgcgggggaaatggcaccaagataactttaaacttttgactgagcttggcctctccaaatcgaggcaagtgaaaatggcagagactttttccacagtagcgctcttttcatctgtggacattgtacatatgtttgccagtagggccagaaaatctatggttatgtgataataggctgccttctgcggggcttgccttctggccatgcccttcttctctcccttgcacctgtacctcttggtctttgaataaagcctgagtaggaaggaccggtaaaaaaaaaaaaaaaaaaaaaaaaaaaaaaacgttgactaaaaaaaaaaaaaaaaaaaaaaaaaaaaaaaaaaaaaaaaaaaaaaaaaaaaaaaaaaaaaaaaaaaaaa

SEQ ID NO: 11652 - DNA, 4564 bp, synthetic construct
  source 1..4564: mol_type = other DNA
ggtctagttacaactgggcatcgctgcagagatcgcacctcctcgtggtcccgctggtagcccttcgaagggtgactaagtcgatctctgccccaggtacggagccgttgggactcaccagtccaacgtaactcctgcctaaattcggtgaaacaaattcctcggtaaaaagccccatggcttcttgcccgaaacctggccccccggtttcagcaggggcaatgagtttggaaagtggactgaccacccactccgttctcgccatcgaacgtggtcccaattcgttggcaaattccggatcagactttgggggggggggtctggggctaccgttacgcctattgagggtatcggtcggcactcagacctcccgctccgactgggtagacctggtgtcctggagccacccaggacccacgtctaagtcccagcaggttgacctggtgtctttatttcctaaacaccgggttgacctgttatccaaaaacgaccaggtagacctggtggctcaatttttaccatctaaatttccccccaatttggcagaaaatgatttggctttgctggtgaacttagagttctacagatcggatttgcatgtgtatgagtgtgttcataaggctgcacattgggagggattaagtggtttgcctgaggtgtatgaacaacttgcaccacaaccgtgtgtgggagaaactttacattctagcctcccacgagacagtgaactgtttgtgcctgaagaggggagcagcgagaaggagagcgaggacgcgccaaaaacatctcctccgacgcctgggaaacatggtttggaacagactggggaggaaaaagtgatggtgactgttcctgacaaaaatccaccttgtccttgctgtggtacccgggtaaactctgtgttgaatctgattgaacatctgaaagtgtcacacgggaaaaggggggtttgttttcggtgtgcaaaatgtggaaaggaaaatagtaactatcacagtgttgtttgtcattttccaaaatgcaggggtccagagacggagaaagccccagctggggagtggatttgtgaggtatgcaacagagattttacaaccaaaattggcctgggacaacacaagagattggcacacccagcagtgagaaatcaggaaaggatcgttgcttcccaaccgaaagaaacatcaaatagaggtgctcacaaaaggtgctggacaaaggaggaggaagaattactaataagactggaggctcagttcgagggaaacaaaaatattaataagcttattgcagaacacataaccaccaaaacagctaagcagatcagtgacaaaaggcgattgctgtccagaaagccagcagaggagccacgtgaggagcctggaacgtgtcatcacaccaggagagcagctgcgagcctgagaacggagcctgagatgagtcatcacgcccaggcagaggacagagataatggacctgggagacgccctctgccaggcagggcagctgccggagggagaacaatggacgagataagacgccaccctgataagggcaacggacagcagagacccaccaagcaaaaatcagaagaacagctgcaggcttactataaaaagacactagaggaacgactttcagctggggcacttaacaccttcccccgagcattcaagcaggtaatggaaggccgggatataaagctagtaatcaatcagacagcgcaggactgcttcggatgcctggaatccataagccaaataagaacggcaacccgagataaaaagtacacggtgacccgggagaaacacccaaagaaaccttttcagaagtggatgaaggacagagcaatcaaaaaaggtaattatcttcggttccagcgtttattttatcttgatagagggaaactggctaaaatcattttagatgatattgaatgcttgtcttgtgacataccactcagtgaaatttattcggtttttaaaacaagatgggaaacaactggtagctttaaaagccttggggactttaaaacttacgggaaggctgacaacactgccttcagagaattaattacggctaaagaaattgagaaaaatgtgcaggaaatgagcaaaggctcggctcccggtccagacgggattactcttggggacgtcgtaaagatggatcccgagttttccctgaccatggagattttcaatttatggttaacaactggtaaaatcccggacatggtgagggggtgcagaaccgttttgattccaaaatcatcaaagccggatcgtttgaaagacattaataactggagacctatcacgatcggttccatcttgctgagactgttctccaggattgtaacagctaggctgagcaaagcgtgccccctgaacccaaggcaaagaggctttatcagagcggcgggatgctctgaaaacttaaaactcctgcaaactataatttggtcggccaaaagagaacacagaccactgggtgttgtattcgtggacatcgccaaggcttttgacaccgtaagccaccagcacatcattcatgctttgcagcaaagagaggtggatccccacatcgtcggtctggtgagcaatatgtacgagaacatcagtacgtatatcaccacaaagaggaacacacacacagacaaaatccagatccgggttggagtaaagcagggtgacccgatgtcgccccttttatttaacctggcaatggaccctctattatgcaagctggaagagagtggcaaaggataccaccgaggacagagcagcatcacagcgatggcatttgcagacgatctggttttgctgagcgactcctgggaaaatatgaatacaaatattagcatactggagaccttctgcaatctgaccggactcaaaacacaggggcaaaagtgccacggcttttacatcaagccgacaaaggactcttacaccatcaatgactgcgctgcctggactatcaacggcacacccctgaacatgatcgaccccggcgaatctgagaaatacctcggcctgcagtttgacccgtggattggaatagcaaggtccggtctctccacaaaactagatgagtggcttcagcggatcgatcaagcaccacttaaacctctgcagaaaactgatattctcaaaacatacaccatccctcggctgatctacatagctgaccactcagaagtgaaagccgcactactcgaaacccttgaccagaagatccggacagcggtcaaggaatggcttcacctacctccgtgcacctgcgatgccatcctgtactcgagcacgagagacggcggtttgggcatcaccaaattggcaggactgatccccagcgtgcaggcccgtagactgcatcggatcgcacagtcatctgacgatacgatgaaatgcttcatggaaaaagagaaaatggaacagctgcataagaaattgtggattcaagctggaggggacagagagaacataccctcgatttgggaagcaccaccgtcgagtgaaccaccaaacaacgtgagcacaaattcggaatgggaagcaccgacccagaaacccaaatttccaaagccttgcaattggaggaaaaacgaattcaaaaaatggaccaaattggcatcccaaggccgcggaattgtaaattttgaaagagacaaaattagtaaccattggatccaatactacagacgcatacctcacaggaaactcctcactgcactacaactcagggccaacgtttaccccacgagagaatttctagccaggggtagacaagaccaatacatcaaggcgtgtaggcactgcgatgcggacattgaatcctgcgcccacatcatcggcaactgcccagtgacacaggacgcccgaatcaagaggcacaattacatctgcgaactgcttctcgaggaggcgaagaagaaggactgggtagtgttcaaggaaccgcacataagggattccaacaaggaactgtacaaacctgacctgatatttgtgaaggatgcccgtgcacttgtcgtggatgtgacagtacggtatgaagcagccaaatcatcgctggaggaagccgctgcagagaaagtgagaaagtacaaacacctggaaacggaagtaagacatctcacgaatgcaaaggacgttacttttgtgggctttcccctaggagcgcgggggaaatggcaccaagataactttaaacttttgactgagcttggcctctccaaatcgaggcaagtgaaaatggcagagactttttccacagtagcgctcttttcatctgtggacattgtacatatgtttgccagtagggccagaaaatctatggttatgtgataataggctgccttctgcggggcttgccttctggccatgcccttcttctctcccttgcacctgtacctcttggtctttgaataaagcctgagtaggaaggaccggtaaaaaaaaaaaaaaaaaaaaaaaaaaaaaaacgttgactaaaaaaaaaaaaaaaaaaaaaaaaaaaaaaaaaaaaaaaaaaaaaaaaaaaaaaaaaaaaaaaaaaaaaa

SEQ ID NO: 11653 - DNA, 4564 bp, synthetic construct
  source 1..4564: mol_type = other DNA
ggtctagttacaactgggcatcgctgcagagatcgcacctcctcgtggtcccgctggtagcccttcgaagggtgactaagtcgatctctgccccaggtacggagccgttgggactcaccagtccaacgtaactcctgcctaaattcggtgaaacaaattcctcggtaaaaagccccatggcttcttgcccgaaacctggccccccggtttcagcaggggcaatgagtttggaaagtggactgaccacccactccgttctcgccatcgaacgtggtcccaattcgttggcaaattccggatcagactttgggggggggggtctggggctaccgttacgcctattgagggtatcggtcggcactcagacctcccgctccgactgggtagacctggtgtcctggagccacccaggacccacgtctaagtcccagcaggttgacctggtgtctttatttcctaaacaccgggttgacctgttatccaaaaacgaccaggtagacctggtggctcaatttttaccatctaaatttccccccaatttggcagaaaatgatttggctttgctggtgaacttagagttctacagatcggatttgcatgtgtatgagtgtgttcataaggctgcacattgggagggattaagtggtttgcctgaggtgtatgaacaacttgcaccacaaccgtgtgtgggagaaactttacattctagcctcccacgagacagtgaactgtttgtgcctgaagaggggagcagcgagaaggagagcgaggacgcgccaaaaacatctcctccgacgcctgggaaacatggtttggaacagactggggaggaaaaagtgatggtgactgttcctgacaaaaatccaccttgtccttgctgtggtacccgggtaaactctgtgttgaatctgattgaacatctgaaagtgtcacacgggaaaaggggggtttgttttcggtgtgcaaaatgtggaaaggaaaatagtaactatcacagtgttgtttgtcattttccaaaatgcaggggtccagagacggagaaagccccagctggggagtggatttgtgaggtatgcaacagagattttacaaccaaaattggcctgggacaacacaagagattggcacacccagcagtgagaaatcaggaaaggatcgttgcttcccaaccgaaagaaacatcaaatagaggtgctcacaaaaggtgctggacaaaggaggaggaagaattactaataagactggaggctcagttcgagggaaacaaaaatattaataagcttattgcagaacacataaccaccaaaacagctaagcagatcagtgacaaaaggcgattgctgtccagaaagccagcagaggagccacgtgaggagcctggaacgtgtcatcacaccaggagagcagctgcgagcctgagaacggagcctgagatgagtcatcacgcccaggcagaggacagagataatggacctgggagacgccctctgccaggcagggcagctgccggagggagaacaatggacgagataagacgccaccctgataagggcaacggacagcagagacccaccaagcaaaaatcagaagaacagctgcaggcttactataaaaagacactagaggaacgactttcagctggggcacttaacaccttcccccgagcattcaagcaggtaatggaaggccgggatataaagctagtaatcaatcagacagcgcaggactgcttcggatgcctggaatccataagccaaataagaacggcaacccgagataaaaagtacacggtgacccgggagaaacacccaaagaaaccttttcagaagtggatgaaggacagagcaatcaaaaaaggtaattatcttcggttccagcgtttattttatcttgatagagggaaactggctaaaatcattttagatgatattgaatgcttgtcttgtgacataccactcagtgaaatttattcggtttttaaaacaagatgggaaacaactggtagctttaaaagccttggggactttaaaacttacgggaaggctgacaacactgccttcagagaattaattacggctaaagaaattgagaaaaatgtgcaggaaatgagcaaaggctcggctcccggtccagacgggattactcttggggacgtcgtaaagatggatcccgagttttccctgaccatggagattttcaatttatggttaacaactggtaaaatcccggacatggtgagggggtgcagaaccgttttgattccaaaatcatcaaagccggatcgtttgaaagacattaataactggagacctatcacgatcggttccatcttgctgagactgttctccaggattgtaacagctaggctgagcaaagcgtgccccctgaacccaaggcaaagaggctttatcagagcggcgggatgctctgaaaacttaaaactcctgcaaactataatttggtcggccaaaagagaacacagaccactgggtgttgtattcgtggacatcgccaaggcttttgacaccgtaagccaccagcacatcattcatgctttgcagcaaagagaggtggatccccacatcgtcggtctggtgagcaatatgtacgagaacatcagtacgtatatcaccacaaagaggaacacacacacagacaaaatccagatccgggttggagtaaagcagggtgacccgatgtcgccccttttatttaacctggcaatggaccctctattatgcaagctggaagagagtggcaaaggataccaccgaggacagagcagcatcacagcgatggcatttgcagacgatctggttttgctgagcgactcctgggaaaatatgaatacaaatattagcatactggagaccttctgcaatctgaccggactcaaaacacaggggcaaaagtgccacggcttttacatcaagccgacaaaggactcttacaccatcaatgactgcgctgcctggactatcaacggcacacccctgaacatgatcgaccccggcgaatctgagaaatacctcggcctgcagtttgacccgtggattggaatagcaaggtccggtctctccacaaaactagatgagtggcttcagcggatcgatcaagcaccacttaaacctctgcagaaaactgatattctcaaaacatacaccatccctcggctgatctacatagctgaccactcagaagtgaaagccgcactactcgaaacccttgaccagaagatccggacagcggtcaaggaatggcttcacctacctccgtgcacctgcgatgccatcctgtactcgagcacgagagacggcggtttgggcatcaccaaattggcaggactgatccccagcgtgcaggcccgtagactgcatcggatcgcacagtcatctgacgatacgatgaaatgcttcatggaaaaagagaggatggaacagctgcataagaaattgtggattcaagctggaggggacagagagaacataccctcgatttgggaagcaccaccgtcgagtgaaccaccaaacaacgtgagcacaaattcggaatgggaagcaccgacccagaaacccaaatttccaaagccttgcaattggaggaaaaacgaattcaaaaaatggaccaaattggcatcccaaggccgcggaattgtaaattttgaaagagacaaaattagtaaccattggatccaatactacagacgcatacctcacaggaaactcctcactgcactacaactcagggccaacgtttaccccacgagagaatttctagccaggggtagacaagaccaatacatcaaggcgtgtaggcactgcgatgcggacattgaatcctgcgcccacatcatcggcaactgcccagtgacacaggacgcccgaatcaagaggcacaattacatctgcgaactgcttctcgaggaggcgaagaagaaggactgggtagtgttcaaggaaccgcacataagggattccaacaaggaactgtacaaacctgacctgatatttgtgaaggatgcccgtgcacttgtcgtggatgtgacagtacggtatgaagcagccaaatcatcgctggaggaagccgctgcagagaaagtgagaaagtacaaacacctggaaacggaagtaagacatctcacgaatgcaaaggacgttacttttgtgggctttcccctaggagcgcgggggaaatggcaccaagataactttaaacttttgactgagcttggcctctccaaatcgaggcaagtgaaaatggcagagactttttccacagtagcgctcttttcatctgtggacattgtacatatgtttgccagtagggccagaaaatctatggttatgtgataataggctgccttctgcggggcttgccttctggccatgcccttcttctctcccttgcacctgtacctcttggtctttgaataaagcctgagtaggaaggaccggtaaaaaaaaaaaaaaaaaaaaaaaaaaaaaaacgttgactaaaaaaaaaaaaaaaaaaaaaaaaaaaaaaaaaaaaaaaaaaaaaaaaaaaaaaaaaaaaaaaaaaaaaa

SEQ ID NO: 11654 - DNA, 4564 bp, synthetic construct
  source 1..4564: mol_type = other DNA
ggtctagttacaactgggcatcgctgcagagatcgcacctcctcgtggtcccgctggtagcccttcgaagggtgactaagtcgatctctgccccaggtacggagccgttgggactcaccagtccaacgtaactcctgcctaaattcggtgaaacaaattcctcggtaaaaagccccatggcttcttgcccgaaacctggccccccggtttcagcaggggcaatgagtttggaaagtggactgaccacccactccgttctcgccatcgaacgtggtcccaattcgttggcaaattccggatcagactttgggggggggggtctggggctaccgttacgcctattgagggtatcggtcggcactcagacctcccgctccgactgggtagacctggtgtcctggagccacccaggacccacgtctaagtcccagcaggttgacctggtgtctttatttcctaaacaccgggttgacctgttatccaaaaacgaccaggtagacctggtggctcaatttttaccatctaaatttccccccaatttggcagaaaatgatttggctttgctggtgaacttagagttctacagatcggatttgcatgtgtatgagtgtgttcataaggctgcacattgggagggattaagtggtttgcctgaggtgtatgaacaacttgcaccacaaccgtgtgtgggagaaactttacattctagcctcccacgagacagtgaactgtttgtgcctgaagaggggagcagcgagaaggagagcgaggacgcgccaaaaacatctcctccgacgcctgggaaacatggtttggaacagactggggaggaaaaagtgatggtgactgttcctgacaaaaatccaccttgtccttgctgtggtacccgggtaaactctgtgttgaatctgattgaacatctgaaagtgtcacacgggaaaaggggggtttgttttcggtgtgcaaaatgtggaaaggaaaatagtaactatcacagtgttgtttgtcattttccaaaatgcaggggtccagagacggagaaagccccagctggggagtggatttgtgaggtatgcaacagagattttacaaccaaaattggcctgggacaacacaagagattggcacacccagcagtgagaaatcaggaaaggatcgttgcttcccaaccgaaagaaacatcaaatagaggtgctcacaaaaggtgctggacaaaggaggaggaagaattactaataagactggaggctcagttcgagggaaacaaaaatattaataagcttattgcagaacacataaccaccaaaacagctaagcagatcagtgacaaaaggcgattgctgtccagaaagccagcagaggagccacgtgaggagcctggaacgtgtcatcacaccaggagagcagctgcgagcctgagaacggagcctgagatgagtcatcacgcccaggcagaggacagagataatggacctgggagacgccctctgccaggcagggcagctgccggagggagaacaatggacgagataagacgccaccctgataagggcaacggacagcagagacccaccaagcaaaaatcagaagaacagctgcaggcttactataaaaagacactagaggaacgactttcagctggggcacttaacaccttcccccgagcattcaagcaggtaatggaaggccgggatataaagctagtaatcaatcagacagcgcaggactgcttcggatgcctggaatccataagccaaataagaacggcaacccgagataaaaagtacacggtgacccgggagaaacacccaaagaggccttttcagaagtggatgaaggacagagcaatcaaaaaaggtaattatcttcggttccagcgtttattttatcttgatagagggaaactggctaaaatcattttagatgatattgaatgcttgtcttgtgacataccactcagtgaaatttattcggtttttaaaacaagatgggaaacaactggtagctttaaaagccttggggactttaaaacttacgggaaggctgacaacactgccttcagagaattaattacggctaaagaaattgagaaaaatgtgcaggaaatgagcaaaggctcggctcccggtccagacgggattactcttggggacgtcgtaaagatggatcccgagttttccctgaccatggagattttcaatttatggttaacaactggtaaaatcccggacatggtgagggggtgcagaaccgttttgattccaaaatcatcaaagccggatcgtttgaaagacattaataactggagacctatcacgatcggttccatcttgctgagactgttctccaggattgtaacagctaggctgagcaaagcgtgccccctgaacccaaggcaaagaggctttatcagagcggcgggatgctctgaaaacttaaaactcctgcaaactataatttggtcggccaaaagagaacacagaccactgggtgttgtattcgtggacatcgccaaggcttttgacaccgtaagccaccagcacatcattcatgctttgcagcaaagagaggtggatccccacatcgtcggtctggtgagcaatatgtacgagaacatcagtacgtatatcaccacaaagaggaacacacacacagacaaaatccagatccgggttggagtaaagcagggtgacccgatgtcgccccttttatttaacctggcaatggaccctctattatgcaagctggaagagagtggcaaaggataccaccgaggacagagcagcatcacagcgatggcatttgcagacgatctggttttgctgagcgactcctgggaaaatatgaatacaaatattagcatactggagaccttctgcaatctgaccggactcaaaacacaggggcaaaagtgccacggcttttacatcaagccgacaaaggactcttacaccatcaatgactgcgctgcctggactatcaacggcacacccctgaacatgatcgaccccggcgaatctgagaaatacctcggcctgcagtttgacccgtggattggaatagcaaggtccggtctctccacaaaactagatgagtggcttcagcggatcgatcaagcaccacttaaacctctgcagaaaactgatattctcaaaacatacaccatccctcggctgatctacatagctgaccactcagaagtgaaagccgcactactcgaaacccttgaccagaagatccggacagcggtcaaggaatggcttcacctacctccgtgcacctgcgatgccatcctgtactcgagcacgagagacggcggtttgggcatcaccaaattggcaggactgatccccagcgtgcaggcccgtagactgcatcggatcgcacagtcatctgacgatacgatgaaatgcttcatggaaaaagagaggatggaacagctgcataagaaattgtggattcaagctggaggggacagagagaacataccctcgatttgggaagcaccaccgtcgagtgaaccaccaaacaacgtgagcacaaattcggaatgggaagcaccgacccagaaacccaaatttccaaagccttgcaattggaggaaaaacgaattcaaaaaatggaccaaattggcatcccaaggccgcggaattgtaaattttgaaagagacaaaattagtaaccattggatccaatactacagacgcatacctcacaggaaactcctcactgcactacaactcagggccaacgtttaccccacgagagaatttctagccaggggtagacaagaccaatacatcaaggcgtgtaggcactgcgatgcggacattgaatcctgcgcccacatcatcggcaactgcccagtgacacaggacgcccgaatcaagaggcacaattacatctgcgaactgcttctcgaggaggcgaagaagaaggactgggtagtgttcaaggaaccgcacataagggattccaacaaggaactgtacaaacctgacctgatatttgtgaaggatgcccgtgcacttgtcgtggatgtgacagtacggtatgaagcagccaaatcatcgctggaggaagccgctgcagagaaagtgagaaagtacaaacacctggaaacggaagtaagacatctcacgaatgcaaaggacgttacttttgtgggctttcccctaggagcgcgggggaaatggcaccaagataactttaaacttttgactgagcttggcctctccaaatcgaggcaagtgaaaatggcagagactttttccacagtagcgctcttttcatctgtggacattgtacatatgtttgccagtagggccagaaaatctatggttatgtgataataggctgccttctgcggggcttgccttctggccatgcccttcttctctcccttgcacctgtacctcttggtctttgaataaagcctgagtaggaaggaccggtaaaaaaaaaaaaaaaaaaaaaaaaaaaaaaacgttgactaaaaaaaaaaaaaaaaaaaaaaaaaaaaaaaaaaaaaaaaaaaaaaaaaaaaaaaaaaaaaaaaaaaaaa

SEQ ID NO: 11655 - DNA, 4564 bp, synthetic construct
  source 1..4564: mol_type = other DNA
ggtctagttacaactgggcatcgctgcagagatcgcacctcctcgtggtcccgctggtagcccttcgaagggtgactaagtcgatctctgccccaggtacggagccgttgggactcaccagtccaacgtaactcctgcctaaattcggtgaaacaaattcctcggtaaaaagccccatggcttcttgcccgaaacctggccccccggtttcagcaggggcaatgagtttggaaagtggactgaccacccactccgttctcgccatcgaacgtggtcccaattcgttggcaaattccggatcagactttgggggggggggtctggggctaccgttacgcctattgagggtatcggtcggcactcagacctcccgctccgactgggtagacctggtgtcctggagccacccaggacccacgtctaagtcccagcaggttgacctggtgtctttatttcctaaacaccgggttgacctgttatccaaaaacgaccaggtagacctggtggctcaatttttaccatctaaatttccccccaatttggcagaaaatgatttggctttgctggtgaacttagagttctacagatcggatttgcatgtgtatgagtgtgttcattttgctgcacattgggagggattaagtggtttgcctgaggtgtatgaacaacttgcaccacaaccgtgtgtgggagaaactttacattctagcctcccacgagacagtgaactgtttgtgcctgaagaggggagcagcgagaaggagagcgaggacgcgccaaaaacatctcctccgacgcctgggaaacatggtttggaacagactggggaggaaaaagtgatggtgactgttcctgacaaaaatccaccttgtccttgctgtggtacccgggtaaactctgtgttgaatctgattgaacatctgaaagtgtcacacgggaaaaggggggtttgttttcggtgtgcaaaatgtggaaaggaaaatagtaactatcacagtgttgtttgtcattttaagaaatgcaggggtccagagacggagaaagccccagctggggagtggatttgtgaggtatgcaacagagattttacaaccaaaattggcctgggacaacacaagagattggcacacccagcagtgagaaatcaggaaaggatcgttgcttcccaaccgaaagaaacatcaaatagaggtgctcacaaaaggtgctggacaaaggaggaggaagaattactaataagactggaggctcagttcgagggaaacaaaaatattaataagcttattgcagaacacataaccaccaaaacagctaagcagatcagtgacaaaaggcgattgctgtccagaaagccagcagaggagccacgtgaggagcctggaacgtgtcatcacaccaggagagcagctgcgagcctgagaacggagcctgagatgagtcatcacgcccaggcagaggacagagataatggacctgggagacgccctctgccaggcagggcagctgccggagggagaacaatggacgagataagacgccaccctgataagggcaacggacagcagagacccaccaagcaaaaatcagaagaacagctgcaggcttactataaaaagacactagaggaacgactttcagctggggcacttaacaccttcccccgagcattcaagcaggtaatggaaggccgggatataaagctagtaatcaatcagacagcgcaggactgcttcggatgcctggaatccataagccaaataagaacggcaacccgagataaaaaggacacggtgacccgggagaaacacccaaagaaaccttttcagaagtggatgaagaagagagcaatcaaaaaaggtaattatcttcggttccagcgtttattttatcttgatagagggaaactggctaaaatcattttagatgatattgaatgcttgtcttgtgacataccactcagtgaaatttattcggtttttaaaacaagatgggaaacaactggtagctttaaaagccttggggactttaaaacttacgggaaggctgacaacactgccttcagagaattaattacggctaaagaaattgagaaaaatgtgcaggaaatgagcaaaggctcggctcccggtccagacgggattactcttggggacgtcgtaaagatggatcccgagttttccctgaccatggagattttcaatttatggttaacaactggtaaaatcccggacatggtgagggggtgcagaaccgttttgattccaaaatcatcaaagccggatcgtttgaaagacattaataactggagacctatcacgatcggttccatcttgctgagactgttctccaggattgtaacagctaggctgagcaaagcgtgccccctgaacccaaggcaaagaggctttatcagagcggcgggatgctctgaaaacttaaaactcctgcaaactataatttggtcggccaaaagagaacacagaccactgggtgttgtattcgtggacatcgccaaggcttttgacaccgtaagccaccagcacatcattcatgctttgcagcaaagagaggtggatccccacatcgtcggtctggtgagcaatatgtacgagaacatcagtacgtatatcaccacaaagaggaacacacacacagacaaaatccagatccgggttggagtaaagcagggtgacccgatgtcgccccttttatttaacctggcaatggaccctctattatgcaagctggaagagagtggcaaaggataccaccgaggacagagcagcatcacagcgatggcatttgcagacgatctggttttgctgagcgactcctgggaaaatatgaatacaaatattagcatactggagaccttctgcaatctgaccggactcaaaacacaggggcaaaagtgccacggcttttacatcaagccgacaaaggactcttacaccatcaatgactgcgctgcctggactatcaacggcacacccctgaacatgatcgaccccggcgaatctgagaaatacctcggcctgcagtttgacccgtggattggaatagcaaggtccggtctctccacaaaactagatttttggcttcagcggatcgatcaagcaccacttaaacctctgcagaaaactgatattctcaaaacatacaccatccctcggctgatctacatagctgaccactcagaagtgaaaactgcactactcgaaacccttgaccagaagatccggacagcggtcaaggaatggcttcacctacctccgtgcacctgcgatgccatcctgtactcgagcacgagagacggcggtttgggcatcaccaaattggcaggactgatccccagcgtgcaggcccgtagactgcatcggatcgcacagtcatctgacgatacgatgaaatgcttcatggaaaaagagaaaatggaacagctgcataagaaattgtggattcaagctggaggggacagagagaacataccctcgatttgggaagcaccaccgtcgagtgaaccaccaaacaacgtgagcacaaattcggaatgggaagcaccgacccagaaacccaaatttccaaagccttgcaattggaggaaaaacgaattcaaaaaatggaccaaattggcatcccaaggccgcggaattgtaaattttgaaagagacaaaattagtaaccattggatccaatactacagacgcatacctcacaggaaactcctcactgcactacaactcagggccaacgtttaccccacgagagaatttctagccaggggtagacaagaccaatacatcaaggcgtgtaggcactgcgatgcggacattgaatcctgcgcccacatcatcggcaactgcccagtgacacaggacgcccgaatcaagaggcacaattacatctgcgaactgcttctcgaggaggcgaagaagaaggactgggtagtgttcaaggaaccgcacataagggattccaacaaggaactgtacaaacctgacctgatatttgtgaaggatgcccgtgcacttgtcgtggatgtgacagtacggtatgaagcagccaaatcatcgctggaggaagccgctgcagagaaagtgagaaagtacaaacacctggaaacggaagtaagacatctcacgaatgcaaaggacgttacttttgtgggctttcccctaggagcgcgggggaaatggcaccaagataactttaaacttttgactgagcttggcctctccaaatcgaggcaagtgaaaatggcagagactttttccacagtagcgctcttttcatctgtggacattgtacatatgtttgccagtagggccagaaaatctatggttatgtgataataggctgccttctgcggggcttgccttctggccatgcccttcttctctcccttgcacctgtacctcttggtctttgaataaagcctgagtaggaaggaccggtaaaaaaaaaaaaaaaaaaaaaaaaaaaaaaacgttgactaaaaaaaaaaaaaaaaaaaaaaaaaaaaaaaaaaaaaaaaaaaaaaaaaaaaaaaaaaaaaaaaaaaaaa

SEQ ID NO: 11656 - DNA, 4564 bp, synthetic construct
  source 1..4564: mol_type = other DNA
ggtctagttacaactgggcatcgctgcagagatcgcacctcctcgtggtcccgctggtagcccttcgaagggtgactaagtcgatctctgccccaggtacggagccgttgggactcaccagtccaacgtaactcctgcctaaattcggtgaaacaaattcctcggtaaaaagccccatggcttcttgcccgaaacctggccccccggtttcagcaggggcaatgagtttggaaagtggactgaccacccactccgttctcgccatcgaacgtggtcccaattcgttggcaaattccggatcagactttgggggggggggtctggggctaccgttacgcctattgagggtatcggtcggcactcagacctcccgctccgactgggtagacctggtgtcctggagccacccaggacccacgtctaagtcccagcaggttgacctggtgtctttatttcctaaacaccgggttgacctgttatccaaaaacgaccaggtagacctggtggctcaatttttaccatctaaatttccccccaatttggcagaaaatgatttggctttgctggtgaacttagagttctacagatcggatttgcatgtgtatgagtgtgttcataaggctgcacattgggagggattaagtggtttgcctgaggtgtatgaacaacttgcaccacaaccgtgtgtgggagaaactttacattctagcctcccacgagacagtgaactgtttgtgcctgaagaggggagcagcgagaaggagagcgaggacgcgccaaaaacatctcctccgacgcctgggaaacatggtttggaacagactggggaggaaaaagtgatggtgactgttcctgacaaaaatccaccttgtccttgctgtggtacccgggtaaactctgtgttgaatctgattgaacatctgaaagtgtcacacgggaaaaggggggtttgttttcggtgtgcaaaatgtggaaaggaaaatagtaactatcacagtgttgtttgtcattttaagaaatgcaggggtccagagacggagaaagccccagctggggagtggatttgtgaggtatgcaacagagattttacaaccaaaattggcctgggacaacacaagagattggcacacccagcagtgagaaatcaggaaaggatcgttgcttcccaaccgaaagaaacatcaaatagaggtgctcacaaaaggtgctggacaaaggaggaggaagaattactaataagactggaggctcagttcgagggaaacaaaaatattaataagcttattgcagaacacataaccaccaaaacagctaagcagatcagtgacaaaaggcgattgctgtccagaaagccagcagaggagccacgtgaggagcctggaacgtgtcatcacaccaggagagcagctgcgagcctgagaacggagcctgagatgagtcatcacgcccaggcagaggacagagataatggacctgggagacgccctctgccaggcagggcagctgccggagggagaacaatggacgagataagacgccaccctgataagggcaacggacagcagagacccaccaagcaaaaatcagaagaacagctgcaggcttactataaaaagacactagaggaacgactttcagctggggcacttaacaccttcccccgagcattcaagcaggtaatggaaggccgggatataaagctagtaatcaatcagacagcgcaggactgcttcggatgcctggaatccataagccaaataagaacggcaacccgagataaaaagtacacggtgacccgggagaaacacccaaagaaaccttttcagaagtggatgaagaagagagcaatcaaaaaaggtaattatcttcggttccagcgtttattttatcttgatagagggaaactggctaaaatcattttagatgatattgaatgcttgtcttgtgacataccactcagtgaaatttattcggtttttaaaacaagatgggaaacaactggtagctttaaaagccttggggactttaaaacttacgggaaggctgacaacactgccttcagagaattaattacggctaaagaaattgagaaaaatgtgcaggaaatgagcaaaggctcggctcccggtccagacgggattactcttggggacgtcgtaaagatggatcccgagttttccctgaccatggagattttcaatttatggttaacaactggtaaaatcccggacatggtgagggggtgcagaaccgttttgattccaaaatcatcaaagccggatcgtttgaaagacattaataactggagacctatcacgatcggttccatcttgctgagactgttctccaggattgtaacagctaggctgagcaaagcgtgccccctgaacccaaggcaaagaggctttatcagagcggcgggatgctctgaaaacttaaaactcctgcaaactataatttggtcggccaaaagagaacacagaccactgggtgttgtattcgtggacatcgccaaggcttttgacaccgtaagccaccagcacatcattcatgctttgcagcaaagagaggtggatccccacatcgtcggtctggtgagcaatatgtacgagaacatcagtacgtatatcaccacaaagaggaacacacacacagacaaaatccagatccgggttggagtaaagcagggtgacccgatgtcgccccttttatttaacctggcaatggaccctctattatgcaagctggaagagagtggcaaaggataccaccgaggacagagcagcatcacagcgatggcatttgcagacgatctggttttgctgagcgactcctgggaaaatatgaatacaaatattagcatactggagaccttctgcaatctgaccggactcaaaacacaggggcaaaagtgccacggcttttacatcaagccgacaaaggactcttacaccatcaatgactgcgctgcctggactatcaacggcacacccctgaacatgatcgaccccggcgaatctgagaaatacctcggcctgcagtttgacccgtggattggaatagcaaggtccggtctctccacaaaactagatgagtggcttcagcggatcgatcaagcaccacttaaacctctgcagaaaactgatattctcaaaacatacaccatccctcggctgatctacatagctgaccactcagaagtgaaagccgcactactcgaaacccttgaccagaagatccggacagcggtcaaggaatggcttcacctacctccgtgcacctgcgatgccatcctgtactcgagcacgagagacggcggtttgggcatcaccaaattggcaggactgatccccagcgtgcaggcccgtagactgcatcggatcgcacagtcatctgacgatacgatgaaatgcttcatggaaaaagagaggatggaacagctgcataagaaattgtggattcaagctggaggggacagagagaacataccctcgatttgggaagcaccaccgtcgagtgaaccaccaaacaacgtgagcacaaattcggaatgggaagcaccgacccagaaacccaaatttccaaagccttgcaattggaggaaaaacgaattcaaaaaatggaccaaattggcatcccaaggccgcggaattgtaaattttgaaagagacaaaattagtaaccattggatccaatactacagacgcatacctcacaggaaactcctcactgcactacaactcagggccaacgtttaccccacgagagaatttctagccaggggtagacaagaccaatacatcaaggcgtgtaggcactgcgatgcggacattgaatcctgcgcccacatcatcggcaactgcccagtgacacaggacgcccgaatcaagaggcacaattacatctgcgaactgcttctcgaggaggcgaagaagaaggactgggtagtgttcaaggaaccgcacataagggattccaacaaggaactgtacaaacctgacctgatatttgtgaaggatgcccgtgcacttgtcgtggatgtgacagtacggtatgaagcagccaaatcatcgctggaggaagccgctgcagagaaagtgagaaagtacaaacacctggaaacggaagtaagacatctcacgaatgcaaaggacgttacttttgtgggctttcccctaggagcgcgggggaaatggcaccaagataactttaaacttttgactgagcttggcctctccaaatcgaggcaagtgaaaatggcagagactttttccacagtagcgctcttttcatctgtggacattgtacatatgtttgccagtagggccagaaaatctatggttatgtgataataggctgccttctgcggggcttgccttctggccatgcccttcttctctcccttgcacctgtacctcttggtctttgaataaagcctgagtaggaaggaccggtaaaaaaaaaaaaaaaaaaaaaaaaaaaaaaacgttgactaaaaaaaaaaaaaaaaaaaaaaaaaaaaaaaaaaaaaaaaaaaaaaaaaaaaaaaaaaaaaaaaaaaaaa

SEQ ID NO: 11657 - DNA, 5407 bp, synthetic construct
  source 1..5407: mol_type = other DNA
ggtctagttacaactgggcatcgctgcagagatcgcacctcctcgtggtcccgctggtagcccttcgaagggtgactaagtcgatctctgccccaggtacggagccgttgggactcaccagtccaacgtaactcctgcctaaattcggtgaaacaaattcctcggtaaaaagccccatgggaactgcactaacaccgctcctgacgaagttcgccacgcgctacgagatgggtaccacgcctgaagaagtggcgaacacgctcaagcagacctgtttcaagggccaggtcaatgattcgcagatggtcgccctgctgatcgtggcagaccagtacaagcttaaccccttcaccaaggagttgtacgcattccccgacaagaacaacggcatcgtgccggttgttggtgtggatggctgggctcggatcatcaacgagaacccacagttcgatggcatggaattctcaatggaccagcagggaaccgaatgcacctgcaagatctatcggaaggaccgcagccatgccatcagcgcgactgagtacatggccgagtgcaagcggaacacccagccttggcagtcccatccgcgccggatgcttcgccacaaggcaatgatccagtgcgcacgcctcgcgttcgggttcgccggcatatacgaccaggacgaggccgagcggatcgttgaacgagacgtcactcccgcagagcagtacgaggacgtcagcgaggcgatctgcctgatcaaggactccccaacaatggaggacttgcaggcagcattcagcaatgcctggaaagcctataagacaaagggcgcgcgcgaccagcttacggcggccaaggaccagcggaagaaagaattgctggacgcccctatagacgttgaattcgaggagaccggcgatgatcgagcagcgtctggaggatctagcggaggatcctctggcagcgagacaccaggaacaagcgagtcagcaacaccagagagcagtggcggcagcagcggcggcagcagcatggcttcttgcccgaaacctggccccccggtttcagcaggggcaatgagtttggaaagtggactgaccacccactccgttctcgccatcgaacgtggtcccaattcgttggcaaattccggatcagactttgggggggggggtctggggctaccgttacgcctattgagggtatcggtcggcactcagacctcccgctccgactgggtagacctggtgtcctggagccacccaggacccacgtctaagtcccagcaggttgacctggtgtctttatttcctaaacaccgggttgacctgttatccaaaaacgaccaggtagacctggtggctcaatttttaccatctaaatttccccccaatttggcagaaaatgatttggctttgctggtgaacttagagttctacagatcggatttgcatgtgtatgagtgtgttcataaggctgcacattgggagggattaagtggtttgcctgaggtgtatgaacaacttgcaccacaaccgtgtgtgggagaaactttacattctagcctcccacgagacagtgaactgtttgtgcctgaagaggggagcagcgagaaggagagcgaggacgcgccaaaaacatctcctccgacgcctgggaaacatggtttggaacagactggggaggaaaaagtgatggtgactgttcctgacaaaaatccaccttgtccttgctgtggtacccgggtaaactctgtgttgaatctgattgaacatctgaaagtgtcacacgggaaaaggggggtttgttttcggtgtgcaaaatgtggaaaggaaaatagtaactatcacagtgttgtttgtcattttccaaaatgcaggggtccagagacggagaaagccccagctggggagtggatttgtgaggtatgcaacagagattttacaaccaaaattggcctgggacaacacaagagattggcacacccagcagtgagaaatcaggaaaggatcgttgcttcccaaccgaaagaaacatcaaatagaggtgctcacaaaaggtgctggacaaaggaggaggaagaattactaataagactggaggctcagttcgagggaaacaaaaatattaataagcttattgcagaacacataaccaccaaaacagctaagcagatcagtgacaaaaggcgattgctgtccagaaagccagcagaggagccacgtgaggagcctggaacgtgtcatcacaccaggagagcagctgcgagcctgagaacggagcctgagatgagtcatcacgcccaggcagaggacagagataatggacctgggagacgccctctgccaggcagggcagctgccggagggagaacaatggacgagataagacgccaccctgataagggcaacggacagcagagacccaccaagcaaaaatcagaagaacagctgcaggcttactataaaaagacactagaggaacgactttcagctggggcacttaacaccttcccccgagcattcaagcaggtaatggaaggccgggatataaagctagtaatcaatcagacagcgcaggactgcttcggatgcctggaatccataagccaaataagaacggcaacccgagataaaaagtacacggtgacccgggagaaacacccaaagaggccttttcagaagtggatgaaggacagagcaatcaaaaaaggtaattatcttcggttccagcgtttattttatcttgatagagggaaactggctaaaatcattttagatgatattgaatgcttgtcttgtgacataccactcagtgaaatttattcggtttttaaaacaagatgggaaacaactggtagctttaaaagccttggggactttaaaacttacgggaaggctgacaacactgccttcagagaattaattacggctaaagaaattgagaaaaatgtgcaggaaatgagcaaaggctcggctcccggtccagacgggattactcttggggacgtcgtaaagatggatcccgagttttccctgaccatggagattttcaatttatggttaacaactggtaaaatcccggacatggtgagggggtgcagaaccgttttgattccaaaatcatcaaagccggatcgtttgaaagacattaataactggagacctatcacgatcggttccatcttgctgagactgttctccaggattgtaacagctaggctgagcaaagcgtgccccctgaacccaaggcaaagaggctttatcagagcggcgggatgctctgaaaacttaaaactcctgcaaactataatttggtcggccaaaagagaacacagaccactgggtgttgtattcgtggacatcgccaaggcttttgacaccgtaagccaccagcacatcattcatgctttgcagcaaagagaggtggatccccacatcgtcggtctggtgagcaatatgtacgagaacatcagtacgtatatcaccacaaagaggaacacacacacagacaaaatccagatccgggttggagtaaagcagggtgacccgatgtcgccccttttatttaacctggcaatggaccctctattatgcaagctggaagagagtggcaaaggataccaccgaggacagagcagcatcacagcgatggcatttgcagacgatctggttttgctgagcgactcctgggaaaatatgaatacaaatattagcatactggagaccttctgcaatctgaccggactcaaaacacaggggcaaaagtgccacggcttttacatcaagccgacaaaggactcttacaccatcaatgactgcgctgcctggactatcaacggcacacccctgaacatgatcgaccccggcgaatctgagaaatacctcggcctgcagtttgacccgtggattggaatagcaaggtccggtctctccacaaaactagatgagtggcttcagcggatcgatcaagcaccacttaaacctctgcagaaaactgatattctcaaaacatacaccatccctcggctgatctacatagctgaccactcagaagtgaaagccgcactactcgaaacccttgaccagaagatccggacagcggtcaaggaatggcttcacctacctccgtgcacctgcgatgccatcctgtactcgagcacgagagacggcggtttgggcatcaccaaattggcaggactgatccccagcgtgcaggcccgtagactgcatcggatcgcacagtcatctgacgatacgatgaaatgcttcatggaaaaagagaggatggaacagctgcataagaaattgtggattcaagctggaggggacagagagaacataccctcgatttgggaagcaccaccgtcgagtgaaccaccaaacaacgtgagcacaaattcggaatgggaagcaccgacccagaaacccaaatttccaaagccttgcaattggaggaaaaacgaattcaaaaaatggaccaaattggcatcccaaggccgcggaattgtaaattttgaaagagacaaaattagtaaccattggatccaatactacagacgcatacctcacaggaaactcctcactgcactacaactcagggccaacgtttaccccacgagagaatttctagccaggggtagacaagaccaatacatcaaggcgtgtaggcactgcgatgcggacattgaatcctgcgcccacatcatcggcaactgcccagtgacacaggacgcccgaatcaagaggcacaattacatctgcgaactgcttctcgaggaggcgaagaagaaggactgggtagtgttcaaggaaccgcacataagggattccaacaaggaactgtacaaacctgacctgatatttgtgaaggatgcccgtgcacttgtcgtggatgtgacagtacggtatgaagcagccaaatcatcgctggaggaagccgctgcagagaaagtgagaaagtacaaacacctggaaacggaagtaagacatctcacgaatgcaaaggacgttacttttgtgggctttcccctaggagcgcgggggaaatggcaccaagataactttaaacttttgactgagcttggcctctccaaatcgaggcaagtgaaaatggcagagactttttccacagtagcgctcttttcatctgtggacattgtacatatgtttgccagtagggccagaaaatctatggttatgtgataataggctgccttctgcggggcttgccttctggccatgcccttcttctctcccttgcacctgtacctcttggtctttgaataaagcctgagtaggaaggaccggtaaaaaaaaaaaaaaaaaaaaaaaaaaaaaaacgttgactaaaaaaaaaaaaaaaaaaaaaaaaaaaaaaaaaaaaaaaaaaaaaaaaaaaaaaaaaaaaaaaaaaaaaa

SEQ ID NO: 11658 - DNA, 5407 bp, synthetic construct
  source 1..5407: mol_type = other DNA
ggtctagttacaactgggcatcgctgcagagatcgcacctcctcgtggtcccgctggtagcccttcgaagggtgactaagtcgatctctgccccaggtacggagccgttgggactcaccagtccaacgtaactcctgcctaaattcggtgaaacaaattcctcggtaaaaagccccatgggaactgcactaacaccgctcctgacgaagttcgccacgcgctacgagatgggtaccacgcctgaagaagtggcgaacacgctcaagcagacctgtttcaagggccaggtcaatgattcgcagatggtcgccctgctgatcgtggcagaccagtacaagcttaaccccttcaccaaggagttgtacgcattccccgacaagaacaacggcatcgtgccggttgttggtgtggatggctgggctcggatcatcaacgagaacccacagttcgatggcatggaattctcaatggaccagcagggaaccgaatgcacctgcaagatctatcggaaggaccgcagccatgccatcagcgcgactgagtacatggccgagtgcaagcggaacacccagccttggcagtcccatccgcgccggatgcttcgccacaaggcaatgatccagtgcgcacgcctcgcgttcgggttcgccggcatatacgaccaggacgaggccgagcggatcgttgaacgagacgtcactcccgcagagcagtacgaggacgtcagcgaggcgatctgcctgatcaaggactccccaacaatggaggacttgcaggcagcattcagcaatgcctggaaagcctataagacaaagggcgcgcgcgaccagcttacggcggccaaggaccagcggaagaaagaattgctggacgcccctatagacgttgaattcgaggagaccggcgatgatcgagcagcgtctggaggatctagcggaggatcctctggcagcgagacaccaggaacaagcgagtcagcaacaccagagagcagtggcggcagcagcggcggcagcagcatggcttcttgcccgaaacctggccccccggtttcagcaggggcaatgagtttggaaagtggactgaccacccactccgttctcgccatcgaacgtggtcccaattcgttggcaaattccggatcagactttgggggggggggtctggggctaccgttacgcctattgagggtatcggtcggcactcagacctcccgctccgactgggtagacctggtgtcctggagccacccaggacccacgtctaagtcccagcaggttgacctggtgtctttatttcctaaacaccgggttgacctgttatccaaaaacgaccaggtagacctggtggctcaatttttaccatctaaatttccccccaatttggcagaaaatgatttggctttgctggtgaacttagagttctacagatcggatttgcatgtgtatgagtgtgttcataaggctgcacattgggagggattaagtggtttgcctgaggtgtatgaacaacttgcaccacaaccgtgtgtgggagaaactttacattctagcctcccacgagacagtgaactgtttgtgcctgaagaggggagcagcgagaaggagagcgaggacgcgccaaaaacatctcctccgacgcctgggaaacatggtttggaacagactggggaggaaaaagtgatggtgactgttcctgacaaaaatccaccttgtccttgctgtggtacccgggtaaactctgtgttgaatctgattgaacatctgaaagtgtcacacgggaaaaggggggtttgttttcggtgtgcaaaatgtggaaaggaaaatagtaactatcacagtgttgtttgtcattttccaaaatgcaggggtccagagacggagaaagccccagctggggagtggatttgtgaggtatgcaacagagattttacaaccaaaattggcctgggacaacacaagagattggcacacccagcagtgagaaatcaggaaaggatcgttgcttcccaaccgaaagaaacatcaaatagaggtgctcacaaaaggtgctggacaaaggaggaggaagaattactaataagactggaggctcagttcgagggacacaaaaatattaataagcttattgcagaacacataaccaccaaaacagctaagcagatcagtgacaaaaggcgattgctgtccagaaagccagcagaggagccacgtgaggagcctggaacgtgtcatcacaccaggagagcagctgcgagcctgagaacggagcctgagatgagtcatcacgcccaggcagaggacagagataatggacctgggagacgccctctgccaggcagggcagctgccggagggagaacaatggacgagataagacgccaccctgataagggcaacggacagcagagacccaccaagcaaaaatcagaagaacagctgcaggcttactataaaaagacactagaggaacgactttcagctggggcacttaacaccttcccccgagcattcaagcaggtaatggaaggccgggatataaagctagtaatcaatcagacagcgcaggactgcttcggatgcctggaatccataagccaaataagaacggcaacccgagataaaaagtacacggtgacccgggagaaacacccaaagaggccttttcagaagtggatgaaggacagagcaatcaaaaaaggtaattatcttcggttccagcgtttattttatcttgatagagggaaactggctaaaatcattttagatgatattgaatgcttgtcttgtgacataccactcagtgaaatttattcggtttttaaaacaagatgggaaacaactggtagctttaaaagccttggggactttaaaacttacgggaaggctgacaacactgccttcagagaattaattacggctaaagaaattgagaaaaatgtgcaggaaatgagcaaaggctcggctcccggtccagacgggattactcttggggacgtcgtaaagatggatcccgagttttccctgaccatggagattttcaatttatggttaacaactggtaaaatcccggacatggtgagggggtgcagaaccgttttgattccaaaatcatcaaagccggatcgtttgaaagacattaataactggagacctatcacgatcggttccatcttgctgagactgttctccaggattgtaacagctaggctgagcaaagcgtgccccctgaacccaaggcaaagaggctttatcagagcggcgggatgctctgaaaacttaaaactcctgcaaactataatttggtcggccaaaagagaacacagaccactgggtgttgtattcgtggacatcgccaaggcttttgacaccgtaagccaccagcacatcattcatgctttgcagcaaagagaggtggatccccacatcgtcggtctggtgagcaatatgtacgagaacatcagtacgtatatcaccacaaagaggaacacacacacagacaaaatccagatccgggttggagtaaagcagggtgacccgatgtcgccccttttatttaacctggcaatggaccctctattatgcaagctggaagagagtggcaaaggataccaccgaggacagagcagcatcacagcgatggcatttgcagacgatctggttttgctgagcgactcctgggaaaatatgaatacaaatattagcatactggagaccttctgcaatctgaccggactcaaaacacaggggcaaaagtgccacggcttttacatcaagccgacaaaggactcttacaccatcaatgactgcgctgcctggactatcaacggcacacccctgaacatgatcgaccccggcgaatctgagaaatacctcggcctgcagtttgacccgtggattggaatagcaaggtccggtctctccacaaaactagatgagtggcttcagcggatcgatcaagcaccacttaaacctctgcagaaaactgatattctcaaaacatacaccatccctcggctgatctacatagctgaccactcagaagtgaaagccgcactactcgaaacccttgaccagaagatccggacagcggtcaaggaatggcttcacctacctccgtgcacctgcgatgccatcctgtactcgagcacgagagacggcggtttgggcatcaccaaattggcaggactgatccccagcgtgcaggcccgtagactgcatcggatcgcacagtcatctgacgatacgatgaaatgcttcatggaaaaagagaggatggaacagctgcataagaaattgtggattcaagctggaggggacagagagaacataccctcgatttgggaagcaccaccgtcgagtgaaccaccaaacaacgtgagcacaaattcggaatgggaagcaccgacccagaaacccaaatttccaaagccttgcaattggaggaaaaacgaattcaaaaaatggaccaaattggcatcccaaggccgcggaattgtaaattttgaaagagacaaaattagtaaccattggatccaatactacagacgcatacctcacaggaaactcctcactgcactacaactcagggccaacgtttaccccacgagagaatttctagccaggggtagacaagaccaatacatcaaggcgtgtaggcactgcgatgcggacattgaatcctgcgcccacatcatcggcaactgcccagtgacacaggacgcccgaatcaagaggcacaattacatctgcgaactgcttctcgaggaggcgaagaagaaggactgggtagtgttcaaggaaccgcacataagggattccaacaaggaactgtacaaacctgacctgatatttgtgaaggatgcccgtgcacttgtcgtggatgtgacagtacggtatgaagcagccaaatcatcgctggaggaagccgctgcagagaaagtgagaaagtacaaacacctggaaacggaagtaagacatctcacgaatgcaaaggacgttacttttgtgggctttcccctaggagcgcgggggaaatggcaccaagataactttaaacttttgactgagcttggcctctccaaatcgaggcaagtgaaaatggcagagactttttccacagtagcgctcttttcatctgtggacattgtacatatgtttgccagtagggccagaaaatctatggttatgtgataataggctgccttctgcggggcttgccttctggccatgcccttcttctctcccttgcacctgtacctcttggtctttgaataaagcctgagtaggaaggaccggtaaaaaaaaaaaaaaaaaaaaaaaaaaaaaaacgttgactaaaaaaaaaaaaaaaaaaaaaaaaaaaaaaaaaaaaaaaaaaaaaaaaaaaaaaaaaaaaaaaaaaaaaa

SEQ ID NO: 11659 - DNA, 5407 bp, synthetic construct
  source 1..5407: mol_type = other DNA
ggtctagttacaactgggcatcgctgcagagatcgcacctcctcgtggtcccgctggtagcccttcgaagggtgactaagtcgatctctgccccaggtacggagccgttgggactcaccagtccaacgtaactcctgcctaaattcggtgaaacaaattcctcggtaaaaagccccatgggaactgcactaacaccgctcctgacgaagttcgccacgcgctacgagatgggtaccacgcctgaagaagtggcgaacacgctcaagcagacctgtttcaagggccaggtcaatgattcgcagatggtcgccctgctgatcgtggcagaccagtacaagcttaaccccttcaccaaggagttgtacgcattccccgacaagaacaacggcatcgtgccggttgttggtgtggatggctgggctcggatcatcaacgagaacccacagttcgatggcatggaattctcaatggaccagcagggaaccgaatgcacctgcaagatctatcggaaggaccgcagccatgccatcagcgcgactgagtacatggccgagtgcaagcggaacacccagccttggcagtcccatccgcgccggatgcttcgccacaaggcaatgatccagtgcgcacgcctcgcgttcgggttcgccggcatatacgaccaggacgaggccgagcggatcgttgaacgagacgtcactcccgcagagcagtacgaggacgtcagcgaggcgatctgcctgatcaaggactccccaacaatggaggacttgcaggcagcattcagcaatgcctggaaagcctataagacaaagggcgcgcgcgaccagcttacggcggccaaggaccagcggaagaaagaattgctggacgcccctatagacgttgaattcgaggagaccggcgatgatcgagcagcgtctggaggatctagcggaggatcctctggcagcgagacaccaggaacaagcgagtcagcaacaccagagagcagtggcggcagcagcggcggcagcagcatggcttcttgcccgaaacctggccccccggtttcagcaggggcaatgagtttggaaagtggactgaccacccactccgttctcgccatcgaacgtggtcccaattcgttggcaaattccggatcagactttgggggggggggtctggggctaccgttacgcctattgagggtatcggtcggcactcagacctcccgctccgactgggtagacctggtgtcctggagccacccaggacccacgtctaagtcccagcaggttgacctggtgtctttatttcctaaacaccgggttgacctgttatccaaaaacgaccaggtagacctggtggctcaatttttaccatctaaatttccccccaatttggcagaaaatgatttggctttgctggtgaacttagagttctacagatcggatttgcatgtgtatgagtgtgttcattttgctgcacattgggagggattaagtggtttgcctgaggtgtatgaacaacttgcaccacaaccgtgtgtgggagaaactttacattctagcctcccacgagacagtgaactgtttgtgcctgaagaggggagcagcgagaaggagagcgaggacgcgccaaaaacatctcctccgacgcctgggaaacatggtttggaacagactggggaggaaaaagtgatggtgactgttcctgacaaaaatccaccttgtccttgctgtggtacccgggtaaactctgtgttgaatctgattgaacatctgaaagtgtcacacgggaaaaggggggtttgttttcggtgtgcaaaatgtggaaaggaaaatagtaactatcacagtgttgtttgtcattttaagaaatgcaggggtccagagacggagaaagccccagctggggagtggatttgtgaggtatgcaacagagattttacaaccaaaattggcctgggacaacacaagagattggcacacccagcagtgagaaatcaggaaaggatcgttgcttcccaaccgaaagaaacatcaaatagaggtgctcacaaaaggtgctggacaaaggaggaggaagaattactaataagactggaggctcagttcgagggaaacaaaaatattaataagcttattgcagaacacataaccaccaaaacagctaagcagatcagtgacaaaaggcgattgctgtccagaaagccagcagaggagccacgtgaggagcctggaacgtgtcatcacaccaggagagcagctgcgagcctgagaacggagcctgagatgagtcatcacgcccaggcagaggacagagataatggacctgggagacgccctctgccaggcagggcagctgccggagggagaacaatggacgagataagacgccaccctgataagggcaacggacagcagagacccaccaagcaaaaatcagaagaacagctgcaggcttactataaaaagacactagaggaacgactttcagctggggcacttaacaccttcccccgagcattcaagcaggtaatggaaggccgggatataaagctagtaatcaatcagacagcgcaggactgcttcggatgcctggaatccataagccaaataagaacggcaacccgagataaaaaggacacggtgacccgggagaaacacccaaagaaaccttttcagaagtggatgaagaagagagcaatcaaaaaaggtaattatcttcggttccagcgtttattttatcttgatagagggaaactggctaaaatcattttagatgatattgaatgcttgtcttgtgacataccactcagtgaaatttattcggtttttaaaacaagatgggaaacaactggtagctttaaaagccttggggactttaaaacttacgggaaggctgacaacactgccttcagagaattaattacggctaaagaaattgagaaaaatgtgcaggaaatgagcaaaggctcggctcccggtccagacgggattactcttggggacgtcgtaaagatggatcccgagttttcccggaccatggagattttcaatttatggttaacaactggtaaaatcccggacatggtgagggggtgcagaaccgttttgattccaaaatcatcaaagccggatcgtttgaaagacattaataactggagacctatcacgatcggttccatcttgctgagactgttctccaggattgtaacagctaggctgagcaaagcgtgccccctgaacccaaggcaaagaggctttatcagagcggcgggatgctctgaaaacttaaaactcctgcaaactataatttggtcggccaaaagagaacacagaccactgggtgttgtattcgtggacatcgccaaggcttttgacaccgtaagccaccagcacatcattcatgctttgcagcaaagagaggtggatccccacatcgtcggtctggtgagcaatatgtacgagaacatcagtacgtatatcaccacaaagaggaacacacacacagacaaaatccagatccgggttggagtaaagcagggtgacccgatgtcgccccttttatttaacctggcaatggaccctctattatgcaagctggaagagagtggcaaaggataccaccgaggacagagcagcatcacagcgatggcatttgcagacgatctggttttgctgagcgactcctgggaaaatatgaatacaaatattagcatactggagaccttctgcaatctgaccggactcaaaacacaggggcaaaagtgccacggcttttacatcaagccgacaaaggactcttacaccatcaatgactgcgctgcctggactatcaacggcacacccctgaacatgatcgaccccggcgaatctgagaaatacctcggcctgcagtttgacccgtggattggaatagcaaggtccggtctctccacaaaactagatttttggcttcagcggatcgatcaagcaccacttaaacctctgcagaaaactgatattctcaaaacatacaccatccctcggctgatctacatagctgaccactcagaagtgaaaactgcactactcgaaacccttgaccagaagatccggacagcggtcaaggaatggcttcacctacctccgtgcacctgcgatgccatcctgtactcgagcacgagagacggcggtttgggcatcaccaaattggcaggactgatccccagcgtgcaggcccgtagactgcatcggatcgcacagtcatctgacgatacgatgaaatgcttcatggaaaaagagaaaatggaacagctgcataagaaattgtggattcaagctggaggggacagagagaacataccctcgatttgggaagcaccaccgtcgagtgaaccaccaaacaacgtgagcacaaattcggaatgggaagcaccgacccagaaacccaaatttccaaagccttgcaattggaggaaaaacgaattcaaaaaatggaccaaattggcatcccaaggccgcggaattgtaaattttgaaagagacaaaattagtaaccattggatccaatactacagacgcatacctcacaggaaactcctcactgcactacaactcagggccaacgtttaccccacgagagaatttctagccaggggtagacaagaccaatacatcaaggcgtgtaggcactgcgatgcggacattgaatcctgcgcccacatcatcggcaactgcccagtgacacaggacgcccgaatcaagaggcacaattacatctgcgaactgcttctcgaggaggcgaagaagaaggactgggtagtgttcaaggaaccgcacataagggattccaacaaggaactgtacaaacctgacctgatatttgtgaaggatgcccgtgcacttgtcgtggatgtgacagtacggtatgaagcagccaaatcatcgctggaggaagccgctgcagagaaagtgagaaagtacaaacacctggaaacggaagtaagacatctcacgaatgcaaaggacgttacttttgtgggctttcccctaggagcgcgggggaaatggcaccaagataactttaaacttttgactgagcttggcctctccaaatcgaggcaagtgaaaatggcagagactttttccacagtagcgctcttttcatctgtggacattgtacatatgtttgccagtagggccagaaaatctatggttatgtgataataggctgccttctgcggggcttgccttctggccatgcccttcttctctcccttgcacctgtacctcttggtctttgaataaagcctgagtaggaaggaccggtaaaaaaaaaaaaaaaaaaaaaaaaaaaaaaacgttgactaaaaaaaaaaaaaaaaaaaaaaaaaaaaaaaaaaaaaaaaaaaaaaaaaaaaaaaaaaaaaaaaaaaaaa

SEQ ID NO: 11660 - DNA, 4439 bp, synthetic construct
  source 1..4439: mol_type = other DNA
gaaataagagagaaaagaagagtaagaagaaatataagagaattcgccaccatggcttcttgcccgaaacctggccccccggtttcagcaggggcaatgagtttggaaagtggactgaccacccactccgttctcgccatcgaacgtggtcccaattcgttggcaaattccggatcagactttgggggggggggtctggggctaccgttacgcctattgagggtatcggtcggcactcagacctcccgctccgactgggtagacctggtgtcctggagccacccaggacccacgtctaagtcccagcaggttgacctggtgtctttatttcctaaacaccgggttgacctgttatccaaaaacgaccaggtagacctggtggctcaatttttaccatctaaatttccccccaatttggcagaaaatgatttggctttgctggtgaacttagagttctacagatcggatttgcatgtgtatgagtgtgttcataaggctgcacattgggagggattaagtggtttgcctgaggtgtatgaacaacttgcaccacaaccgtgtgtgggagaaactttacattctagcctcccacgagacagtgaactgtttgtgcctgaagaggggagcagcgagaaggagagcgaggacgcgccaaaaacatctcctccgacgcctgggaaacatggtttggaacagactggggaggaaaaagtgatggtgactgttcctgacaaaaatccaccttgtccttgctgtggtacccgggtaaactctgtgttgaatctgattgaacatctgaaagtgtcacacgggaaaaggggggtttgttttcggtgtgcaaaatgtggaaaggaaaatagtaactatcacagtgttgtttgtcattttaagaaatgcaggggtccagagacggagaaagccccagctggggagtggatttgtgaggtatgcaacagagattttacaaccaaaattggcctgggacaacacaagagattggcacacccagcagtgagaaatcaggaaaggatcgttgcttcccaaccgaaagaaacatcaaatagaggtgctcacaaaaggtgctggacaaaggaggaggaagaattactaataagactggaggctcagttcgagggaaacaaaaatattaataagcttattgcagaacacataaccaccaaaacagctaagcagatcagtgacaaaaggcgattgctgtccagaaagccagcagaggagccacgtatggagcctggaacgtgtcatcacaccaggagagcagctgcgagcctgagaacggagcctgagatgagtcatcacgcccaggcagaggacagagataatggacctgggagacgccctctgccaggcagggcagctgccggagggagaacaatggacgagataagacgccaccctgataagggcaacggacagcagagacccaccaagcaaaaatcagaagaacagctgcaggcttactataaaaagacactagaggaacgactttcagctggggcacttaacaccttcccccgagcattcaagcaggtaatggaaggccgggatataaagctagtaatcaatcagacagcgcaggactgcttcggatgcctggaatccataagccaaataagaacggcaacccgagataaaaaggacacggtgacccgggagaaacacccaaagaaaccttttcagaagtggatgaagaagagagcaatcaaaaaaggtaattatcttcggttccagcgtttattttatcttgatagagggaaactggctaaaatcattttagatgatattgaatgcttgtcttgtgacataccactcagtgaaatttattcggtttttaaaacaagatgggaaacaactggtagctttaaaagccttggggactttaaaacttacgggaaggctgacaacactgccttcagagaattaattacggctaaagaaattgagaaaaatgtgcaggaaatgagcaaaggctcggctcccggtccagacgggattactcttggggacgtcgtaaagatggatcccgagttttcccggaccatggagattttcaatttatggttaacaactggtaaaatcccggacatggtgagggggtgcagaaccgttttgattccaaaatcatcagacccggatcgtttgaaagacattaataactggagacctatcacgatcggttccatcttgctgagactgttctccaggattgtaacagctaggctgagcaaagcgtgccccctgaacccaaggcaaagaggctttatcagagcggcgggatgctctgaaaacttaaaactcctgcaaactataatttggtcggccaaaagagaacacagaccactgggtgttgtattcgtggacatcgccaaggcttttgacaccgtaagccaccagcacatcattcatgctttgcagcaaagagaggtggatccccacatcgtcggtctggtgagcaatatgtacgagaacatcagtacgtatatcaccacaaagaggaacacacacacagacaaaatccagatccgggttggagtaaagcagggtgacccgatgtcgccccttttatttaacctggcaatggaccctctattatgcaagctggaagagagtggcaaaggataccaccgaggacagagcagcatcacagcgatggcatttgcagacgatctggttttgctgagcgactcctgggaaaatatgaatacaaatattagcatactggagaccttctgcaatctgaccggactcaaaacacaggggcaaaagtgccacggcttttacatcaagccgacaaagaagtcttacaccatcaatgactgcgctgcctggactatcaacggcacacccctgaacatgatcgaccccggcgaatctgagaaatacctcggcctgcagtttgacccgtggattggaatagcaaggtccggtctctccacaaaactagatttttggcttcagcggatcgatcaagcaccacttaaacctctgcagaaaactgatattctcaaaacatacaccatccctcggctgatctacatagctgaccactcagaagtgaaaagcgcactactcgaaacccttgaccagaagatccggacagcggtcaaggaatggcttcacctacctccgtgcacctgcgatgccatcctgtactcgagcacgagagacggcggtttgggcatcaccaaattggcaggactgatccccagcgtgcaggcccgtagactgcatcggatcgcacagtcatctgacgatacgatgaaatgcttcatggaaaaagagaaaatggaacagctgcataagaaattgtggattcaagctggaggggacagagagaacataccctcgatttgggaagcaccaccgtcgagtgaaccaccaaacaacgtgagcacaaattcggaatgggaagcaccgacccagaaagataaatttccaaagccttgcaattggaggaaaaacgaattcaaaaaatggaccaaattggcatcccaaggccgcggaattgtaaattttgaaagagacaaaattagtaaccattggatccaatactacagacgcatacctcacaggaaactcctcactgcactacaactcagggccaacgtttaccccacgagagaatttctagccaggggtagacaagaccaatacatcaaggcgtgtaggcactgcgatgcggacaacgaatcctgcgcccacatcatcggcaactgcccagtgacacaggacgcccgaatcaagaggcacaattacatctgcgaactgcttctcgaggaggcgaagaagaaggactgggtagtgttcaaggaaccgcacataagggattccaacaaggaactgtacaaacctgacctgatatttgtgaaggatgggcgtgcacttgtcgtggatgtgacagtacggtatgaagcagccaaatcatcgctggaggaagccgctgcagagaaagtgagaaagtacaaacacctggaaacggaagtaagacatctcacgaatgcaaaggacgttacttttgtgggctttcccctaggagcgcgggggaaatggcaccaagataactttaaacttttgactgagcttggcctctccaaatcgaggcaagtgaaaatggcagagactttttccacagtagcgctcttttcatctgtggacattgtacatatgtttgccagtagggccagaaaatctatggttatgtgataataggctgccttctgcggggcttgccttctggccatgcccttcttctctcccttgcacctgtacctcttggtctttgaataaagcctgagtaggaaggaccggtaaaaaaaaaaaaaaaaaaaaaaaaaaaaaaacgttgactaaaaaaaaaaaaaaaaaaaaaaaaaaaaaaaaaaaaaaaaaaaaaaaaaaaaaaaaaaaaaaaaaaaaaa

SEQ ID NO: 11661 - DNA, 4439 bp, synthetic construct
  source 1..4439: mol_type = other DNA
gaaataagagagaaaagaagagtaagaagaaatataagagaattcgccaccatggcttcttgcccgaaacctggccccccggtttcagcaggggcaatgagtttggaaagtggactgaccacccactccgttctcgccatcgaacgtggtcccaattcgttggcaaattccggatcagactttgggggggggggtctggggctaccgttacgcctattgagggtatcggtcggcactcagacctcccgctccgactgggtagacctggtgtcctggagccacccaggacccacgtctaagtcccagcaggttgacctggtgtctttatttcctaaacaccgggttgacctgttatccaaaaacgaccaggtagacctggtggctcaatttttaccatctaaatttccccccaatttggcagaaaatgatttggctttgctggtgaacttagagttctacagatcggatttgcatgtgtatgagtgtgttcataaggctgcacattgggagggattaagtggtttgcctgaggtgtatgaacaacttgcaccacaaccgtgtgtgggagaaactttacattctagcctcccacgagacagtgaactgtttgtgcctgaagaggggagcagcgagaaggagagcgaggacgcgccaaaaacatctcctccgacgcctgggaaacatggtttggaacagactggggaggaaaaagtgatggtgactgttcctgacaaaaatccaccttgtccttgctgtggtacccgggtaaactctgtgttgaatctgattgaacatctgaaagtgtcacacgggaaaaggggggtttgttttcggtgtgcaaaatgtggaaaggaaaatagtaactatcacagtgttgtttgtcattttaagaaatgcaggggtccagagacggagaaagccccagctggggagtggatttgtgaggtatgcaacagagattttacaaccaaaattggcctgggacaacacaagagattggcacacccagcagtgagaaatcaggaaaggatcgttgcttcccaaccgaaagaaacatcaaatagaggtgctcacaaaaggtgctggacaaaggaggaggaagaattactaataagactggaggctcagttcgagggaaacaaaaatattaataagcttattgcagaacacataaccaccaaaacagctaagcagatcagtgacaaaaggcgattgctgtccagaaagccagcagaggagccacgtatggagcctggaacgtgtcatcacaccaggagagcagctgcgagcctgagaacggagcctgagatgagtcatcacgcccaggcagaggacagagataatggacctgggagacgccctctgccaggcagggcagctgccggagggagaacaatggacgagataagacgccaccctgataagggcaacggacagcagagacccaccaagcaaaaatcagaagaacagctgcaggcttactataaaaagacactagaggaacgactttcagctggggcacttaacaccttcccccgagcattcaagcaggtaatggaaggccgggatataaagctagtaatcaatcagacagcgcaggactacttcggatgcctggaatccataagccaaataagaacggcaacccgagataaaaaggacacggtgacccgggagaaacacccaaagaaaccttttcagaagtggatgaagaagagagcaatcaaaaaaggtaattatcttcggttccagcgtttattttatcttgatagagggaaactggctaaaatcattttagatgatattgaatgcttgtcttgtgacataccactcagtgaaatttattcggtttttaaaacaagatgggaaacaactggtagctttaaaagccttggggactttaaaacttacgggaaggctgacaacactgccttcagagaattaattacggctaaagaaattgagaaaaatgtgcaggaaatgagcaaaggctcggctcccggtccagacgggattactcttggggacgtcgtaaagatggatcccgagttttcccggaccatggagattttcaatttatggttaacaactggtaaaatcccggacatggtgagggggtgcagaaccgttttgattccaaaatcatcaaagccggatcgtttgaaagacattaataactggagacctatcacgatcggttccatcttgctgagactgttctccaggattgtaacagctaggctgagcaaagcgtgccccctgaacccaaggcaaagaggctttatcagagcggcgggatgctctgaaaacttaaaactcctgcaaactataatttggtcggccaaaagagaacacagaccactgggtgttgtattcgtggacatcgccaaggcttttgacaccgtaagccaccagcacatcattcatgctttgcagcaaagagaggtggatccccacatcgtcggtctggtgagcaatatgtacgagaacatcagtacgtatatcaccacaaagaggaacacacacacagacaaaatccagatccgggttggagtaaagcagggtgacccgatgtcgccccttttatttaacctggcaatggaccctctattatgcaagctggaagagagtggcaaaggataccaccgaggacagagcagcatcacagcgatggcatttgcagacgatctggttttgctgagcgactcctgggaaaatatgaatacaaatattagcatactggagaccttctgcaatctgaccggactcaaaacacaggggcaaaagtgccacggcttttacatcaagccgacaaagaagtcttacaccatcaatgactgcgctgcctggactatcaacggcacacccctgaacatgatcgaccccggcgaatctgagaaatacctcggcctgcagtttgacccgtggattggaatagcaaggtccggtctctccacaaaactagatttttggcttcagcggatcgatcaagcaccacttaaacctctgcagaaaactgatattctcaaaacatacaccatccctcggctgatctacatagctgaccactcagaagtgaaaagcgcactactcgaaacccttgaccagaagatccggacagcggtcaaggaatggcttcacctacctccgtgcacctgcgatgccatcctgtactcgagcacgagagacggcggtttgggcatcaccaaattggcaggactgatccccagcgtgcaggcccgtagactgcatcggatcgcacagtcatctgacgatacgatgaaatgcttcatggaaaaagagaaaatggaacagctgcataagaaattgtggattcaagctggaggggacagagagaacataccctcgatttgggaagcaccaccgtcgagtgaaccaccaaacaacgtgagcacaaattcggaatgggaagcaccgacccagaaagataaatttccaaagccttgcaattggaggaaaaacgaattcaaaaaatggaccaaattggcatcccaaggccgcggaattgtaaattttgaaagagacaaaattagtaaccattggatccaatactacagacgcatacctcacaggaaactcctcactgcactacaactcagggccaacgtttaccccacgagagaatttctagccaggggtagacaagaccaatacatcaaggcgtgtaggcactgcgatgcggacaacgaatcctgcgcccacatcatcggcaactgcccagtgacacaggacgcccgaatcaagaggcacaattacatctgcgaactgcttctcgaggaggcgaagaagaaggactgggtagtgttcaaggaaccgcacataagggattccaacaaggaactgtacaaacctgacctgatatttgtgaaggatgggcgtgcacttgtcgtggatgtgacagtacggtatgaagcagccaaatcatcgctggaggaagccgctgcagagaaagtgagaaagtacaaacacctggaaacggaagtaagacatctcacgaatgcaaaggacgttacttttgtgggctttcccctaggagcgcgggggaaatggcaccaagataactttaaacttttgactgagcttggcctctccaaatcgaggcaagtgaaaatggcagagactttttccacagtagcgctcttttcatctgtggacattgtacatatgtttgccagtagggccagaaaatctatggttatgtgataataggctgccttctgcggggcttgccttctggccatgcccttcttctctcccttgcacctgtacctcttggtctttgaataaagcctgagtaggaaggaccggtaaaaaaaaaaaaaaaaaaaaaaaaaaaaaaacgttgactaaaaaaaaaaaaaaaaaaaaaaaaaaaaaaaaaaaaaaaaaaaaaaaaaaaaaaaaaaaaaaaaaaaaaa

SEQ ID NO: 11662 - DNA, 4439 bp, synthetic construct
  source 1..4439: mol_type = other DNA
gaaataagagagaaaagaagagtaagaagaaatataagagaattcgccaccatggcttcttgcccgaaacctggccccccggtttcagcaggggcaatgagtttggaaagtggactgaccacccactccgttctcgccatcgaacgtggtcccaattcgttggcaaattccggatcagactttgggggggggggtctggggctaccgttacgcctattgagggtatcggtcggcactcagacctcccgctccgactgggtagacctggtgtcctggagccacccaggacccacgtctaagtcccagcaggttgacctggtgtctttatttcctaaacaccgggttgacctgttatccaaaaacgaccaggtagacctggtggctcaatttttaccatctaaatttccccccaatttggcagaaaatgatttggctttgctggtgaacttagagttctacagatcggatttgcatgtgtatgagtgtgttcataaggctgcacattgggagggattaagtggtttgcctgaggtgtatgaacaacttgcaccacaaccgtgtgtgggagaaactttacattctagcctcccacgagacagtgaactgtttgtgcctgaagaggggagcagcgagaaggagagcgaggacgcgccaaaaacatctcctccgacgcctgggaaacatggtttgaggcagactggggaggaaaaagtgatggtgactgttcctgacaaaaatccaccttgtccttgctgtggtacccgggtaaactctgtgttgaatctgattgaacatctgaaagtgtcacacgggaaaaggggggtttgttttcggtgtgcaaaatgtggaaaggaaaatagtaactatcacagtgttgtttgtcattttaagaaatgcaggggtccagagacggagaaagccccagctggggagtggatttgtgaggtatgcaacagagattttacaaccaaaattggcctgggacaacacaagagattggcacacccagcagtgagaaatcaggaaaggatcgttgcttcccaaccgaaagaaacatcaaatagaggtgctcacaaaaggtgctggacaaaggaggaggaagaattactaataagactggaggctcagttcgagggaaacaaaaatattaataagcttattgcagaacacataaccaccaaaacagctaagcagatcagtgacaaaaggcgattgctgtccagaaagccagcagaggagccacgtatggagcctggaacgtgtcatcacaccaggagagcagctgcgagcctgagaacggagcctgagatgagtcatcacgcccaggcagaggacagagataatggacctgggagacgccctctgccaggcagggcagctgccggagggagaacaatggacgagataagacgccaccctgataagggcaacggacagcagagacccaccaagcaaaaatcagaagaacagctgcaggcttactataaaaagacactagaggaacgactttcagctggggcacttaacaccttcccccgagcattcaagcaggtaatggaaggccgggatataaagctagtaatcaatcagacagcgcaggactgcttcggatgcctggaatccataagccaaataagaacggcaacccgagataaaaaggacacggtgacccgggagaaacacccaaagaaaccttttcagaagtggatgaagaagagagcaatcaaaaaaggtaattatcttcggttccagcgtttattttatcttgatagagggaaactggctaaaatcattttagatgatattgaatgcttgtcttgtgacataccactcagtgaaatttattcggtttttaaaacaagatgggaaacaactggtagctttaaaagccttggggactttaaaacttacgggaaggctgacaacactgccttcagagaattaattacggctaaagaaattgagaaaaatgtgcaggaaatgagcaaaggctcggctcccggtccagacgggattactcttggggacgtcgtaaagatggatcccgagttttcccggaccatggagattttcaatttatggttaacaactggtaaaatcccggacatggtgagggggtgcagaaccgttttgattccaaaatcatcaaagccggatcgtttgaaagacattaataactggagacctatcacgatcggttccatcttgctgagactgttctccaggattgtaacagctaggctgagcaaagcgtgccccctgaacccaaggcaaagaggctttatcagagcggcgggatgctctgaaaacttaaaactcctgcaaactataatttggtcggccaaaagagaacacagaccactgggtgttgtattcgtggacatcgccaaggcttttgacaccgtaagccaccagcacatcattcatgctttgcagcaaagagaggtggatccccacatcgtcggtctggtgagcaatatgtacgagaacatcagtacgtatatcaccacaaagaggaacacacacacagacaaaatccagatccgggttggagtaaagcagggtgacccgatgtcgccccttttatttaacctggcaatggaccctctattatgcaagctggaagagagtggcaaaggataccaccgaggacagagcagcatcacagcgatggcatttgcagacgatctggttttgctgagcgactcctgggaaaatatgaatacaaatattagcatactggagaccttctgcaatctgaccggactcaaaacacaggggcaaaagtgccacggcttttacatcaagccgacaaagaagtcttacaccatcaatgactgcgctgcctggactatcaacggcacacccctgaacatgatcgaccccggcgaatctgagaaatacctcggcctgcagtttgacccgtggattggaatagcaaggtccggtctctccacaaaactagatttttggcttcagcggatcgatcaagcaccacttaaacctctgcagaaaactgatattctcaaaacatacaccatccctcggctgatctacatagctgaccactcagaagtgaaaagcgcactactcgaaacccttgaccagaagatccggacagcggtcaaggaatggcttcacctacctccgtgcacctgcgatgccatcctgtactcgagcacgagagacggcggtttgggcatcaccaaattggcaggactgatccccagcgtgcaggcccgtagactgcatcggatcgcacagtcatctgacgatacgatgaaatgcttcatggaaaaagagaaaatggaacagctgcataagaaattgtggattcaagctggaggggacagagagaacataccctcgatttgggaagcaccaccgtcgagtgaaccaccaaacaacgtgagcacaaattcggaatgggaagcaccgacccagaaagataaatttccaaagccttgcaattggaggaaaaacgaattcaaaaaatggaccaaattggcatcccaaggccgcggaattgtaaattttgaaagagacaaaattagtaaccattggatccaatactacagacgcatacctcacaggaaactcctcactgcactacaactcagggccaacgtttaccccacgagagaatttctagccaggggtagacaagaccaatacatcaaggcgtgtaggcactgcgatgcggacaacgaatcctgcgcccacatcatcggcaactgcccagtgacacaggacgcccgaatcaagaggcacaattacatctgcgaactgcttctcgaggaggcgaagaagaaggactgggtagtgttcaaggaaccgcacataagggattccaacaaggaactgtacaaacctgacctgatatttgtgaaggatgggcgtgcacttgtcgtggatgtgacagtacggtatgaagcagccaaatcatcgctggaggaagccgctgcagagaaagtgagaaagtacaaacacctggaaacggaagtaagacatctcacgaatgcaaaggacgttacttttgtgggctttcccctaggagcgcgggggaaatggcaccaagataactttaaacttttgactgagcttggcctctccaaatcgaggcaagtgaaaatggcagagactttttccacagtagcgctcttttcatctgtggacattgtacatatgtttgccagtagggccagaaaatctatggttatgtgataataggctgccttctgcggggcttgccttctggccatgcccttcttctctcccttgcacctgtacctcttggtctttgaataaagcctgagtaggaaggaccggtaaaaaaaaaaaaaaaaaaaaaaaaaaaaaaacgttgactaaaaaaaaaaaaaaaaaaaaaaaaaaaaaaaaaaaaaaaaaaaaaaaaaaaaaaaaaaaaaaaaaaaaaa

SEQ ID NO: 11663 - DNA, 4439 bp, synthetic construct
  source 1..4439: mol_type = other DNA
gaaataagagagaaaagaagagtaagaagaaatataagagaattcgccaccatggcttcttgcccgaaacctggccccccggtttcagcaggggcaatgagtttggaaagtggactgaccacccactccgttctcgccatcgaacgtggtcccaattcgttggcaaattccggatcagactttgggggggggggtctggggctaccgttacgcctattgagggtatcggtcggcactcagacctcccgctccgactgggtagacctggtgtcctggagccacccaggacccacgtctaagtcccagcaggttgacctggtgtctttatttcctaaacaccgggttgacctgttatccaaaaacgaccaggtagacctggtggctcaatttttaccatctaaatttccccccaatttggcagaaaatgatttggctttgctggtgaacttagagttctacagatcggatttgcatgtgtatgagtgtgttcataaggctgcacattgggagggattaagtggtttgcctgaggtgtatgaacaacttgcaccacaaccgtgtgtgggagaaactttacattctagcctcccacgagacagtgaactgtttgtgcctgaagaggggagcagcgagaaggagagcgaggacgcgccaaaaacatctcctccgacgcctgggaaacatggtttggaacagactggggaggaaaaagtgatggtgactgttcctgacaaaaatccaccttgtccttgctgtggtacccgggtaaactctgtgttgaatctgattgaacatctgaaagtgtcacacgggaaaaggggggtttgttttcggtgtgcaaaatgtggaaaggaaaggagtaactatcacagtgttgtttgtcattttaagaaatgcaggggtccagagacggagaaagccccagctggggagtggatttgtgaggtatgcaacagagattttacaaccaaaattggcctgggacaacacaagagattggcacacccagcagtgagaaatcaggaaaggatcgttgcttcccaaccgaaagaaacatcaaatagaggtgctcacaaaaggtgctggacaaaggaggaggaagaattactaataagactggaggctcagttcgagggaaacaaaaatattaataagcttattgcagaacacataaccaccaaaacagctaagcagatcagtgacaaaaggcgattgctgtccagaaagccagcagaggagccacgtatggagcctggaacgtgtcatcacaccaggagagcagctgcgagcctgagaacggagcctgagatgagtcatcacgcccaggcagaggacagagataatggacctgggagacgccctctgccaggcagggcagctgccggagggagaacaatggacgagataagacgccaccctgataagggcaacggacagcagagacccaccaagcaaaaatcagaagaacagctgcaggcttactataaaaagacactagaggaacgactttcagctggggcacttaacaccttcccccgagcattcaagcaggtaatggaaggccgggatataaagctagtaatcaatcagacagcgcaggactgcttcggatgcctggaatccataagccaaataagaacggcaacccgagataaaaaggacacggtgacccgggagaaacacccaaagaaaccttttcagaagtggatgaagaagagagcaatcaaaaaaggtaattatcttcggttccagcgtttattttatcttgatagagggaaactggctaaaatcattttagatgatattgaatgcttgtcttgtgacataccactcagtgaaatttattcggtttttaaaacaagatgggaaacaactggtagctttaaaagccttggggactttaaaacttacgggaaggctgacaacactgccttcagagaattaattacggctaaagaaattgagaaaaatgtgcaggaaatgagcaaaggctcggctcccggtccagacgggattactcttggggacgtcgtaaagatggatcccgagttttcccggaccatggagattttcaatttatggttaacaactggtaaaatcccggacatggtgagggggtgcagaaccgttttgattccaaaatcatcaaagccggatcgtttgaaagacattaataactggagacctatcacgatcggttccatcttgctgagactgttctccaggattgtaacagctaggctgagcaaagcgtgccccctgaacccaaggcaaagaggctttatcagagcggcgggatgctctgaaaacttaaaactcctgcaaactataatttggtcggccaaaagagaacacagaccactgggtgttgtattcgtggacatcgccaaggcttttgacaccgtaagccaccagcacatcattcatgctttgcagcaaagagaggtggatccccacatcgtcggtctggtgagcaatatgtacgagaacatcagtacgtatatcaccacaaagaggaacacacacacagacaaaatccagatccgggttggagtaaagcagggtgacccgatgtcgccccttttatttaacctggcaatggaccctctattatgcaagctggaagagagtggcaaaggataccaccgaggacagagcagcatcacagcgatggcatttgcagacgatctggttttgctgagcgactcctgggaaaatatgaatacaaatattagcatactggagaccttctgcaatctgaccggactcaaaacacaggggcaaaagtgccacggcttttacatcaagccgacaaagaagtcttacaccatcaatgactgcgctgcctggactatcaacggcacacccctgaacatgatcgaccccggcgaatctgagaaatacctcggcctgcagtttgacccgtggattggaatagcaaggtccggtctctccacaaaactagatttttggcttcagcggatcgatcaagcaccacttaaacctctgcagaaaactgatattctcaaaacatacaccatccctcggctgatctacatagctgaccactcagaagtgaaaagcgcactactcgaaacccttgaccagaagatccggacagcggtcaaggaatggcttcacctacctccgtgcacctgcgatgccatcctgtactcgagcacgagagacggcggtttgggcatcaccaaattggcaggactgatccccagcgtgcaggcccgtagactgcatcggatcgcacagtcatctgacgatacgatgaaatgcttcatggaaaaagagaaaatggaacagctgcataagaaattgtggattcaagctggaggggacagagagaacataccctcgatttgggaagcaccaccgtcgagtgaaccaccaaacaacgtgagcacaaattcggaatgggaagcaccgacccagaaagataaatttccaaagccttgcaattggaggaaaaacgaattcaaaaaatggaccaaattggcatcccaaggccgcggaattgtaaattttgaaagagacaaaattagtaaccattggatccaatactacagacgcatacctcacaggaaactcctcactgcactacaactcagggccaacgtttaccccacgagagaatttctagccaggggtagacaagaccaatacatcaaggcgtgtaggcactgcgatgcggacaacgaatcctgcgcccacatcatcggcaactgcccagtgacacaggacgcccgaatcaagaggcacaattacatctgcgaactgcttctcgaggaggcgaagaagaaggactgggtagtgttcaaggaaccgcacataagggattccaacaaggaactgtacaaacctgacctgatatttgtgaaggatgggcgtgcacttgtcgtggatgtgacagtacggtatgaagcagccaaatcatcgctggaggaagccgctgcagagaaagtgagaaagtacaaacacctggaaacggaagtaagacatctcacgaatgcaaaggacgttacttttgtgggctttcccctaggagcgcgggggaaatggcaccaagataactttaaacttttgactgagcttggcctctccaaatcgaggcaagtgaaaatggcagagactttttccacagtagcgctcttttcatctgtggacattgtacatatgtttgccagtagggccagaaaatctatggttatgtgataataggctgccttctgcggggcttgccttctggccatgcccttcttctctcccttgcacctgtacctcttggtctttgaataaagcctgagtaggaaggaccggtaaaaaaaaaaaaaaaaaaaaaaaaaaaaaaacgttgactaaaaaaaaaaaaaaaaaaaaaaaaaaaaaaaaaaaaaaaaaaaaaaaaaaaaaaaaaaaaaaaaaaaaaa

SEQ ID NO: 11664 - DNA, 4439 bp, synthetic construct
  source 1..4439: mol_type = other DNA
gaaataagagagaaaagaagagtaagaagaaatataagagaattcgccaccatggcttcttgcccgaaacctggccccccggtttcagcaggggcaatgagtttggaaagtggactgaccacccactccgttctcgccatcgaacgtggtcccaattcgttggcaaattccggatcagactttgggggggggggtctggggctaccgttacgcctattgagggtatcggtcggcactcagacctcccgctccgactgggtagacctggtgtcctggagccacccaggacccacgtctaagtcccagcaggttgacctggtgtctttatttcctaaacaccgggttgacctgttatccaaaaacgaccaggtagacctggtggctcaatttttaccatctaaatttccccccaatttggcagaaaatgatttggctttgctggtgaacttagagttctacagatcggatttgcatgtgtatgagtgtgttcataaggctgcacattgggagggattaagtggtttgcctgaggtgtatgaacaacttgcaccacaaccgtgtgtgggagaaactttacattctagcctcccacgagacagtgaactgtttgtgcctgaagaggggagcagcgagaaggagagcgaggacgcgccaaaaacatctcctccgacgcctgggaaacatggtttggaacagactggggaggaaaaagtgatggtgactgttcctgacaaaaatccaccttgtccttgctgtggtacccgggtaaactctgtgttgaatctgattgaacatctgaaagtgtcacacgggaaaaggggggtttgttttcggtgtgcaaaatgtggaaaggaaaatagtaactatcacagtgttgtttgtcattttaagaaatgcaggggtccagagacggagaaagccccagctggggagtggatttgtgaggtatgcaacagagattttacaaccaaaattggcctgggacaacacaagagattggcacacccagcagtgagaaatcaggaaaggatcgttgcttcccaaccgaaagaaacatcaaatagaggtgctcacaaaaggtgctggacaaaggaggaggaagaattactaataagactggaggctcagttcgagggaaacaaaaatattaataagcttattgcagaacacataaccaccaaaacagctaagcagatcagtgacaaaaggcgattgctgtccagaaagccagcagaggagccacgtatggagcctggaacgtgtcatcacaccaggagagcagctgcgagcctgagaacggagcctgagatgagtcatcacgcccaggcagaggacagagataatggacctgggagacgccctctgccaggcagggcagctgccggagggagaacaatggacgagataagacgccaccctgataagggcaacggacagcagagacccaccaagcaaaaatcagaagaacagctgcaggcttactataaaaagacactagaggaacgactttcagctggggcacttaacaccttcccccgagcattcaagcaggtaatggaaggccgggatataaagctagtaatcaatcagacagcgcaggactgcttcggatgcctggaatccataagccaaataagaacggcaacccgagataaaaagtacacggtgacccgggagaaacacccaaagaaaccttttcagaagtggatgaagaagagagcaatcaaaaaaggtaattatcttcggttccagcgtttattttatcttgatagagggaaactggctaaaatcattttagatgatattgaatgcttgtcttgtgacataccactcagtgaaatttattcggtttttaaaacaagatgggaaacaactggtagctttaaaagccttggggactttaaaacttacgggaaggctgacaacactgccttcagagaattaattacggctaaagaaattgagaaaaatgtgcaggaaatgagcaaaggctcggctcccggtccagacgggattactcttggggacgtcgtaaagatggatcccgagttttcccggaccatggagattttcaatttatggttaacaactggtaaaatcccggacatggtgagggggtgcagaaccgttttgattccaaaatcatcaaagccggatcgtttgaaagacattaataactggagacctatcacgatcggttccatcttgctgagactgttctccaggattgtaacagctaggctgagcaaagcgtgccccctgaacccaaggcaaagaggctttatcagagcggcgggatgctctgaaaacttaaaactcctgcaaactataatttggtcggccaaaagagaacacagaccactgggtgttgtattcgtggacatcgccaaggcttttgacaccgtaagccaccagcacatcattcatgctttgcagcaaagagaggtggatccccacatcgtcggtctggtgagcaatatgtacgagaacatcagtacgtatatcaccacaaagaggaacacacacacagacaaaatccagatccgggttggagtaaagcagggtgacccgatgtcgccccttttatttaacctggcaatggaccctctattatgcaagctggaagagagtggcaaaggataccaccgaggacagagcagcatcacagcgatggcatttgcagacgatctggttttgctgagcgactcctgggaaaatatgaatacaaatattagcatactggagaccttctgcaatctgaccggactcaaaacacaggggcaaaagtgccacggcttttacatcaagccgacaaagaagtcttacaccatcaatgactgcgctgcctggactatcaacggcacacccctgaacatgatcgaccccggcgaatctgagaaatacctcggcctgcagtttgacccgtggattggaatagcaaggtccggtctctccacaaaactagatttttggcttcagcggatcgatcaagcaccacttaaacctctgcagaaaactgatattctcaaaacatacaccatccctcggctgatctacatagctgaccactcagaagtgaaaagcgcactactcgaaacccttgaccagaagatccggacagcggtcaaggaatggcttcacctacctccgtgcacctgcgatgccatcctgtactcgagcacgagagacggcggtttgggcatcaccaaattggcaggactgatccccagcgtgcaggcccgtagactgcatcggatcgcacagtcatctgacgatacgatgaaatgcttcatggaaaaagagaaaatggaacagctgcataagaaattgtggattcaagctggaggggacagagagaacataccctcgatttgggaagcaccaccgtcgagtgaaccaccaaacaacgtgagcacaaattcggaatgggaagcaccgacccagaaagataaatttccaaagccttgcaattggaggaaaaacgaattcaaaaaatggaccaaattggcatcccaaggccgcggaattgtaaattttgaaagagacaaaattagtaaccattggatccaatactacagacgcatacctcacaggaaactcctcactgcactacaactcagggccaacgtttaccccacgagagaatttctagccaggggtagacaagaccaatacatcaaggcgtgtaggcactgcgatgcggacaacgaatcctgcgcccacatcatcggcaactgcccagtgacacaggacgcccgaatcaagaggcacaattacatctgcgaactgcttctcgaggaggcgaagaagaaggactgggtagtgttcaaggaaccgcacataagggattccaacaaggaactgtacaaacctgacctgatatttgtgaaggatgggcgtgcacttgtcgtggatgtgacagtacggtatgaagcagccaaatcatcgctggaggaagccgctgcagagaaagtgagaaagtacaaacacctggaaacggaagtaagacatctcacgaatgcaaaggacgttacttttgtgggctttcccctaggagcgcgggggaaatggcaccaagataactttaaacttttgactgagcttggcctctccaaatcgaggcaagtgaaaatggcagagactttttccacagtagcgctcttttcatctgtggacattgtacatatgtttgccagtagggccagaaaatctatggttatgtgataataggctgccttctgcggggcttgccttctggccatgcccttcttctctcccttgcacctgtacctcttggtctttgaataaagcctgagtaggaaggaccggtaaaaaaaaaaaaaaaaaaaaaaaaaaaaaaacgttgactaaaaaaaaaaaaaaaaaaaaaaaaaaaaaaaaaaaaaaaaaaaaaaaaaaaaaaaaaaaaaaaaaaaaaa

SEQ ID NO: 11665 - DNA, 4439 bp, synthetic construct
  source 1..4439: mol_type = other DNA
gaaataagagagaaaagaagagtaagaagaaatataagagaattcgccaccatggcttcttgcccgaaacctggccccccggtttcagcaggggcaatgagtttggaaagtggactgaccacccactccgttctcgccatcgaacgtggtcccaattcgttggcaaattccggatcagactttgggggggggggtctggggctaccgttacgcctattgagggtatcggtcggcactcagacctcccgctccgactgggtagacctggtgtcctggagccacccaggacccacgtctaagtcccagcaggttgacctggtgtctttatttcctaaacaccgggttgacctgttatccaaaaacgaccaggtagacctggtggctcaatttttaccatctaaatttccccccaatttggcagaaaatgatttggctttgctggtgaacttagagttctacagatcggatttgcatgtgtatgagtgtgttcataaggctgcacattgggagggattaagtggtttgcctgaggtgtatgaacaacttgcaccacaaccgtgtgtgggagaaactttacattctagcctcccacgagacagtgaactgtttgtgcctgaagaggggagcagcgagaaggagagcgaggacgcgccaaaaacatctcctccgacgcctgggaaacatggtttggaacagactggggaggaaaaagtgatggtgactgttcctgacaaaaatccaccttgtccttgctgtggtacccgggtaaactctgtgttgaatctgattgaacatctgaaagtgtcacacgggaaaaggggggtttgttttcggtgtgcaaaatgtggaaaggaaaatagtaactatcacagtgttgtttgtcattttaagaaatgcaggggtccagagacggagaaagccccagctggggagtggatttgtgaggtatgcaacagagattttacaaccaaaattggcctgggacaacacaagagattggcacacccagcagtgagaaatcaggaaaggatcgttgcttcccaaccgaaagaaacatcaaatagaggtgctcacaaaaggtgctggacaaaggaggaggaagaattactaataagactggaggctcagttcgagggaaacaaaaatattaataagcttattgcagaacacataaccaccaaaacagctaagcagatcagtgacaaaaggcgattgctgtccagaaagccagcagaggagccacgtatggagcctggaacgtgtcatcacaccaggagagcagctgcgagcctgagaacggagcctgagatgagtcatcacgcccaggcagaggacagagataatggacctgggagacgccctctgccaggcagggcagctgccggagggagaacaatggacgagataagacgccaccctgataagggcaacggacagcagagacccaccaagcaaaaatcagaagaacagctgcaggcttactataaaaagacactagaggaacgactttcagctggggcacttaacaccttcccccgagcattcaagcaggtaatggaaggccgggatataaagctagtaatcaatcagacagcgcaggactgcttcggatgcctggaatccataagccaaataagaacggcaacccgagataaaaaggacacggtgacccgggagaaacacccaaagaaaccttttcagaagtggatgaagaagagagcaatcaaaaaaggtaattatcttcggttccagcgtttattttatcttgatagagggaaactggctaaaatcattttagatgatattgaatgcttgtcttgtgacataccactcagtgaaatttattcggtttttaaaacaagatgggaaacaactggtagctttaaaagccttggggactttaaaacttacgggaaggctgacaacactgccttcagagaattaattacggctaaagaaattgagaaaaatgtgcaggaaatgagcaaaggctcggctcccggtccagacgggattactcttggggacgtcgtaaagatggatcccgagttttcccggaccatggagattttcaatttatggttaacaactggtaaaatcccggacatggtgagggggtgcagaaccgttttgattccaaaatcatcaaagccggatcgtttgaaagacattaataactggagacctatcacgatcggttccatcttgctgagactgttctccaggattgtaacagctaggctgagcaaagcgtgccccctgaacccaaggcaaagaggctttatcagagcggcgggatgctctgaaaacttaaaactcctgcaaactataatttggtcggccaaaagagaacacagaccactgggtgttgtattcgtggacatcgccaaggcttttgacaccgtaagccaccagcacatcattcatgctttgcagcaaagagaggtggatccccacatcgtcggtctggtgagcaatatgtacgagaacatcagtacgtatatcaccacaaagaggaacacacacacagacaaaatccagatccgggttggagtaaagcagggtgacccgatgtcgccccttttatttaacctggcaatggaccctctattatgcaagctggaagagagtggcaaaggataccaccgaggacagagcagcatcacagcgatggcatttgcagacgatctggttttgctgagcgactcctgggaaaatatgaatacaaatattaagatactggagaccttctgcaatctgaccggactcaaaacacaggggcaaaagtgccacggcttttacatcaagccgacaaagaagtcttacaccatcaatgactgcgctgcctggactatcaacggcacacccctgaacatgatcgaccccggcgaatctgagaaatacctcggcctgcagtttgacccgtggattggaatagcaaggtccggtctctccacaaaactagatttttggcttcagcggatcgatcaagcaccacttaaacctctgcagaaaactgatattctcaaaacatacaccatccctcggctgatctacatagctgaccactcagaagtgaaaagcgcactactcgaaacccttgaccagaagatccggacagcggtcaaggaatggcttcacctacctccgtgcacctgcgatgccatcctgtactcgagcacgagagacggcggtttgggcatcaccaaattggcaggactgatccccagcgtgcaggcccgtagactgcatcggatcgcacagtcatctgacgatacgatgaaatgcttcatggaaaaagagaaaatggaacagctgcataagaaattgtggattcaagctggaggggacagagagaacataccctcgatttgggaagcaccaccgtcgagtgaaccaccaaacaacgtgagcacaaattcggaatgggaagcaccgacccagaaagataaatttccaaagccttgcaattggaggaaaaacgaattcaaaaaatggaccaaattggcatcccaaggccgcggaattgtaaattttgaaagagacaaaattagtaaccattggatccaatactacagacgcatacctcacaggaaactcctcactgcactacaactcagggccaacgtttaccccacgagagaatttctagccaggggtagacaagaccaatacatcaaggcgtgtaggcactgcgatgcggacaacgaatcctgcgcccacatcatcggcaactgcccagtgacacaggacgcccgaatcaagaggcacaattacatctgcgaactgcttctcgaggaggcgaagaagaaggactgggtagtgttcaaggaaccgcacataagggattccaacaaggaactgtacaaacctgacctgatatttgtgaaggatgggcgtgcacttgtcgtggatgtgacagtacggtatgaagcagccaaatcatcgctggaggaagccgctgcagagaaagtgagaaagtacaaacacctggaaacggaagtaagacatctcacgaatgcaaaggacgttacttttgtgggctttcccctaggagcgcgggggaaatggcaccaagataactttaaacttttgactgagcttggcctctccaaatcgaggcaagtgaaaatggcagagactttttccacagtagcgctcttttcatctgtggacattgtacatatgtttgccagtagggccagaaaatctatggttatgtgataataggctgccttctgcggggcttgccttctggccatgcccttcttctctcccttgcacctgtacctcttggtctttgaataaagcctgagtaggaaggaccggtaaaaaaaaaaaaaaaaaaaaaaaaaaaaaaacgttgactaaaaaaaaaaaaaaaaaaaaaaaaaaaaaaaaaaaaaaaaaaaaaaaaaaaaaaaaaaaaaaaaaaaaaa

SEQ ID NO: 11666 - DNA, 4439 bp, synthetic construct
  source 1..4439: mol_type = other DNA
gaaataagagagaaaagaagagtaagaagaaatataagagaattcgccaccatggcttcttgcccgaaacctggccccccggtttcagcaggggcaatgagtttggaaagtggactgaccacccactccgttctcgccatcgaacgtggtcccaattcgttggcaaattccggatcagactttgggggggggggtctggggctaccgttacgcctattgagggtatcggtcggcactcagacctcccgctccgactgggtagacctggtgtcctggagccacccaggacccacgtctaagtcccagcaggttgacctggtgtctttatttcctaaacaccgggttgacctgttatccaaaaacgaccaggtagacctggtggctcaatttttaccatctaaatttccccccaatttggcagaaaatgatttggctttgctggtgaacttagagttctacagatcggatttgcatgtgtatgagtgtgttcataaggctgcacattgggagggattaagtggtttgcctgaggtgtatgaacaacttgcaccacaaccgtgtgtgggagaaactttacattctagcctcccacgagacagtgaactgtttgtgcctgaagaggggagcagcgagaaggagagcgaggacgcgccaaaaacatctcctccgacgcctgggaaacatggtttggaacagactggggaggaaaaagtgatggtgactgttcctgacaaaaatccaccttgtccttgctgtggtacccgggtaaactctgtgttgaatctgattgaacatctgaaagtgtcacacgggaaaaggggggtttgttttcggtgtgcaaaatgtggaaaggaaaatagtaactatcacagtgttgtttgtcattttaagaaatgcaggggtccagagacggagaaagccccagctggggagtggatttgtgaggtatgcaacagagattttacaaccaaaattggcctgggacaacacaagagattggcacacccagcagtgagaaatcaggaaaggatcgttgcttcccaaccgaaagaaacatcaaatagaggtgctcacaaaaggtgctggacaaaggaggaggaagaattactaataagactggaggctcagttcgagggaaacaaaaatattaataagcttattgcagaacacataaccaccaaaacagctaagcagatcagtgacaaaaggcgattgctgtccagaaagccagcagaggagccacgtatggagcctggaacgtgtcatcacaccaggagagcagctgcgagcctgagaacggagcctgagatgagtcatcacgcccaggcagaggacagagataatggacctgggagacgccctctgccaggcagggcagctgccggagggagaacaatggacgagataagacgccaccctgataagggcaacggacagcagagacccaccaagcaaaaatcagaagaacagctgcaggcttactataaaaagacactagaggaacgactttcagctggggcacttaacaccttcccccgagcattcaagcaggtaatggaaggccgggatataaagctagtaatcaatcagacagcgcaggactgcttcggatgcctggaatccataagccaaataagaacggcaacccgagataaaaaggacacggtgacccgggagaaacacccaaagaaaccttttcagaagtggatgaagaagagagcaatcaaaaaaggtaattatcttcggttccagcgtttattttatcttgatagagggaaactggctaaaatcattttagatgatattgaatgcttgtcttgtgacataccactcagtgaaatttattcggtttttaaaacaagatgggaaacaactggtagctttaaaagccttggggactttaaaacttacgggaaggctgacaacactgccttcagagaattaattacggctaaagaaattgagaaaaatgtgcaggaaatgagcaaaggctcggctcccggtccagacgggattactcttggggacgtcgtaaagatggatcccgagttttcccggaccatggagattttcaatttatggttaacaactggtaaaatcccggacatggtgagggggtgcagaaccgttttgattccaaaatcatcaaagccggatcgtttgaaagacattaataactggagacctatcacgatcggttccatcttgctgagactgttctccaggattgtaacagctaggctgagcaaagcgtgccccctgaacccaaggcaaagaggctttatcagagcggcgggatgctctgaaaacttaaaactcctgcaaactataatttggtcggccaaaagagaacacagaccactgggtgttgtattcgtggacatcgccaaggcttttgacaccgtaagccaccagcacatcattcatgctttgcagcaaagagaggtggatccccacatcgtcggtctggtgagcaatatgtacgagaacatcagtacgtatatcaccacaaagaggaacacacacacagacaaaatccagatccgggttggagtaaagcagggtgacccgatgtcgccccttttatttaacctggcaatggaccctctattatgcaagctggaagagagtggcaaaggataccaccgaggacagagcagcatcacagcgatggcatttgcagacgatctggttttgctgagcgactcctgggaaaatatgaatacaaatattagcatactggagaccttctgcaatctgaccggactcaaaacacaggggcaaaagtgccacggcttttacatcaagccgacaaagaagtcttacaccatcaatgactgcgctgcctggactatcaacggcacacccctgaacatgatcgaccccggcgaatctgagaaatacctcggcctgcagtttgacccgtggattggaatagcaaggtccggtctctccacaaaactagatttttggcttcagcggatcgatcaagcaccacttaaacctctgcagaaaactgatattctcaaaacatacaccatccctcggctgatctacatagctgaccactcagaagtgaaaagcgcaagactcgaaacccttgaccagaagatccggacagcggtcaaggaatggcttcacctacctccgtgcacctgcgatgccatcctgtactcgagcacgagagacggcggtttgggcatcaccaaattggcaggactgatccccagcgtgcaggcccgtagactgcatcggatcgcacagtcatctgacgatacgatgaaatgcttcatggaaaaagagaaaatggaacagctgcataagaaattgtggattcaagctggaggggacagagagaacataccctcgatttgggaagcaccaccgtcgagtgaaccaccaaacaacgtgagcacaaattcggaatgggaagcaccgacccagaaagataaatttccaaagccttgcaattggaggaaaaacgaattcaaaaaatggaccaaattggcatcccaaggccgcggaattgtaaattttgaaagagacaaaattagtaaccattggatccaatactacagacgcatacctcacaggaaactcctcactgcactacaactcagggccaacgtttaccccacgagagaatttctagccaggggtagacaagaccaatacatcaaggcgtgtaggcactgcgatgcggacaacgaatcctgcgcccacatcatcggcaactgcccagtgacacaggacgcccgaatcaagaggcacaattacatctgcgaactgcttctcgaggaggcgaagaagaaggactgggtagtgttcaaggaaccgcacataagggattccaacaaggaactgtacaaacctgacctgatatttgtgaaggatgggcgtgcacttgtcgtggatgtgacagtacggtatgaagcagccaaatcatcgctggaggaagccgctgcagagaaagtgagaaagtacaaacacctggaaacggaagtaagacatctcacgaatgcaaaggacgttacttttgtgggctttcccctaggagcgcgggggaaatggcaccaagataactttaaacttttgactgagcttggcctctccaaatcgaggcaagtgaaaatggcagagactttttccacagtagcgctcttttcatctgtggacattgtacatatgtttgccagtagggccagaaaatctatggttatgtgataataggctgccttctgcggggcttgccttctggccatgcccttcttctctcccttgcacctgtacctcttggtctttgaataaagcctgagtaggaaggaccggtaaaaaaaaaaaaaaaaaaaaaaaaaaaaaaacgttgactaaaaaaaaaaaaaaaaaaaaaaaaaaaaaaaaaaaaaaaaaaaaaaaaaaaaaaaaaaaaaaaaaaaaaa

SEQ ID NO: 11667 - DNA, 4439 bp, synthetic construct
  source 1..4439: mol_type = other DNA
gaaataagagagaaaagaagagtaagaagaaatataagagaattcgccaccatggcttcttgcccgaaacctggccccccggtttcagcaggggcaatgagtttggaaagtggactgaccacccactccgttctcgccatcgaacgtggtcccaattcgttggcaaattccggatcagactttgggggggggggtctggggctaccgttacgcctattgagggtatcggtcggcactcagacctcccgctccgactgggtagacctggtgtcctggagccacccaggacccacgtctaagtcccagcaggttgacctggtgtctttatttcctaaacaccgggttgacctgttatccaaaaacgaccaggtagacctggtggctcaatttttaccatctaaatttccccccaatttggcagaaaatgatttggctttgctggtgaacttagagttctacagatcggatttgcatgtgtatgagtgtgttcataaggctgcacattgggagggattaagtggtttgcctgaggtgtatgaacaacttgcaccacaaccgtgtgtgggagaaactttacattctagcctcccacgagacagtgaactgtttgtgcctgaagaggggagcagcgagaaggagagcgaggacgcgccaaaaacatctcctccgacgcctgggaaacatggtttggaacagactggggaggaaaaagtgatggtgactgttcctgacaaaaatccaccttgtccttgctgtggtacccgggtaaactctgtgttgaatctgattgaacatctgaaagtgtcacacgggaaaaggggggtttgttttcggtgtgcaaaatgtggaaaggaaaatagtaactatcacagtgttgtttgtcattttaagaaatgcaggggtccagagacggagaaagccccagctggggagtggatttgtgaggtatgcaacagagattttacaaccaaaattggcctgggacaacacaagagattggcacacccagcagtgagaaatcaggaaaggatcgttgcttcccaaccgaaagaaacatcaaatagaggtgctcacaaaaggtgctggacaaaggaggaggaagaattactaataagactggaggctcagttcgagggaaacaaaaatattaataagcttattgcagaacacataaccaccaaaacagctaagcagatcagtgacaaaaggcgattgctgtccagaaagccagcagaggagccacgtatggagcctggaacgtgtcatcacaccaggagagcagctgcgagcctgagaacggagcctgagatgagtcatcacgcccaggcagaggacagagataatggacctgggagacgccctctgccaggcagggcagctgccggagggagaacaatggacgagataagacgccaccctgataagggcaacggacagcagagacccaccaagcaaaaatcagaagaacagctgcaggcttactataaaaagacactagaggaacgactttcagctggggcacttaacaccttcccccgagcattcaagcaggtaatggaaggccgggatataaagctagtaatcaatcagacagcgcaggactgcttcggatgcctggaatccataagccaaataagaacggcaacccgagataaaaaggacacggtgacccggaagaaacacccaaagaaaccttttcagaagtggatgaagaagagagcaatcaaaaaaggtaattatcttcggttccagcgtttattttatcttgatagagggaaactggctaaaatcattttagatgatattgaatgcttgtcttgtgacataccactcagtgaaatttattcggtttttaaaacaagatgggaaacaactggtagctttaaaagccttggggactttaaaacttacgggaaggctgacaacactgccttcagagaattaattacggctaaagaaattgagaaaaatgtgcaggaaatgagcaaaggctcggctcccggtccagacgggattactcttggggacgtcgtaaagatggatcccgagttttcccggaccatggagattttcaatttatggttaacaactggtaaaatcccggacatggtgagggggtgcagaaccgttttgattccaaaatcatcaaagccggatcgtttgaaagacattaataactggagacctatcacgatcggttccatcttgctgagactgttctccaggattgtaacagctaggctgagcaaagcgtgccccctgaacccaaggcaaagaggctttatcagagcggcgggatgctctgaaaacttaaaactcctgcaaactataatttggtcggccaaaagagaacacagaccactgggtgttgtattcgtggacatcgccaaggcttttgacaccgtaagccaccagcacatcattcatgctttgcagcaaagagaggtggatccccacatcgtcggtctggtgagcaatatgtacgagaacatcagtacgtatatcaccacaaagaggaacacacacacagacaaaatccagatccgggttggagtaaagcagggtgacccgatgtcgccccttttatttaacctggcaatggaccctctattatgcaagctggaagagagtggcaaaggataccaccgaggacagagcagcatcacagcgatggcatttgcagacgatctggttttgctgagcgactcctgggaaaatatgaatacaaatattagcatactggagaccttctgcaatctgaccggactcaaaacacaggggcaaaagtgccacggcttttacatcaagccgacaaagaagtcttacaccatcaatgactgcgctgcctggactatcaacggcacacccctgaacatgatcgaccccggcgaatctgagaaatacctcggcctgcagtttgacccgtggattggaatagcaaggtccggtctctccacaaaactagatttttggcttcagcggatcgatcaagcaccacttaaacctctgcagaaaactgatattctcaaaacatacaccatccctcggctgatctacatagctgaccactcagaagtgaaaagcgcactactcgaaacccttgaccagaagatccggacagcggtcaaggaatggcttcacctacctccgtgcacctgcgatgccatcctgtactcgagcacgagagacggcggtttgggcatcaccaaattggcaggactgatccccagcgtgcaggcccgtagactgcatcggatcgcacagtcatctgacgatacgatgaaatgcttcatggaaaaagagaaaatggaacagctgcataagaaattgtggattcaagctggaggggacagagagaacataccctcgatttgggaagcaccaccgtcgagtgaaccaccaaacaacgtgagcacaaattcggaatgggaagcaccgacccagaaagataaatttccaaagccttgcaattggaggaaaaacgaattcaaaaaatggaccaaattggcatcccaaggccgcggaattgtaaattttgaaagagacaaaattagtaaccattggatccaatactacagacgcatacctcacaggaaactcctcactgcactacaactcagggccaacgtttaccccacgagagaatttctagccaggggtagacaagaccaatacatcaaggcgtgtaggcactgcgatgcggacaacgaatcctgcgcccacatcatcggcaactgcccagtgacacaggacgcccgaatcaagaggcacaattacatctgcgaactgcttctcgaggaggcgaagaagaaggactgggtagtgttcaaggaaccgcacataagggattccaacaaggaactgtacaaacctgacctgatatttgtgaaggatgggcgtgcacttgtcgtggatgtgacagtacggtatgaagcagccaaatcatcgctggaggaagccgctgcagagaaagtgagaaagtacaaacacctggaaacggaagtaagacatctcacgaatgcaaaggacgttacttttgtgggctttcccctaggagcgcgggggaaatggcaccaagataactttaaacttttgactgagcttggcctctccaaatcgaggcaagtgaaaatggcagagactttttccacagtagcgctcttttcatctgtggacattgtacatatgtttgccagtagggccagaaaatctatggttatgtgataataggctgccttctgcggggcttgccttctggccatgcccttcttctctcccttgcacctgtacctcttggtctttgaataaagcctgagtaggaaggaccggtaaaaaaaaaaaaaaaaaaaaaaaaaaaaaaacgttgactaaaaaaaaaaaaaaaaaaaaaaaaaaaaaaaaaaaaaaaaaaaaaaaaaaaaaaaaaaaaaaaaaaaaaa

SEQ ID NO: 11668 - DNA, 4564 bp, synthetic construct
  source 1..4564: mol_type = other DNA
ggtctagttacaactgggcatcgctgcagagatcgcacctcctcgtggtcccgctggtagcccttcgaagggtgactaagtcgatctctgccccaggtacggagccgttgggactcaccagtccaacgtaactcctgcctaaattcggtgaaacaaattcctcggtaaaaagccccatggcttcttgcccgaaacctggccccccggtttcagcaggggcaatgagtttggaaagtggactgaccacccactccgttctcgccatcgaacgtggtcccaattcgttggcaaattccggatcagactttgggggggggggtctggggctaccgttacgcctattgagggtatcggtcggcactcagacctcccgctccgactgggtagacctggtgtcctggagccacccaggacccacgtctaagtcccagcaggttgacctggtgtctttatttcctaaacaccgggttgacctgttatccaaaaacgaccaggtagacctggtggctcaatttttaccatctaaatttccccccaatttggcagaaaatgatttggctttgctggtgaacttagagttctacagatcggatttgcatgtgtatgagggcgttcattttgctgcacattgggagggattaagtggtttgcctgaggtgtatgaacaacttgcaccacaaccgtgtgtgggagaaactttacattctagcctcccacgagacagtgaactgtttgtgcctgaagaggggagcagcgagaaggagagcgaggacgcgccaaaaacatctcctccgacgcctgggaaacatggtaagaggcagactggggaggaaaaagtgatggtgactgttcctgacaaaaatccaccttgtccttgctgtggtacccgggtaaactctgtgttgaatctgattgaacatctgaaagtgtcacacgggaaaaggagggtttgttttcggtgtgcaaaatgtggaaaggaaaatagtaactatcacagtgttgtttgtcattttccaaaatgcaggggtccagagacggagaaagccccagctggggagtggatttgtgaggtatgcaacagagattttacaaccaaaattggcctgggacaacacaagagattggcacacccagcagtgagaaatcaggaaaggatcgttgcttcccaaccgaaagaaacatcaaatagaggtgctcacaaaaggtgctggacaaaggaggaggaagaattactaataagactggaggctcagttcgagggaaacaaaaatattaataagcttattgcagaacacataaccaccaaaacagctaagcagatcagtgacaaaaggcgattgctgtccagaaagccagcagaggagccacgtgaggagcctggaacgtgtcatcacaccaggagagcagctgcgagcctgagaacggagcctgagatgagtcatcacgcccaggcagaggacagagataatggacctgggagacgccctctgccaggcagggcagctgccggagggagaacaatggacgagataagacgccaccctgataagggcaacggacagcagagacccaccaagcaaaaatcagaagaacagctgcaggcttactataaaaagacactagaggaacgactttcagctggggcacttaacaccttcccccgagcattcaagcaggtaatggaaggccgggatataaagctagtaatcaatcagacagcgcaggactgcttcggatgcctggaatccataagccaaataagaacggcaacccgagataaaaaggacacggtgacccgggagaaacacccaaagaaaccttttcagaagtggatgaagaagagagcaatcaaaaaaggtaattatcttcggttccagcgtttattttatcttgatagagggaaactggctaaaatcattttagatgatattgaatgcttgtcttgtgacataccactcagtgaaatttattcggtttttaaaacaagatgggaaacaactggtagctttaaaagccttggggactttaaaacttacgggaaggctgacaacactgccttcagagaattaattacggctaaagaaattgagaaaaatgtgcaggaaatgagcaaaggctcggctcccggtccagacgggattactcttggggacgtcgtaaagatggatcccgagttttcccggaccatggagattttcaatttatggttaacaactggtaaaatcccggacatggtgagggggtgcagaaccgttttgattccaaaatcatcaaagccggatcgtttgaaagacattaataactggagacctatcacgatcggttccatcttgctgagactgttctccaggattgtaacagctaggctgagcaaagcgtgccccctgaacccaaggcaaagaggctttatcagagcggcgggatgctctgaaaacttaaaactcctgcaaactataatttggtcggccaaaagagaacacagaccactgggtgttgtattcgtggacatcgccaaggcttttgacaccgtaagccaccagcacatcattcatgctttgcagcaaagagaggtggatccccacatcgtcggtctggtgagcaatatgtacgagaacatcagtacgtatatcaccacaaagaggaacacacacacagacaaaatccagatccgggttggagtaaagcagggtgacccgatgtcgccccttttatttaacctggcaatggaccctctattatgcaagctggaagagagtggcaaaggataccaccgaggacagagcagcatcacagcgatggcatttgcagacgatctggttttgctgagcgactcctgggaaaatatgaatacaaatattagcatactggagaccttctgcaatctgaccggactcaaaacacaggggcaaaagtgccacggcttttacatcaagccgacaaaggactcttacaccatcaatgactgcgctgcctggactatcaacggcacacccctgaacatgatcgaccccggcgaatctgagaaatacctcggcctgcagtttgacccgtggattggaatagcaaggtccggtctctccacaaaactagatttttggcttcagcggatcgatcaagcaccacttaaacctctgcagaaaactgatattctcaaaacatacaccatccctcggctgatctacatagctgaccactcagaagtgaaaactgcactactcgaaacccttgaccagaagatccggacagcggtcaaggaatggcttcacctacctccgtgcacctgcgatgccatcctgtactcgagcacgagagacggcggtttgggcatcaccaaattggcaggactgatccccagcgtgcaggcccgtagactgcatcggatcgcacagtcatctgacgatacgatgaaatgcttcatggaaaaagagaaaatggaacagctgcataagaaattgtggattcaagctggaggggacagagagaacataccctcgatttgggaagcaccaccgtcgagtgaaccaccaaacaacgtgagcacaaattcggaatgggaagcaccgacccagaaagataaatttccaaagccttgcaattggaggaaaaacgaattcaaaaaatggaccaaattggcatcccaaggccgcggaattgtaaattttgaaagagacaaaattagtaaccattggatccaatactacagacgcatacctcacaggaaactcctcactgcactacaactcagggccaacgtttaccccacgagagaatttctagccaggggtagacaagaccaatacatcaaggcgtgtaggcactgcgatgcggacattgaatcctgcgcccacatcatcggcaactgcccagtgacacaggacgcccgaatcaagaggcacaattacatctgcgaactgcttctcgaggaggcgaagaagaaggactgggtagtgttcaaggaaccgcacataagggattccaacaaggaactgtacaaacctgacctgatatttgtgaaggatgcccgtgcacttgtcgtggatgtgacagtacggtatgaagcagccaaatcatcgctggaggaagccgctgcagagaaagtgagaaagtacaaacacctggaaacggaagtaagacatctcacgaatgcaaaggacgttacttttgtgggctttcccctaggagcgcgggggaaatggcaccaagataactttaaacttttgactgagcttggcctctccaaatcgaggcaagtgaaaatggcagagactttttccacagtagcgctcttttcatctgtggacattgtacatatgtttgccagtagggccagaaaatctatggttatgtgataataggctgccttctgcggggcttgccttctggccatgcccttcttctctcccttgcacctgtacctcttggtctttgaataaagcctgagtaggaaggaccggtaaaaaaaaaaaaaaaaaaaaaaaaaaaaaaacgttgactaaaaaaaaaaaaaaaaaaaaaaaaaaaaaaaaaaaaaaaaaaaaaaaaaaaaaaaaaaaaaaaaaaaaaa

SEQ ID NO: 11669 - DNA, 4564 bp, synthetic construct
  source 1..4564: mol_type = other DNA
ggtctagttacaactgggcatcgctgcagagatcgcacctcctcgtggtcccgctggtagcccttcgaagggtgactaagtcgatctctgccccaggtacggagccgttgggactcaccagtccaacgtaactcctgcctaaattcggtgaaacaaattcctcggtaaaaagccccatggctagctgccctaagcctggacctcctgtgtctgctggcgctatgagcctggagagcggacttaccacccactctgtgctggccatcgagagaggccccaactctctggccaactctggcagcgatttcggcggaggaggacttggcctgcctctgagacttctgagagtttctgtgggcacccagaccagcagaagcgactgggtcgaccttgtgagctggagccaccctggtcctacaagcaagagccagcaggtcgatctggtgagcctgttccccaagcacagagtcgacctgctgagcaagaacgaccaggtcgacttggtggcccagttcctgcctagcaagttccctcccaacctggctgagaacgacttagccctgctggtgaacctggagttctatcgttccgacctgcacgtgtacgagtgcgtgcacttcgctgcccattgggagggcttaagcggccttcctgaggtgtacgaacagctggctccccagccctgtgtaggcgagacattacacagcagcctgcccagagacagcgagctgttcgttccggaagagggctctagcgagaaggagagcgaggacgctcctaagaccagccctcctacccctggcaaacacggcctggagcaaacaggcgaggagaaggtcatggtgaccgtgcccgacaagaaccctccctgtccttgctgtggcacaagagtcaacagcgtgctgaacctcatcgagcacctgaaggtgtcccacggcaagagaggcgtgtgcttcagatgcgccaagtgcggcaaggagaacagcaactaccacagcgtcgtgtgccacttcaagaagtgcagaggccctgagaccgagaaggctcccgctggcgaatggatttgcgaggtgtgcaacagagacttcaccaccaagatcggcctgggccagcacaagcggttagctcaccctgctgtgagaaaccaggagagaatcgtggccagccagcccaaggagacaagcaacaggggcgctcacaagagatgctggaccaaggaggaagaggagctgctcatcagactggaggctcagttcgagggcaacaagaacatcaataagcttatcgccgagcacatcaccacaaagaccgccaagcagatcagcgacaagaggagactgctgtccagaaagcccgccgaggagcctagagaggaacctggtacatgtcaccacaccagaagagccgccgctagcctgagaaccgagcccgaaatgtctcaccacgctcaggccgaggacagagacaacggccctggcaggagacctcttcccggcagagctgctgctggaggcagaaccatggacgagatcaggagacaccccgataagggcaacggccagcagagacccacaaagcagaagtccgaggaacagctccaggcctactacaagaaaaccctggaggagagactgtccgcgggagctctgaacaccttccctagagccttcaaacaagtcatggagggcagagacatcaagctggtgatcaaccagaccgcccaggactgcttcggctgccttgagtctatcagccagatcaggaccgccacacgggataagaaggacaccgtcaccagagagaagcaccccaagaagcccttccagaaatggatgaaggacagggccatcaagaagggcaattacctgagattccagaggctgttctacctggacagaggcaagctggccaggatcatcctggacgacatcgagtgcctgagctgcgacatccctctgagcgagatctacagcgtgttcaagaccagatgggagaccaccggcagcttcaagtctctgggcgacttcaagacatacggcaaggccgacaacaccgccttcagagagctcatcaccgctaaggagatcgagaagaacgtgcaggagatgagcaagggcagcgctcctggccccgatggaattacactgggcgatgtggtgaagatggaccccgagttcagcagaacaatggagatcttcaacctgtggctcaccacaggcaagatccccgacatggtgagaggctgcagaaccgtgcttatccccaagagcagcaagcccgacagactgaaggatatcaacaactggagacccatcaccatcggcagcatcctgctgcggctgttcagccggattgtgaccgctagactgagcaaagcctgtcccctgaaccccagacagagaggcttcatcagagccgctggctgcagcgagaacctgaagctgctccagacaatcatctggagcgccaagagagagcacagacccctgggcgttgttttcgtggacatcgccaaggccttcgacaccgtgtcccatcagcacattatccacgccctgcagcagagggaggtcgaccctcatattgtgggcctggtgtccaacatgtacgagaacatctccacctatattacgaccaagagaaacacccacacagacaagatccagatccgggtcggcgtcaagcagggcgatcctatgtctcctctgctgttcaacctcgccatggaccctctgctctgcaagctcgaggagtctggaaagggctaccatagaggccaatcatcgatcaccgccatggccttcgccgacgacctggtgcttttaagcgacagctgggagaacatgaacaccaacatctctatcctggagacattctgcaaccttaccggcctgaaaacccagggccagaagtgtcatggcttctacatcaaacccaccaaggacagctacaccatcaacgactgcgccgcctggacaatcaacggcacccctctcaacatgatcgaccccggcgagtctgagaagtacctgggcctgcagttcgatccctggatcggcatcgctagaagcggcttgagcaccaagctggacttttggctccaacgcatagaccaggcccccctgaagcctcttcagaaaaccgacattttgaaaacttatacgatccccagactcatctacatcgccgaccactccgaggtcaagaccgctctgctggaaaccctggaccagaaaatcagaaccgccgtcaaggaatggctgcacctgcccccttgcacatgcgacgctatcctgtacagcagcaccagggacggcggcttaggaatcaccaagttagccggcctcatccccagcgtgcaggctaggagactccacagaatcgcccagagcagcgacgacaccatgaagtgcttcatggagaaggaaaagatggagcagctgcacaagaagctgtggatccaagcgggcggagatcgtgagaacattcccagcatctgggaggcccctcccagctcagaacctcccaataacgtgtccaccaattctgaatgggaggctcccacccagaaggataagtttcccaagccctgcaactggcggaagaacgagttcaaaaaatggacaaagctggctagccagggcaggggcatcgtgaacttcgaaagggacaagattagcaaccactggatccagtactacagaagaatcccccacagaaagctcctcaccgccctccagttacgtgcaaacgtgtacccaaccagagaattcctggccagaggcagacaggaccagtacatcaaggcctgccggcactgcgatgccgatatcgagagctgtgctcacatcatcggcaactgccccgtcacccaggacgccagaatcaagagacacaactacatctgcgagttacttctggaggaagccaagaagaaggattgggttgtgttcaaggagccccacatcagagactccaacaaggagctgtacaagccagacctcatcttcgtgaaggacgctagagccctggtggtggacgtcaccgtcagatacgaggctgctaagtccagccttgaggaggctgccgccgagaaagtgcggaagtacaagcacctggaaacagaggtcagacacctcaccaacgccaaggacgttaccttcgtgggcttccccctaggtgctagaggcaaatggcaccaggacaacttcaagctgcttaccgagctgggcctctccaagagccgacaggttaagatggccgagaccttcagcaccgtcgccctgttctcttctgtggacattgtgcacatgttcgcctccagagccagaaagagcatggtgatgtgataataggctgccttctgcggggcttgccttctggccatgcccttcttctctcccttgcacctgtacctcttggtctttgaataaagcctgagtaggaaggaccggtaaaaaaaaaaaaaaaaaaaaaaaaaaaaaaacgttgactaaaaaaaaaaaaaaaaaaaaaaaaaaaaaaaaaaaaaaaaaaaaaaaaaaaaaaaaaaaaaaaaaaaaaa

SEQ ID NO: 11670 - DNA, 4564 bp, synthetic construct
  source 1..4564: mol_type = other DNA
ggtctagttacaactgggcatcgctgcagagatcgcacctcctcgtggtcccgctggtagcccttcgaagggtgactaagtcgatctctgccccaggtacggagccgttgggactcaccagtccaacgtaactcctgcctaaattcggtgaaacaaattcctcggtaaaaagccccatggctagctgccctaagcctggacctcctgtgtctgctggcgctatgagcctggagagcggacttaccacccactctgtgctggccatcgagagaggccccaactctctggccaactctggcagcgatttcggcggaggaggacttggcctgcctctgagacttctgagagtttctgtgggcacccagaccagcagaagcgactgggtcgaccttgtgagctggagccaccctggtcctacaagcaagagccagcaggtcgatctggtgagcctgttccccaagcacagagtcgacctgctgagcaagaacgaccaggtcgacttggtggcccagttcctgcctagcaagttccctcccaacctggctgagaacgacttagccctgctggtgaacctggagttctatcgttccgacctgcacgtgtacgagtgcgtgcacttcgctgcccattgggagggcttaagcggccttcctgaggtgtacgaacagctggctccccagccctgtgtaggcgagacattacacagcagcctgcccagagacagcgagctgttcgttccggaagagggctctagcgagaaggagagcgaggacgctcctaagaccagccctcctacccctggcaaacacggcctggagcaaacaggcgaggagaaggtcatggtgaccgtgcccgacaagaaccctccctgtccttgctgtggcacaagagtcaacagcgtgctgaacctcatcgagcacctgaaggtgtcccacggcaagagaggcgtgtgcttcagatgcgccaagtgcggcaaggagaacagcaactaccacagcgtcgtgtgccacttccctaagtgcagaggccctgagaccgagaaggctcccgctggcgaatggatttgcgaggtgtgcaacagagacttcaccaccaagatcggcctgggccagcacaagcggttagctcaccctgctgtgagaaaccaggagagaatcgtggccagccagcccaaggagacaagcaacaggggcgctcacaagagatgctggaccaaggaggaagaggagctgctcatcagactggaggctcagttcgagggcaacaagaacatcaataagcttatcgccgagcacatcaccacaaagaccgccaagcagatcagcgacaagaggagactgctgtccagaaagcccgccgaggagcctagagaggaacctggtacatgtcaccacaccagaagagccgccgctagcctgagaaccgagcccgaaatgtctcaccacgctcaggccgaggacagagacaacggccctggcaggagacctcttcccggcagagctgctgctggaggcagaaccatggacgagatcaggagacaccccgataagggcaacggccagcagagacccacaaagcagaagtccgaggaacagctccaggcctactacaagaaaaccctggaggagagactgtccgcgggagctctgaacaccttccctagagccttcaaacaagtcatggagggcagagacatcaagctggtgatcaaccagaccgcccaggactgcttcggctgccttgagtctatcagccagatcaggaccgccacacgggataagaaggacaccgtcaccagagagaagcaccccaagaagcccttccagaaatggatgaagaagagggccatcaagaagggcaattacctgagattccagaggctgttctacctggacagaggcaagctggccaagatcatcctggacgacatcgagtgcctgagctgcgacatccctctgagcgagatctacagcgtgttcaagaccagatgggagaccaccggcagcttcaagtctctgggcgacttcaagacatacggcaaggccgacaacaccgccttcagagagctcatcaccgctaaggagatcgagaagaacgtgcaggagatgagcaagggcagcgctcctggccccgatggaattacactgggcgatgtggtgaagatggaccccgagttcagcagaacaatggagatcttcaacctgtggctcaccacaggcaagatccccgacatggtgagaggctgcagaaccgtgcttatccccaagagcagcaagcccgacagactgaaggatatcaacaactggagacccatcaccatcggcagcatcctgctgcggctgttcagccggattgtgaccgctagactgagcaaagcctgtcccctgaaccccagacagagaggcttcatcagagccgctggctgcagcgagaacctgaagctgctccagacaatcatctggagcgccaagagagagcacagacccctgggcgttgttttcgtggacatcgccaaggccttcgacaccgtgtcccatcagcacattatccacgccctgcagcagagggaggtcgaccctcatattgtgggcctggtgtccaacatgtacgagaacatctccacctatattacgaccaagagaaacacccacacagacaagatccagatccgggtcggcgtcaagcagggcgatcctatgtctcctctgctgttcaacctcgccatggaccctctgctctgcaagctcgaggagtctggaaagggctaccatagaggccaatcatcgatcaccgccatggccttcgccgacgacctggtgcttttaagcgacagctgggagaacatgaacaccaacatctctatcctggagacattctgcaaccttaccggcctgaaaacccagggccagaagtgtcatggcttctacatcaaacccaccaaggacagctacaccatcaacgactgcgccgcctggacaatcaacggcacccctctcaacatgatcgaccccggcgagtctgagaagtacctgggcctgcagttcgatccctggatcggcatcgctagaagcggcttgagcaccaagctggacttttggctccaacgcatagaccaggcccccctgaagcctcttcagaaaaccgacattttgaaaacttatacgatccccagactcatctacatcgccgaccactccgaggtcaagaccggcctgctggaaaccctggaccagaaaatcagaaccgccgtcaaggaatggctgcacctgcccccttgcacatgcgacgctatcctgtacagcagcaccagggacggcggcttaggaatcaccaagttagccggcctcatccccagcgtgcaggctaggagactccacagaatcgcccagagcagcgacgacaccatgaagtgcttcatggagaaggaaaagatggagcagctgcacaagaagctgtggatccaagcgggcggagatcgtgagaacattcccagcatctgggaggcccctcccagctcagaacctcccaataacgtgtccaccaattctgaatgggaggctcccacccagaaggataagtttcccaagccctgcaactggcggaagaacgagttcaaaaaatggacaaagctggctagccagggcaggggcatcgtgaacttcgaaagggacaagattagcaaccactggatccagtactacagaagaatcccccacagaaagctcctcaccgccctccagttacgtgcaaacgtgtacccaaccagagaattcctggccagaggcagacaggaccagtacatcaaggcctgccggcactgcgatgccgatatcgagagctgtgctcacatcatcggcaactgccccgtcacccaggacgccagaatcaagagacacaactacatctgcgagttacttctggaggaagccaagaagaaggattgggttgtgttcaaggagccccacatcagagactccaacaaggagctgtacaagccagacctcatcttcgtgaaggacgctagagccctggtggtggacgtcaccgtcagatacgaggctgctaagtccagccttgaggaggctgccgccgagaaagtgcggaagtacaagcacctggaaacagaggtcagacacctcaccaacgccaaggacgttaccttcgtgggcttccccctaggtgctagaggcaaatggcaccaggacaacttcaagctgcttaccgagctgggcctctccaagagccgacaggttaagatggccgagaccttcagcaccgtcgccctgttctcttctgtggacattgtgcacatgttcgcctccagagccagaaagagcatggtgatgtgataataggctgccttctgcggggcttgccttctggccatgcccttcttctctcccttgcacctgtacctcttggtctttgaataaagcctgagtaggaaggaccggtaaaaaaaaaaaaaaaaaaaaaaaaaaaaaaacgttgactaaaaaaaaaaaaaaaaaaaaaaaaaaaaaaaaaaaaaaaaaaaaaaaaaaaaaaaaaaaaaaaaaaaaaa

SEQ ID NO: 11671 - DNA, 4564 bp, synthetic construct
  source 1..4564: mol_type = other DNA
ggtctagttacaactgggcatcgctgcagagatcgcacctcctcgtggtcccgctggtagcccttcgaagggtgactaagtcgatctctgccccaggtacggagccgttgggactcaccagtccaacgtaactcctgcctaaattcggtgaaacaaattcctcggtaaaaagccccatggctagctgccctaagcctggacctcctgtgtctgctggcgctatgagcctggagagcggacttaccacccactctgtgctggccatcgagagaggccccaactctctggccaactctggcagcgatttcggcggaggaggacttggcctgcctctgagacttctgagagtttctgtgggcacccagaccagcagaagcgactgggtcgaccttgtgagctggagccaccctggtcctacaagcaagagccagcaggtcgatctggtgagcctgttccccaagcacagagtcgacctgctgagcaagaacgaccaggtcgacttggtggcccagttcctgcctagcaagttccctcccaacctggctgagaacgacttagccctgctggtgaacctggagttctatcgttccgacctgcacgtgtacgagggcgtgcacttcgctgcccattgggagggcttaagcggccttcctgaggtgtacgaacagctggctccccagccctgtgtaggcgagacattacacagcagcctgcccagagacagcgagctgttcgttccggaagagggctctagcgagaaggagagcgaggacgctcctaagaccagccctcctacccctggcaaacacggcctggagcaaacaggcgaggagaaggtcatggtgaccgtgcccgacaagaaccctccctgtccttgctgtggcacaagagtcaacagcgtgctgaacctcatcgagcacctgaaggtgtcccacggcaagagaagggtgtgcttcagatgcgccaagtgcggcaaggagaacagcaactaccacagcgtcgtgtgccacttccctaagtgcagaggccctgagaccgagaaggctcccgctggcgaatggatttgcgaggtgtgcaacagagacttcaccaccaagatcggcctgggccagcacaagcggttagctcaccctgctgtgagaaaccaggagagaatcgtggccagccagcccaaggagacaagcaacaggggcgctcacaagagatgctggaccaaggaggaagaggagctgctcatcagactggaggctcagttcgagggcaacaagaacatcaataagcttatcgccgagcacatcaccacaaagaccgccaagcagatcagcgacaagaggagactgctgtccagaaagcccgccgaggagcctagagaggaacctggtacatgtcaccacaccagaagagccgccgctagcctgagaaccgagcccgaaatgtctcaccacgctcaggccgaggacagagacaacggccctggcaggagacctcttcccggcagagctgctgctggaggcagaaccatggacgagatcaggagacaccccgataagggcaacggccagcagagacccacaaagcagaagtccgaggaacagctccaggcctactacaagaaaaccctggaggagagactgtccgcgggagctctgaacaccttccctagagccttcaaacaagtcatggagggcagagacatcaagctggtgatcaaccagaccgcccaggactgcttcggctgccttgagtctatcagccagatcaggaccgccacacgggataagaaggacaccgtcaccagagagaagcaccccaagaagcccttccagaaatggatgaaggacagggccatcaagaagggcaattacctgagattccagaggctgttctacctggacagaggcaagctggccaagatcatcctggacgacatcgagtgcctgagctgcgacatccctctgagcgagatctacagcgtgttcaagaccagatgggagaccaccggcagcttcaagtctctgggcgacttcaagacatacggcaaggccgacaacaccgccttcagagagctcatcaccgctaaggagatcgagaagaacgtgcaggagatgagcaagggcagcgctcctggccccgatggaattacactgggcgatgtggtgaagatggaccccgagttcagcagaacaatggagatcttcaacctgtggctcaccacaggcaagatccccgacatggtgagaggctgcagaaccgtgcttatccccaagagcagcaagcccgacagactgaaggatatcaacaactggagacccatcaccatcggcagcatcctgctgcggctgttcagccggattgtgaccgctagactgagcaaagcctgtcccctgaaccccagacagagaggcttcatcagagccgctggctgcagcgagaacctgaagctgctccagacaatcatctggagcgccaagagagagcacagacccctgggcgttgttttcgtggacatcgccaaggccttcgacaccgtgtcccatcagcacattatccacgccctgcagcagagggaggtcgaccctcatattgtgggcctggtgtccaacatgtacgagaacatctccacctatattacgaccaagagaaacacccacacagacaagatccagatccgggtcggcgtcaagcagggcgatcctatgtctcctctgctgttcaacctcgccatggaccctctgctctgcaagctcgaggagtctggaaagggctaccatagaggccaatcatcgatcaccgccatggccttcgccgacgacctggtgcttttaagcgacagctgggagaacatgaacaccaacatctctatcctggagacattctgcaaccttaccggcctgaaaacccagggccagaagtgtcatggcttctacatcaaacccaccaaggacagctacaccatcaacgactgcgccgcctggacaatcaacggcacccctctcaacatgatcgaccccggcgagtctgagaagtacctgggcctgcagttcgatccctggatcggcatcgctagaagcggcttgagcaccaagctggacttttggctccaacgcatagaccaggcccccctgaagcctcttcagaaaaccgacattttgaaaacttatacgatccccagactcatctacatcgccgaccactccgaggtcaagaccgctctgctggaaaccctggaccagaaaatcagaaccgccgtcaaggaatggctgcacctgcccccttgcacatgcgacgctatcctgtacagcagcaccagggacggcggcttaggaatcaccaagttagccggcctcatccccagcgtgcaggctaggagactccacagaatcgcccagagcagcgacgacaccatgaagtgcttcatggagaaggaaaagatggagcagctgcacaagaagctgtggatccaagcgggcggagatcgtgagaacattcccagcatctgggaggcccctcccagctcagaacctcccaataacgtgtccaccaattctgaatgggaggctcccacccagaaggataagtttcccaagccctgcaactggcggaagaacgagttcaaaaaatggacaaagctggctagccagggcaggggcatcgtgaacttcgaaagggacaagattagcaaccactggatccagtactacagaagaatcccccacagaaagctcctcaccgccctccagttacgtgcaaacgtgtacccaaccagagaattcctggccagaggcagacaggaccagtacatcaaggcctgccggcactgcgatgccgatatcgagagctgtgctcacatcatcggcaactgccccgtcacccaggacgccagaatcaagagacacaactacatctgcgagttacttctggaggaagccaagaagaaggattgggttgtgttcaaggagccccacatcagagactccaacaaggagctgtacaagccagacctcatcttcgtgaaggacgctagagccctggtggtggacgtcaccgtcagatacgaggctgctaagtccagccttgaggaggctgccgccgagaaagtgcggaagtacaagcacctggaaacagaggtcagacacctcaccaacgccaaggacgttaccttcgtgggcttccccctaggtgctagaggcaaatggcaccaggacaacttcaagctgcttaccgagctgggcctctccaagagccgacaggttaagatggccgagaccttcagcaccgtcgccctgttctcttctgtggacattgtgcacatgttcgcctccagagccagaaagagcatggtgatgtgataataggctgccttctgcggggcttgccttctggccatgcccttcttctctcccttgcacctgtacctcttggtctttgaataaagcctgagtaggaaggaccggtaaaaaaaaaaaaaaaaaaaaaaaaaaaaaaacgttgactaaaaaaaaaaaaaaaaaaaaaaaaaaaaaaaaaaaaaaaaaaaaaaaaaaaaaaaaaaaaaaaaaaaaaa

SEQ ID NO: 11672 - DNA, 4564 bp, synthetic construct
  source 1..4564: mol_type = other DNA
ggtctagttacaactgggcatcgctgcagagatcgcacctcctcgtggtcccgctggtagcccttcgaagggtgactaagtcgatctctgccccaggtacggagccgttgggactcaccagtccaacgtaactcctgcctaaattcggtgaaacaaattcctcggtaaaaagccccatggctagctgccctaagcctggacctcctgtgtctgctggcgctatgagcctggagagcggacttaccacccactctgtgctggccatcgagagaggccccaactctctggccaactctggcagcgatttcggcggaggaggacttggcctgcctctgagacttctgagagtttctgtgggcacccagaccagcagaagcgactgggtcgaccttgtgagctggagccaccctggtcctacaagcaagagccagcaggtcgatctggtgagcctgttccccaagcacagagtcgacctgctgagcaagaacgaccaggtcgacttggtggcccagttcctgcctagcaagttccctcccaacctggctgagaacgacttagccctgctggtgaacctggagttctatcgttccgacctgcacgtgtacgagtgcgtgcacttcgctgcccattgggagggcttaagcggccttcctgaggtgtacgaacagctggctccccagccctgtgtaggcgagacattacacagcagcctgcccagagacagcgagctgttcgttccggaagagggctctagcgagaaggagagcgaggacgctcctaagaccagccctcctacccctggcaaacacggcctggagcaaacaggcgaggagaaggtcatggtgaccgtgcccgacaagaaccctccctgtccttgctgtggcacaagagtcaacagcgtgctgaacctcatcgagcacctgaaggtgtcccacggcaagagaggcgtgtgcttcagatgcgccaagtgcggcaaggagaacagcaactaccacagcgtcgtgtgccacttccctaagtgcagaggccctgagaccgagaaggctcccgctggcgaatggatttgcgaggtgtgcaacagagacttcaccaccaagatcggcctgggccagcacaagcggttagctcaccctgctgtgagaaaccaggagagaatcgtggccagccagcccaaggagacaagcaacaggggcgctcacaagagatgctggaccaaggaggaagaggagctgctcatcagactggaggctcagttcgagggcaacaagaacatcaataagcttatcgccgagcacatcaccacaaagaccgccaagcagatcagcgacaagaggagactgctgtccagaaagcccgccgaggagcctagagaggaacctggtacatgtcaccacaccagaagagccgccgctagcctgagaaccgagcccgaaatgtctcaccacgctcaggccgaggacagagacaacggccctggcaggagacctcttcccggcagagctgctgctggaggcagaaccatggacgagatcaggagacaccccgataagggcaacggccagcagagacccacaaagcagaagtccgaggaacagctccaggcctactacaagaaaaccctggaggagagactgtccgcgggagctctgaacaccttccctagagccttcaaacaagtcatggagggcagagacatcaagctggtgatcaaccagaccgcccaggactgcttcggctgccttgagtctatcagccagatcaggaccgccacacgggataagaaggacaccgtcaccagagagaagcaccccaagaagcccttccagaaatggatgaaggacagggccatcaagaagggcaattacctgagattccagaggctgttctacctggacagaggcaagctggccaagatcatcctggacgacatcgagtgcctgagctgcgacatccctctgagcgagatctacagcgtgttcaagaccagatgggagaccaccggcagcttcaagtctctgggcgacttcaagacatacggcaaggccgacaacaccgccttcagagagctcatcaccgctaaggagatcgagaagaacgtgcaggagatgagcaagggcagcgctcctggccccgatggaattacactgggcgatgtggtgaagatggaccccgagggcagcagaacaatggagatcttcaacctgtggctcaccacaggcaagatccccgacatggtgagaggctgcagaaccgtgcttatccccaagagcagcaagcccgacagactgaaggatatcaacaactggagacccatcaccatcggcagcatcctgctgcggctgttcagccggattgtgaccgctagactgagcaaagcctgtcccctgaaccccagacagagaggcttcatcagagccgctggctgcagcgagaacctgaagctgctccagacaatcatctggagcgccaagagagagcacagacccctgggcgttgttttcgtggacatcgccaaggccttcgacaccgtgtcccatcagcacattatccacgccctgcagcagagggaggtcgaccctcatattgtgggcctggtgtccaacatgtacgagaacatctccacctatattacgaccaagagaaacacccacacagacaagatccagatccgggtcggcgtcaagcagggcgatcctatgtctcctctgctgttcaacctcgccatggaccctctgctctgcaagctcgaggagtctggaaagggctaccatagaggccaatcatcgatcaccgccatggccttcgccgacgacctggtgcttttaagcgacagctgggagaacatgaacaccaacatctctatcctggagacattctgcaaccttaccggcctgaaaacccagggccagaagtgtcatggcttctacatcaaacccaccaaggacagctacaccatcaacgactgcgccgcctggacaatcaacggcacccctctcaacatgatcgaccccggcgagtctgagaagtacctgggcctgcagttcgatccctggatcggcatcgctagaagcggcttgagcaccaagctggacttttggctccaacgcatagaccaggcccccctgaagcctcttcagaaaaccgacattttgaaaacttatacgatccccagactcatctacatcgccgaccactccgaggtcaagaccgctctgctggaaaccctggaccagaaaatcagaaccgccgtcaaggaatggctgcacctgcccccttgcacatgcgacgctatcctgtacagcagcaccagggacggcggcttaggaatcaccaagttagccggcctcatccccagcgtgcaggctaggagactccacagaatcgcccagagcagcgacgacaccatgaagtgcttcatggagaaggaaaagatggagcagctgcacaagaagctgtggatccaagcgggcggagatcgtgagaacattcccagcatctgggaggcccctcccagctcagaacctcccaataacgtgtccaccaattctgaatgggaggctcccacccagaaggataagtttcccaagccctgcaactggcggaagaacgagttcaaaaaatggacaaagctggctagccagggcaggggcatcgtgaacttcgaaagggacaagattagcaaccactggatccagtactacagaagaatcccccacagaaagctcctcaccgccctccagttacgtgcaaacgtgtacccaaccagagaattcctggccagaggcagacaggaccagtacatcaaggcctgccggcactgcgatgccgatatcgagagctgtgctcacatcatcggcaactgccccgtcacccaggacgccagaatcaagagacacaactacatctgcgagttacttctggaggaagccaagaagaaggattgggttgtgttcaaggagccccacatcagagactccaacaaggagctgtacaagccagacctcatcttcgtgaaggacgctagagccctggtggtggacgtcaccgtcagatacgaggctgctaagtccagccttgaggaggctgccgccgagaaagtgcggaagtacaagcacctggaaacagaggtcagacacctcaccaacgccaaggacgttaccttcgtgggcttccccctaggtgctagaggcaaatggcaccaggacaacttcaagctgcttaccgagctgggcctctccaagagccgacaggttaagatggccgagaccttcagcaccgtcgccctgttctcttctgtggacattgtgcacatgttcgcctccagagccagaaagagcatggtgatgtgataataggctgccttctgcggggcttgccttctggccatgcccttcttctctcccttgcacctgtacctcttggtctttgaataaagcctgagtaggaaggaccggtaaaaaaaaaaaaaaaaaaaaaaaaaaaaaaacgttgactaaaaaaaaaaaaaaaaaaaaaaaaaaaaaaaaaaaaaaaaaaaaaaaaaaaaaaaaaaaaaaaaaaaaaa

SEQ ID NO: 11673 - DNA, 4703 bp, synthetic construct
  source 1..4703: mol_type = other DNA
ggtctagttacaactgggcatcgctgcagagatcgcacctcctcgtggtcccgctggtagcccttcgaagggtgactaagtcgatctctgccccaggtacggagccgttgggactcaccagtccaacgtaactcctgcctaaattcggtgaaacaaattcctcggtaaaaagccccatggcttcttgcccgaaacctggccccccggtttcagcaggggcaatgagtttggaaagtggactgaccacccactccgttctcgccatcgaacgtggtcccaattcgttggcaaattccggatcagactttgggggggggggtctggggctaccgttacgcctattgagggtatcggtcggcactcagacctcccgctccgactgggtagacctggtgtcctggagccacccaggacccacgtctaagtcccagcaggttgacctggtgtctttatttcctaaacaccgggttgacctgttatccaaaaacgaccaggtagacctggtggctcaatttttaccatctaaatttccccccaatttggcagaaaatgatttggctttgctggtgaacttagagttctacagatcggatttgcatgtgtatgagtgtgttcattttgctgcacattgggagggattaagtggtttgcctgaggtgtatgaacaacttgcaccacaaccgtgtgtgggagaaactttacattctagcctcccacgagacagtgaactgtttgtgcctgaagaggggagcagcgagaaggagagcgaggacgcgccaaaaacatctcctccgacgcctgggaaacatggtttggaacagactggggaggaaaaagtgatggtgactgttcctgacaaaaatccaccttgtccttgctgtggtacccgggtaaactctgtgttgaatctgattgaacatctgaaagtgtcacacgggaaaaggggggtttgttttcggtgtgcaaaatgtggaaaggaaaatagtaactatcacagtgttgtttgtcattttaagaaatgcaggggtccagagacggagaaagccccagctggggagtggatttgtgaggtatgcaacagagattttacaaccaaaattggcctgggacaacacaagagattggcacacccagcagtgagaaatcaggaaaggatcgttgcttcccaaccgaaagaaacatcaaatagaggtgctcacaaaaggtgctggacaaaggaggaggaagaattactaataagactggaggctcagttcgagggaaacaaaaatattaataagcttattgcagaacacataaccaccaaaacagctaagcagatcagtgacaaaaggcgattgctgtccagaaagccagcagaggagccacgtgaggagcctggaacgtgtcatcacaccaggagagcagctgcgagcctgagaacggagcctgagatgagtcatcacgcccaggcagaggacagagataatggacctgggagacgccctctgccaggcagggcagctgccggagggagaacaatggacgagataagacgccaccctgataagggcaacggacagcagagacccaccaagcaaaaatcagaagaacagctgcaggcttactataaaaagacactagaggaacgactttcagctggggcacttaacaccttcccccgagcattcaagcaggtaatggaaggccgggatataaagctagtaatcaatcagacagcgcaggactacttcggatgcctggaatccataagccaaataagaacggcaacccgagataaaaaggacacggtgacccggaagaaacacccaaagaaaccttttcagaagtggatgaagaagagagcaatcaaaaaaggtaattatcttcggttccagcgtttattttatcttgatagagggaaactggctaaaatcattttagatgatattgaatgcttgtcttgtgacataccactcagtgaaatttattcggtttttaaaacaagatgggaaacaactggtagctttaaaagccttggggactttaaaacttacgggaaggctgacaacactgccttcagagaattaattacggctaaagaaattgagaaaaatgtgcaggaaatgagcaaaggctcggctcccggtccagacgggattactcttggggacgtcgtaaagatggatcccgagggctcccggaccatggagattttcaatttatggttaacaactggtaaaatcccggacatggtgagggggtgcagaaccgttttgattccaaaatcatcagacccggatcgtttgaaagacattaataactggagacctatcacgatcggttccatcttgctgagactgttctccaggattgtaacagctaggctgagcaaagcgtgccccctgaacccaaggcaaagaggctttatcagagcggcgggatgctctgaaaacttaaaactcctgcaaactataatttggtcggccaaaagagaacacagaccactgggtgttgtattcgtggacatcgccaaggcttttgacaccgtaagccaccagcacatcattcatgctttgcagcaaagagaggtggatccccacatcgtcggtctggtgagcaatatgtacgagaacatcagtacgtatatcaccacaaagaggaacacacacacagacaaaatccagatccgggttggagtaaagcagggtgacccgatgtcgccccttttatttaacctggcaatggaccctctattatgcaagctggaagagagtggcaaaggataccaccgaggacagagcagcatcacagcgatggcatttgcagacgatctggttttgctgagcgactcctgggaaggcatgaatacaaatattagcatactggagaccttctgcaatctgaccggactcaaaacacaggggcaaaagtgccacggcttttacatcaagccgacaaaggactcttacaccatcaatgactgcgctgcctggactatcaacggcacacccctgaacatgatcgaccccggcgaatctgagaaatacctcggcctgcagtttgacccgtggattggaatagcaaggtccggtctctccacaaaactagatttttggcttcagcggatcgatcaagcaccacttaaacctctgcagaaactggatattctcaaaacatacaccatccctcggctgatctacatagctgaccactcagaagtgaaaactgcactactcgaaacccttgaccagaagatccggacagcggtcaaggaatggcttcacctacctccgtgcacctgcgatgccatcctgtactcgagcacgagagacggcggtttgggcatcaccaaattggcaggactgatccccagcgtgcaggcccgtagactgcatcggatcgcacagtcatctgacgatacgatgaaatgcttcatggaaaaagagaaaatggaacagctgcataagaaattgtggattcaagctggaggggacagagagaacataccctcgatttgggaagcaccaccgtcgagtgaaccaccaaacaacgtgagcacaaattcggaatgggaagcaccgacccagaaagataaatttccaaagccttgcaattggaggaaaaacgaattcaaaaaatggaccaaattggcatcccaaggccgcggaattgtaaattttgaaagagacaaaattagtaaccattggatccaatactacagacgcatacctcacaggaaactcctcactgcactacaactcagggccaacgtttaccccacgagagaatttctagccaggggtagacaagaccaatacatcaaggcgtgtaggcactgcgatgcggacattgaatcctgcgcccacatcatcggcaactgcccagtgacacaggacgcccgaatcaagaggcacaattacatctgcgaactgcttctcgaggaggcgaagaagaaggactgggtagtgttcaaggaaccgcacataagggattccaacaaggaactgtacaaacctgacctgatatttgtgaaggatgcccgtgcacttgtcgtggatgtgacagtacggtatgaagcagccaaatcatcgctggaggaagccgctgcagagaaagtgagaaagtacaaacacctggaaacggaagtaagacatctcacgaatgcaaaggacgttacttttgtgggctttcccctaggagcgcgggggaaatggcaccaagataactttaaacttttgactgagcttggcctctccaaatcgaggcaagtgaaaatggcagagactttttccacagtagcgctcttttcatctgtggacattgtacatatgtttgccagtagggccagaaaatctatggttatgtgataataggctgccttctgcggggcttgccttctggccatgcccttcttctctcccttgcacctgtacctcttggtctttgaataaagcctgagtaggaaggaccggtagacatgataagatacattgatgagtttggacaaaccacaactagaatgcagtgaaaaaaatgctttatttgtgaaatttgtgatgctattgctttatttgtaaccattataagctgcaataaacaagttaacaacaacaaaaaaaaaaaaaaaaaaaaaaaaaaaaaaacgttgactaaaaaaaaaaaaaaaaaaaaaaaaaaaaaaaaaaaaaaaaaaaaaaaaaaaaaaaaaaaaaaaaaaaaaa

SEQ ID NO: 11674 - DNA, 4703 bp, synthetic construct
  source 1..4703: mol_type = other DNA
ggtctagttacaactgggcatcgctgcagagatcgcacctcctcgtggtcccgctggtagcccttcgaagggtgactaagtcgatctctgccccaggtacggagccgttgggactcaccagtccaacgtaactcctgcctaaattcggtgaaacaaattcctcggtaaaaagccccatggcttcttgcccgaaacctggccccccggtttcagcaggggcaatgagtttggaaagtggactgaccacccactccgttctcgccatcgaacgtggtcccaattcgttggcaaattccggatcagactttgggggggggggtctggggctaccgttacgcctattgagggtatcggtcggcactcagacctcccgctccgactgggtagacctggtgtcctggagccacccaggacccacgtctaagtcccagcaggttgacctggtgtctttatttcctaaacaccgggttgacctgttatccaaaaacgaccaggtagacctggtggctcaatttttaccatctaaatttccccccaatttggcagaaaatgatttggctttgctggtgaacttagagttctacagatcggatttgcatgtgtatgagtgtgttcattttgctgcacattgggagggattaagtggtttgcctgaggtgtatgaacaacttgcaccacaaccgtgtgtgggagaaactttacattctagcctcccacgagacagtgaactgtttgtgcctgaagaggggagcagcgagaaggagagcgaggacgcgccaaaaacatctcctccgacgcctgggaaacatggtttggaacagactggggaggaaaaagtgatggtgactgttcctgacaaaaatccaccttgtccttgctgtggtacccgggtaaactctgtgttgaatctgattgaacatctgaaagtgtcacacgggaaaaggggggtttgttttcggtgtgcaaaatgtggaaaggaaaatagtaactatcacagtgttgtttgtcattttaagaaatgcaggggtccagagacggagaaagccccagctggggagtggatttgtgaggtatgcaacagagattttacaaccaaaattggcctgggacaacacaagagattggcacacccagcagtgagaaatcaggaaaggatcgttgcttcccaaccgaaagaaacatcaaatagaggtgctcacaaaaggtgctggacaaaggaggaggaagaattactaataagactggaggctcagttcgagggaaacaaaaatattaataagcttattgcagaacacataaccaccaaaacagctaagcagatcagtgacaaaaggcgattgctgtccagaaagccagcagaggagccacgtgaggagcctggaacgtgtcatcacaccaggagagcagctgcgagcctgagaacggagcctgagatgagtcatcacgcccaggcagaggacagagataatggacctgggagacgccctctgccaggcagggcagctgccggagggagaacaatggacgagataagacgccaccctgataagggcaacggacagcagagacccaccaagcaaaaatcagaagaacagctgcaggcttactataaaaagacactagaggaacgactttcagctggggcacttaacaccttcccccgagcattcaagcaggtaatggaaggccgggatataaagctagtaatcaatcagacagcgcaggactacttcggatgcctggaatccataagccaaataagaacggcaacccgagataaaaaggacacggtgacccgggagaaacacccaaagaaaccttttcagaagtggatgaagaagagagcaatcaaaaaaggtaattatcttcggttccagcgtttattttatcttgatagagggaaactggctaaaatcattttagatgatattgaatgcttgtcttgtgacataccactcagtgaaatttattcggtttttaaaacaagatgggaaacaactggtagctttaaaagccttggggactttaaaacttacgggaaggctgacaacactgccttcagagaattaattacggctaaagaaattgagaaaaatgtgcaggaaatgagcaaaggctcggctcccggtccagacgggattactcttggggacgtcgtaaagatggatcccgagggctcccggaccatggagattttcaatttatggttaacaactggtaaaatcccggacatggtgagggggtgcagaaccgttttgattccaaaatcatcagacccggatcgtttgaaagacattaataactggagacctatcacgatcggttccatcttgctgagactgttctccaggattgtaacagctaggctgagcaaagcgtgccccctgaacccaaggcaaagaggctttatcagagcggcgggatgctctgaaaacttaaaactcctgcaaactataatttggtcggccaaaagagaacacagaccactgggtgttgtattcgtggacatcgccaaggcttttgacaccgtaagccaccagcacatcattcatgctttgcagcaaagagaggtggatccccacatcgtcggtctggtgagcaatatgtacgagaacatcagtacgtatatcaccacaaagaggaacacacacacagacaaaatccagatccgggttggagtaaagcagggtgacccgatgtcgccccttttatttaacctggcaatggaccctctattatgcaagctggaagagagtggcaaaggataccaccgaggacagagcagcatcacagcgatggcatttgcagacgatctggttttgctgagcgactcctgggaaggcatgaatacaaatattagcatactggagaccttctgcaatctgaccggactcaaaacacaggggcaaaagtgccacggcttttacatcaagccgacaaagaagtcttacaccatcaatgactgcgctgcctggactatcaacggcacacccctgaacatgatcgaccccggcgaatctgagaaatacctcggcctgcagtttgacccgtggattggaatagcaaggtccggtctctccacaaaactagatttttggcttcagcggatcgatcaagcaccacttaaacctctgcagaaactggatattctcaaaacatacaccatccctcggctgatctacatagctgaccactcagaagtgaaaactgcactactcgaaacccttgaccagaagatccggacagcggtcaaggaatggcttcacctacctccgtgcacctgcgatgccatcctgtactcgagcacgagagacggcggtttgggcatcaccaaattggcaggactgatccccagcgtgcaggcccgtagactgcatcggatcgcacagtcatctgacgatacgatgaaatgcttcatggaaaaagagaaaatggaacagctgcataagaaattgtggattcaagctggaggggacagagagaacataccctcgatttgggaagcaccaccgtcgagtgaaccaccaaacaacgtgagcacaaattcggaatgggaagcaccgacccagaaagataaatttccaaagccttgcaattggaggaaaaacgaattcaaaaaatggaccaaattggcatcccaaggccgcggaattgtaaattttgaaagagacaaaattagtaaccattggatccaatactacagacgcatacctcacaggaaactcctcactgcactacaactcagggccaacgtttaccccacgagagaatttctagccaggggtagacaagaccaatacatcaaggcgtgtaggcactgcgatgcggacattgaatcctgcgcccacatcatcggcaactgcccagtgacacaggacgcccgaatcaagaggcacaattacatctgcgaactgcttctcgaggaggcgaagaagaaggactgggtagtgttcaaggaaccgcacataagggattccaacaaggaactgtacaaacctgacctgatatttgtgaaggatgcccgtgcacttgtcgtggatgtgacagtacggtatgaagcagccaaatcatcgctggaggaagccgctgcagagaaagtgagaaagtacaaacacctggaaacggaagtaagacatctcacgaatgcaaaggacgttacttttgtgggctttcccctaggagcgcgggggaaatggcaccaagataactttaaacttttgactgagcttggcctctccaaatcgaggcaagtgaaaatggcagagactttttccacagtagcgctcttttcatctgtggacattgtacatatgtttgccagtagggccagaaaatctatggttatgtgataataggctgccttctgcggggcttgccttctggccatgcccttcttctctcccttgcacctgtacctcttggtctttgaataaagcctgagtaggaaggaccggtagacatgataagatacattgatgagtttggacaaaccacaactagaatgcagtgaaaaaaatgctttatttgtgaaatttgtgatgctattgctttatttgtaaccattataagctgcaataaacaagttaacaacaacaaaaaaaaaaaaaaaaaaaaaaaaaaaaaaacgttgactaaaaaaaaaaaaaaaaaaaaaaaaaaaaaaaaaaaaaaaaaaaaaaaaaaaaaaaaaaaaaaaaaaaaaa

SEQ ID NO: 11675 - DNA, 4703 bp, synthetic construct
  source 1..4703: mol_type = other DNA
ggtctagttacaactgggcatcgctgcagagatcgcacctcctcgtggtcccgctggtagcccttcgaagggtgactaagtcgatctctgccccaggtacggagccgttgggactcaccagtccaacgtaactcctgcctaaattcggtgaaacaaattcctcggtaaaaagccccatggcttcttgcccgaaacctggccccccggtttcagcaggggcaatgagtttggaaagtggactgaccacccactccgttctcgccatcgaacgtggtcccaattcgttggcaaattccggatcagactttgggggggggggtctggggctaccgttacgcctattgagggtatcggtcggcactcagacctcccgctccgactgggtagacctggtgtcctggagccacccaggacccacgtctaagtcccagcaggttgacctggtgtctttatttcctaaacaccgggttgacctgttatccaaaaacgaccaggtagacctggtggctcaatttttaccatctaaatttccccccaatttggcagaaaatgatttggctttgctggtgaacttagagttctacagatcggatttgcatgtgtatgagtgtgttcattttgctgcacattgggagggattaagtggtttgcctgaggtgtatgaacaacttgcaccacaaccgtgtgtgggagaaactttacattctagcctcccacgagacagtgaactgtttgtgcctgaagaggggagcagcgagaaggagagcgaggacgcgccaaaaacatctcctccgacgcctgggaaacatggtttggaacagactggggaggaaaaagtgatggtgactgttcctgacaaaaatccaccttgtccttgctgtggtacccgggtaaactctgtgttgaatctgattgaacatctgaaagtgtcacacgggaaaaggggggtttgttttcggtgtgcaaaatgtggaaaggaaaatagtaactatcacagtgttgtttgtcattttaagaaatgcaggggtccagagacggagaaagccccagctggggagtggatttgtgaggtatgcaacagagattttacaaccaaaattggcctgggacaacacaagagattggcacacccagcagtgagaaatcaggaaaggatcgttgcttcccaaccgaaagaaacatcaaatagaggtgctcacaaaaggtgctggacaaaggaggaggaagaattactaataagactggaggctcagttcgagggaaacaaaaatattaataagcttattgcagaacacataaccaccaaaacagctaagcagatcagtgacaaaaggcgattgctgtccagaaagccagcagaggagccacgtgaggagcctggaacgtgtcatcacaccaggagagcagctgcgagcctgagaacggagcctgagatgagtcatcacgcccaggcagaggacagagataatggacctgggagacgccctctgccaggcagggcagctgccggagggagaacaatggacgagataagacgccaccctgataagggcaacggacagcagagacccaccaagcaaaaatcagaagaacagctgcaggcttactataaaaagacactagaggaacgactttcagctggggcacttaacaccttcccccgagcattcaagcaggtaatggaaggccgggatataaagctagtaatcaatcagacagcgcaggactacttcggatgcctggaatccataagccaaataagaacggcaacccgagataaaaaggacacggtgacccggaagaaacacccaaagaaaccttttcagaagtggatgaagaagagagcaatcaaaaaaggtaattatcttcggttccagcgtttattttatcttgatagagggaaactggctaaaatcattttagatgatattgaatgcttgtcttgtgacataccactcagtgaaatttattcggtttttaaaacaagatgggaaacaactggtagctttaaaagccttggggactttaaaacttacgggaaggctgacaacactgccttcagagaattaattacggctaaagaaattgagaaaaatgtgcaggaaatgagcaaaggctcggctcccggtccagacgggattactcttggggacgtcgtaaagatggatcccgagggctcccggaccatggagattttcaatttatggttaacaactggtaaaatcccggacatggtgagggggtgcagaaccgttttgattccaaaatcatcagacccggatcgtttgaaagacattaataactggagacctatcacgatcggttccatcttgctgagactgttctccaggattgtaacagctaggctgagcaaagcgtgccccctgaacccaaggcaaagaggctttatcagagcggcgggatgctctgaaaacttaaaactcctgcaaactataatttggtcggccaaaagagaacacagaccactgggtgttgtattcgtggacatcgccaaggcttttgacaccgtaagccaccagcacatcattcatgctttgcagcaaagagaggtggatccccacatcgtcggtctggtgagcaatatgtacgagaacatcagtacgtatatcaccacaaagaggaacacacacacagacaaaatccagatccgggttggagtaaagcagggtgacccgatgtcgccccttttatttaacctggcaatggaccctctattatgcaagctggaagagagtggcaaaggataccaccgaggacagagcagcatcacagcgatggcatttgcagacgatctggttttgctgagcgactcctgggaaggcatgaatacaaatattagcatactggagaccttctgcaatctgaccggactcaaaacacaggggcaaaagtgccacggcttttacatcaagccgacaaaggactcttacaccatcaatgactgcgctgcctggactatcaacggcacacccctgaacatgatcgaccccggcgaatctgagaaatacctcggcctgcagtttgacccgtggattggaatagcaaggtccggtctctccacaaaactagatttttggcttcagcggatcgatcaagcaccacttaaacctctgcagaaactggatattctcaaaacatacaccatccctcggctgatctacatagctgaccactcagaagtgaaaactgcactactcgaaacccttgaccagaagatccggacagcggtcaaggaatggcttcacctacctccgtgcacctgcgatgccatcctgtactcgagcacgagagacggcggtttgggcatcaccaaattggcaggactgatccccagcgtgcaggcccgtagactgcatcggatcgcacagtcatctgacgatacgatgaaatgcttcatggaaaaagagaaaatggaacagctgcataagaaattgtggattcaagctggaggggacagagagaacataccctcgatttgggaagcaccaccgtcgagtgaaccaccaaacaacgtgagcacaaattcggaatgggaagcaccgacccagaaagataaatttccaaagccttgcaattggaggaaaaacgaattcaaaaaatggaccaaattggcatcccaaggccgcggaattgtaaattttgaaagagacaaaattagtaaccattggatccaatactacagacgcatacctcacaggaaactcctcactgcactacaactcagggccaacgtttaccccacgagagaatttctagccaggggtagacaagaccaatacatcaaggcgtgtaggcactgcgatgcggacattgaatcctgcgcccacatcatcggcaactgcccagtgacacaggacgcccgaatcaagaggcacaataagatctgcgaactgcttctcgaggaggcgaagaagaaggactgggtagtgttcaaggaaccgcacataagggattccaacaaggaactgtacaaacctgacctgatatttgtgaaggatgcccgtgcacttgtcgtggatgtgacagtacggtatgaagcagccaaatcatcgctggaggaagccgctgcagagaaagtgagaaagtacaaacacctggaaacggaagtaagacatctcacgaatgcaaaggacgttacttttgtgggctttcccctaggagcgcgggggaaatggcaccaagataactttaaacttttgactgagcttggcctctccaaatcgaggcaagtgaaaatggcagagactttttccacagtagcgctcttttcatctgtggacattgtacatatgtttgccagtagggccagaaaatctatggttatgtgataataggctgccttctgcggggcttgccttctggccatgcccttcttctctcccttgcacctgtacctcttggtctttgaataaagcctgagtaggaaggaccggtagacatgataagatacattgatgagtttggacaaaccacaactagaatgcagtgaaaaaaatgctttatttgtgaaatttgtgatgctattgctttatttgtaaccattataagctgcaataaacaagttaacaacaacaaaaaaaaaaaaaaaaaaaaaaaaaaaaaaacgttgactaaaaaaaaaaaaaaaaaaaaaaaaaaaaaaaaaaaaaaaaaaaaaaaaaaaaaaaaaaaaaaaaaaaaaa

SEQ ID NO: 11676 - DNA, 4703 bp, synthetic construct
  source 1..4703: mol_type = other DNA
ggtctagttacaactgggcatcgctgcagagatcgcacctcctcgtggtcccgctggtagcccttcgaagggtgactaagtcgatctctgccccaggtacggagccgttgggactcaccagtccaacgtaactcctgcctaaattcggtgaaacaaattcctcggtaaaaagccccatggcttcttgcccgaaacctggccccccggtttcagcaggggcaatgagtttggaaagtggactgaccacccactccgttctcgccatcgaacgtggtcccaattcgttggcaaattccggatcagactttgggggggggggtctggggctaccgttacgcctattgagggtatcggtcggcactcagacctcccgctccgactgggtagacctggtgtcctggagccacccaggacccacgtctaagtcccagcaggttgacctggtgtctttatttcctaaacaccgggttgacctgttatccaaaaacgaccaggtagacctggtggctcaatttttaccatctaaatttccccccaatttggcagaaaatgatttggctttgctggtgaacttagagttctacagatcggatttgcatgtgtatgagtgtgttcattttgctgcacattgggagggattaagtggtttgcctgaggtgtatgaacaacttgcaccacaaccgtgtgtgggagaaactttacattctagcctcccacgagacagtgaactgtttgtgcctgaagaggggagcagcgagaaggagagcgaggacgcgccaaaaacatctcctccgacgcctgggaaacatggtttggaacagactggggaggaaaaagtgatggtgactgttcctgacaaaaatccaccttgtccttgctgtggtacccgggtaaactctgtgttgaatctgattgaacatctgaaagtgtcacacgggaaaaggggggtttgttttcggtgtgcaaaatgtggaaaggaaaatagtaactatcacagtgttgtttgtcattttaagaaatgcaggggtccagagacggagaaagccccagctggggagtggatttgtgaggtatgcaacagagattttacaaccaaaattggcctgggacaacacaagagattggcacacccagcagtgagaaatcaggaaaggatcgttgcttcccaaccgaaagaaacatcaaatagaggtgctcacaaaaggtgctggacaaaggaggaggaagaattactaataagactggaggctcagttcgagggaaacaaaaatattaataagcttattgcagaacacataaccaccaaaacagctaagcagatcagtgacaaaaggcgattgctgtccagaaagccagcagaggagccacgtgaggagcctggaacgtgtcatcacaccaggagagcagctgcgagcctgagaacggagcctgagatgagtcatcacgcccaggcagaggacagagataatggacctgggagacgccctctgccaggcagggcagctgccggagggagaacaatggacgagataagacgccaccctgataagggcaacggacagcagagacccaccaagcaaaaatcagaagaacagctgcaggcttactataaaaagacactagaggaacgactttcagctggggcacttaacaccttcccccgagcattcaagcaggtaatggaaggccgggatataaagctagtaatcaatcagacagcgcaggactacttcggatgcctggaatccataagccaaataagaacggcaacccgagataaaaaggacacggtgacccgggagaaacacccaaagaaaccttttcagaagtggatgaagaagagagcaatcaaaaaaggtaattatcttcggttccagcgtttattttatcttgatagagggaaactggctaaaatcattttagatgatattgaatgcttgtcttgtgacataccactcagtgaaatttattcggtttttaaaacaagatgggaaacaactggtagctttaaaagccttggggactttaaaacttacgggaaggctgacaacactgccttcagagaattaattacggctaaagaaattgagaaaaatgtgcaggaaatgagcaaaggctcggctcccggtccagacgggattactcttggggacgtcgtaaagatggatcccgagggctcccggaccatggagattttcaatttatggttaacaactggtaaaatcccggacatggtgagggggtgcagaaccgttttgattccaaaatcatcagacccggatcgtttgaaagacattaataactggagacctatcacgatcggttccatcttgctgagactgttctccaggattgtaacagctaggctgagcaaagcgtgccccctgaacccaaggcaaagaggctttatcagagcggcgggatgctctgaaaacttaaaactcctgcaaactataatttggtcggccaaaagagaacacagaccactgggtgttgtattcgtggacatcgccaaggcttttgacaccgtaagccaccagcacatcattcatgctttgcagcaaagagaggtggatccccacatcgtcggtctggtgagcaatatgtacgagaacatcagtacgtatatcaccacaaagaggaacacacacacagacaaaatccagatccgggttggagtaaagcagggtgacccgatgtcgccccttttatttaacctggcaatggaccctctattatgcaagctggaagagagtggcaaaggataccaccgaggacagagcagcatcacagcgatggcatttgcagacgatctggttttgctgagcgactcctgggaaggcatgaatacaaatattagcatactggagaccttctgcaatctgaccggactcaaaacacaggggcaaaagtgccacggcttttacatcaagccgacaaagaagtcttacaccatcaatgactgcgctgcctggactatcaacggcacacccctgaacatgatcgaccccggcgaatctgagaaatacctcggcctgcagtttgacccgtggattggaatagcaaggtccggtctctccacaaaactagatttttggcttcagcggatcgatcaagcaccacttaaacctctgcagaaactggatattctcaaaacatacaccatccctcggctgatctacatagctgaccactcagaagtgaaaactgcactactcgaaacccttgaccagaagatccggacagcggtcaaggaatggcttcacctacctccgtgcacctgcgatgccatcctgtactcgagcacgagagacggcggtttgggcatcaccaaattggcaggactgatccccagcgtgcaggcccgtagactgcatcggatcgcacagtcatctgacgatacgatgaaatgcttcatggaaaaagagaaaatggaacagctgcataagaaattgtggattcaagctggaggggacagagagaacataccctcgatttgggaagcaccaccgtcgagtgaaccaccaaacaacgtgagcacaaattcggaatgggaagcaccgacccagaaagataaatttccaaagccttgcaattggaggaaaaacgaattcaaaaaatggaccaaattggcatcccaaggccgcggaattgtaaattttgaaagagacaaaattagtaaccattggatccaatactacagacgcatacctcacaggaaactcctcactgcactacaactcagggccaacgtttaccccacgagagaatttctagccaggggtagacaagaccaatacatcaaggcgtgtaggcactgcgatgcggacattgaatcctgcgcccacatcatcggcaactgcccagtgacacaggacgcccgaatcaagaggcacaataagatctgcgaactgcttctcgaggaggcgaagaagaaggactgggtagtgttcaaggaaccgcacataagggattccaacaaggaactgtacaaacctgacctgatatttgtgaaggatgcccgtgcacttgtcgtggatgtgacagtacggtatgaagcagccaaatcatcgctggaggaagccgctgcagagaaagtgagaaagtacaaacacctggaaacggaagtaagacatctcacgaatgcaaaggacgttacttttgtgggctttcccctaggagcgcgggggaaatggcaccaagataactttaaacttttgactgagcttggcctctccaaatcgaggcaagtgaaaatggcagagactttttccacagtagcgctcttttcatctgtggacattgtacatatgtttgccagtagggccagaaaatctatggttatgtgataataggctgccttctgcggggcttgccttctggccatgcccttcttctctcccttgcacctgtacctcttggtctttgaataaagcctgagtaggaaggaccggtagacatgataagatacattgatgagtttggacaaaccacaactagaatgcagtgaaaaaaatgctttatttgtgaaatttgtgatgctattgctttatttgtaaccattataagctgcaataaacaagttaacaacaacaaaaaaaaaaaaaaaaaaaaaaaaaaaaaaacgttgactaaaaaaaaaaaaaaaaaaaaaaaaaaaaaaaaaaaaaaaaaaaaaaaaaaaaaaaaaaaaaaaaaaaaaa

SEQ ID NO: 11677 - DNA, 4703 bp, synthetic construct
  source 1..4703: mol_type = other DNA
ggtctagttacaactgggcatcgctgcagagatcgcacctcctcgtggtcccgctggtagcccttcgaagggtgactaagtcgatctctgccccaggtacggagccgttgggactcaccagtccaacgtaactcctgcctaaattcggtgaaacaaattcctcggtaaaaagccccatggcttcttgcccgaaacctggccccccggtttcagcaggggcaatgagtttggaaagtggactgaccacccactccgttctcgccatcgaacgtggtcccaattcgttggcaaattccggatcagactttgggggggggggtctggggctaccgttacgcctattgagggtatcggtcggcactcagacctcccgctccgactgggtagacctggtgtcctggagccacccaggacccacgtctaagtcccagcaggttgacctggtgtctttatttcctaaacaccgggttgacctgttatccaaaaacgaccaggtagacctggtggctcaatttttaccatctaaatttccccccaatttggcagaaaatgatttggctttgctggtgaacttagagttctacagatcggatttgcatgtgtatgagtgtgttcattttgctgcacattgggagggattaagtggtttgcctgaggtgtatgaacaacttgcaccacaaccgtgtgtgggagaaactttacattctagcctcccacgagacagtgaactgtttgtgcctgaagaggggagcagcgagaaggagagcgaggacgcgccaaaaacatctcctccgacgcctgggaaacatggtttggaacagactggggaggaaaaagtgatggtgactgttcctgacaaaaatccaccttgtccttgctgtggtacccgggtaaactctgtgttgaatctgattgaacatctgaaagtgtcacacgggaaaaggggggtttgttttcggtgtgcaaaatgtggaaaggaaaatagtaactatcacagtgttgtttgtcattttaagaaatgcaggggtccagagacggagaaagccccagctggggagtggatttgtgaggtatgcaacagagattttacaaccaaaattggcctgggacaacacaagagattggcacacccagcagtgagaaatcaggaaaggatcgttgcttcccaaccgaaagaaacatcaaatagaggtgctcacaaaaggtgctggacaaaggaggaggaagaattactaataagactggaggctcagttcgagggaaacaaaaatattaataagcttattgcagaacacataaccaccaaaacagctaagcagatcagtgacaaaaggcgattgctgtccagaaagccagcagaggagccacgtgaggagcctggaacgtgtcatcacaccaggagagcagctgcgagcctgagaacggagcctgagatgagtcatcacgcccaggcagaggacagagataatggacctgggagacgccctctgccaggcagggcagctgccggagggagaacaatggacgagataagacgccaccctgataagggcaacggacagcagagacccaccaagcaaaaatcagaagaacagctgcaggcttactataaaaagacactagaggaacgactttcagctggggcacttaacaccttcccccgagcattcaagcaggtaatggaaggccgggatataaagctagtaatcaatcagacagcgcaggactacttcggatgcctggaatccataagccaaataagaacggcaacccgagataaaaaggacacggtgacccggaagaaacacccaaagaaaccttttcagaagtggatgaagaagagagcaatcaaaaaaggtaattatcttcggttccagcgtttattttatcttgatagagggaaactggctaaaatcattttagatgatattgaatgcttgtcttgtgacataccactcagtgaaatttattcggtttttaaaacaagatgggaaacaactggtagctttaaaagccttggggactttaaaacttacgggaaggctgacaacactgccttcagagaattaattacggctaaagaaattgagaaaaatgtgcaggaaatgagcaaaggctcggctcccggtccagacgggattactcttggggacgtcgtaaagatggatcccgagttttcccggaccatggagattttcaatttatggttaacaactggtaaaatcccggacatggtgagggggtgcagaaccgttttgattccaaaatcatcagacccggatcgtttgaaagacattaataactggagacctatcacgatcggttccatcttgctgagactgttctccaggattgtaacagctaggctgagcaaagcgtgccccctgaacccaaggcaaagaggctttatcagagcggcgggatgctctgaaaacttaaaactcctgcaaactataatttggtcggccaaaagagaacacagaccactgggtgttgtattcgtggacatcgccaaggcttttgacaccgtaagccaccagcacatcattcatgctttgcagcaaagagaggtggatccccacatcgtcggtctggtgagcaatatgtacgagaacatcagtacgtatatcaccacaaagaggaacacacacacagacaaaatccagatccgggttggagtaaagcagggtgacccgatgtcgccccttttatttaacctggcaatggaccctctattatgcaagctggaagagagtggcaaaggataccaccgaggacagagcagcatcacagcgatggcatttgcagacgatctggttttgctgagcgactcctgggaaggcatgaatacaaatattagcatactggagaccttctgcaatctgaccggactcaaaacacaggggcaaaagtgccacggcttttacatcaagccgacaaagaagtcttacaccatcaatgactgcgctgcctggactatcaacggcacacccctgaacatgatcgaccccggcgaatctgagaaatacctcggcctgcagtttgacccgtggattggaatagcaaggtccggtctctccacaaaactagatttttggcttcagcggatcgatcaagcaccacttaaacctctgcagaaactggatattctcaaaacatacaccatccctcggctgatctacatagctgaccactcagaagtgaaaactgcactactcgaaacccttgaccagaagatccggacagcggtcaaggaatggcttcacctacctccgtgcacctgcgatgccatcctgtactcgagcacgagagacggcggtttgggcatcaccaaattggcaggactgatccccagcgtgcaggcccgtagactgcatcggatcgcacagtcatctgacgatacgatgaaatgcttcatggaaaaagagaaaatggaacagctgcataagaaattgtggattcaagctggaggggacagagagaacataccctcgatttgggaagcaccaccgtcgagtgaaccaccaaacaacgtgagcacaaattcggaatgggaagcaccgacccagaaagataaatttccaaagccttgcaattggaggaaaaacgaattcaaaaaatggaccaaattggcatcccaaggccgcggaattgtaaattttgaaagagacaaaattagtaaccattggatccaatactacagacgcatacctcacaggaaactcctcactgcactacaactcagggccaacgtttaccccacgagagaatttctagccaggggtagacaagaccaatacatcaaggcgtgtaggcactgcgatgcggacattgaatcctgcgcccacatcatcggcaactgcccagtgacacaggacgcccgaatcaagaggcacaataagatctgcgaactgcttctcgaggaggcgaagaagaaggactgggtagtgttcaaggaaccgcacataagggattccaacaaggaactgtacaaacctgacctgatatttgtgaaggatgcccgtgcacttgtcgtggatgtgacagtacggtatgaagcagccaaatcatcgctggaggaagccgctgcagagaaagtgagaaagtacaaacacctggaaacggaagtaagacatctcacgaatgcaaaggacgttacttttgtgggctttcccctaggagcgcgggggaaatggcaccaagataactttaaacttttgactgagcttggcctctccaaatcgaggcaagtgaaaatggcagagactttttccacagtagcgctcttttcatctgtggacattgtacatatgtttgccagtagggccagaaaatctatggttatgtgataataggctgccttctgcggggcttgccttctggccatgcccttcttctctcccttgcacctgtacctcttggtctttgaataaagcctgagtaggaaggaccggtagacatgataagatacattgatgagtttggacaaaccacaactagaatgcagtgaaaaaaatgctttatttgtgaaatttgtgatgctattgctttatttgtaaccattataagctgcaataaacaagttaacaacaacaaaaaaaaaaaaaaaaaaaaaaaaaaaaaaacgttgactaaaaaaaaaaaaaaaaaaaaaaaaaaaaaaaaaaaaaaaaaaaaaaaaaaaaaaaaaaaaaaaaaaaaaa

SEQ ID NO: 11678 - DNA, 4703 bp, synthetic construct
  source 1..4703: mol_type = other DNA
ggtctagttacaactgggcatcgctgcagagatcgcacctcctcgtggtcccgctggtagcccttcgaagggtgactaagtcgatctctgccccaggtacggagccgttgggactcaccagtccaacgtaactcctgcctaaattcggtgaaacaaattcctcggtaaaaagccccatggcttcttgcccgaaacctggccccccggtttcagcaggggcaatgagtttggaaagtggactgaccacccactccgttctcgccatcgaacgtggtcccaattcgttggcaaattccggatcagactttgggggggggggtctggggctaccgttacgcctattgagggtatcggtcggcactcagacctcccgctccgactgggtagacctggtgtcctggagccacccaggacccacgtctaagtcccagcaggttgacctggtgtctttatttcctaaacaccgggttgacctgttatccaaaaacgaccaggtagacctggtggctcaatttttaccatctaaatttccccccaatttggcagaaaatgatttggctttgctggtgaacttagagttctacagatcggatttgcatgtgtatgagtgtgttcattttgctgcacattgggagggattaagtggtttgcctgaggtgtatgaacaacttgcaccacaaccgtgtgtgggagaaactttacattctagcctcccacgagacagtgaactgtttgtgcctgaagaggggagcagcgagaaggagagcgaggacgcgccaaaaacatctcctccgacgcctgggaaacatggtttggaacagactggggaggaaaaagtgatggtgactgttcctgacaaaaatccaccttgtccttgctgtggtacccgggtaaactctgtgttgaatctgattgaacatctgaaagtgtcacacgggaaaaggggggtttgttttcggtgtgcaaaatgtggaaaggaaaatagtaactatcacagtgttgtttgtcattttaagaaatgcaggggtccagagacggagaaagccccagctggggagtggatttgtgaggtatgcaacagagattttacaaccaaaattggcctgggacaacacaagagattggcacacccagcagtgagaaatcaggaaaggatcgttgcttcccaaccgaaagaaacatcaaatagaggtgctcacaaaaggtgctggacaaaggaggaggaagaattactaataagactggaggctcagttcgagggaaacaaaaatattaataagcttattgcagaacacataaccaccaaaacagctaagcagatcagtgacaaaaggcgattgctgtccagaaagccagcagaggagccacgtgaggagcctggaacgtgtcatcacaccaggagagcagctgcgagcctgagaacggagcctgagatgagtcatcacgcccaggcagaggacagagataatggacctgggagacgccctctgccaggcagggcagctgccggagggagaacaatggacgagataagacgccaccctgataagggcaacggacagcagagacccaccaagcaaaaatcagaagaacagctgcaggcttactataaaaagacactagaggaacgactttcagctggggcacttaacaccttcccccgagcattcaagcaggtaatggaaggccgggatataaagctagtaatcaatcagacagcgcaggactacttcggatgcctggaatccataagccaaataagaacggcaacccgagataaaaaggacacggtgacccggaagaaacacccaaagaaaccttttcagaagtggatgaagaagagagcaatcaaaaaaggtaattatcttcggttccagcgtttattttatcttgatagagggaaactggctaaaatcattttagatgatattgaatgcttgtcttgtgacataccactcagtgaaatttattcggtttttaaaacaagatgggaaacaactggtagctttaaaagccttggggactttaaaacttacgggaaggctgacaacactgccttcagagaattaattacggctaaagaaattgagaaaaatgtgcaggaaatgagcaaaggctcggctcccggtccagacgggattactcttggggacgtcgtaaagatggatcccgagggctcccggaccatggagattttcaatttatggttaacaactggtaaaatcccggacatggtgagggggtgcagaaccgttttgattccaaaatcatcagacccggatcgtttgaaagacattaataactggagacctatcacgatcggttccatcttgctgagactgttctccaggattgtaacagctaggctgagcaaagcgtgccccctgaacccaaggcaaagaggctttatcagagcggcgggatgctctgaaaacttaaaactcctgcaaactataatttggtcggccaaaagagaacacagaccactgggtgttgtattcgtggacatcgccaaggcttttgacaccgtaagccaccagcacatcattcatgctttgcagcaaagagaggtggatccccacatcgtcggtctggtgagcaatatgtacgagaacatcagtacgtatatcaccacaaagaggaacacacacacagacaaaatccagatccgggttggagtaaagcagggtgacccgatgtcgccccttttatttaacctggcaatggaccctctattatgcaagctggaagagagtggcaaaggataccaccgaggacagagcagcatcacagcgatggcatttgcagacgatctggttttgctgagcgactcctgggaaggcatgaatacaaatattagcatactggagaccttctgcaatctgaccggactcaaaacacaggggcaaaagtgccacggcttttacatcaagccgacaaagaagtcttacaccatcaatgactgcgctgcctggactatcaacggcacacccctgaacatgatcgaccccggcgaatctgagaaatacctcggcctgcagtttgacccgtggattggaatagcaaggtccggtctctccacaaaactagatttttggcttcagcggatcgatcaagcaccacttaaacctctgcagaaaactgatattctcaaaacatacaccatccctcggctgatctacatagctgaccactcagaagtgaaaactgcactactcgaaacccttgaccagaagatccggacagcggtcaaggaatggcttcacctacctccgtgcacctgcgatgccatcctgtactcgagcacgagagacggcggtttgggcatcaccaaattggcaggactgatccccagcgtgcaggcccgtagactgcatcggatcgcacagtcatctgacgatacgatgaaatgcttcatggaaaaagagaaaatggaacagctgcataagaaattgtggattcaagctggaggggacagagagaacataccctcgatttgggaagcaccaccgtcgagtgaaccaccaaacaacgtgagcacaaattcggaatgggaagcaccgacccagaaagataaatttccaaagccttgcaattggaggaaaaacgaattcaaaaaatggaccaaattggcatcccaaggccgcggaattgtaaattttgaaagagacaaaattagtaaccattggatccaatactacagacgcatacctcacaggaaactcctcactgcactacaactcagggccaacgtttaccccacgagagaatttctagccaggggtagacaagaccaatacatcaaggcgtgtaggcactgcgatgcggacattgaatcctgcgcccacatcatcggcaactgcccagtgacacaggacgcccgaatcaagaggcacaataagatctgcgaactgcttctcgaggaggcgaagaagaaggactgggtagtgttcaaggaaccgcacataagggattccaacaaggaactgtacaaacctgacctgatatttgtgaaggatgcccgtgcacttgtcgtggatgtgacagtacggtatgaagcagccaaatcatcgctggaggaagccgctgcagagaaagtgagaaagtacaaacacctggaaacggaagtaagacatctcacgaatgcaaaggacgttacttttgtgggctttcccctaggagcgcgggggaaatggcaccaagataactttaaacttttgactgagcttggcctctccaaatcgaggcaagtgaaaatggcagagactttttccacagtagcgctcttttcatctgtggacattgtacatatgtttgccagtagggccagaaaatctatggttatgtgataataggctgccttctgcggggcttgccttctggccatgcccttcttctctcccttgcacctgtacctcttggtctttgaataaagcctgagtaggaaggaccggtagacatgataagatacattgatgagtttggacaaaccacaactagaatgcagtgaaaaaaatgctttatttgtgaaatttgtgatgctattgctttatttgtaaccattataagctgcaataaacaagttaacaacaacaaaaaaaaaaaaaaaaaaaaaaaaaaaaaaacgttgactaaaaaaaaaaaaaaaaaaaaaaaaaaaaaaaaaaaaaaaaaaaaaaaaaaaaaaaaaaaaaaaaaaaaaa

SEQ ID NO: 11679 - DNA, 4703 bp, synthetic construct
  source 1..4703: mol_type = other DNA
ggtctagttacaactgggcatcgctgcagagatcgcacctcctcgtggtcccgctggtagcccttcgaagggtgactaagtcgatctctgccccaggtacggagccgttgggactcaccagtccaacgtaactcctgcctaaattcggtgaaacaaattcctcggtaaaaagccccatggcttcttgcccgaaacctggccccccggtttcagcaggggcaatgagtttggaaagtggactgaccacccactccgttctcgccatcgaacgtggtcccaattcgttggcaaattccggatcagactttgggggggggggtctggggctaccgttacgcctattgagggtatcggtcggcactcagacctcccgctccgactgggtagacctggtgtcctggagccacccaggacccacgtctaagtcccagcaggttgacctggtgtctttatttcctaaacaccgggttgacctgttatccaaaaacgaccaggtagacctggtggctcaatttttaccatctaaatttccccccaatttggcagaaaatgatttggctttgctggtgaacttagagttctacagatcggatttgcatgtgtatgagtgtgttcattttgctgcacattgggagggattaagtggtttgcctgaggtgtatgaacaacttgcaccacaaccgtgtgtgggagaaactttacattctagcctcccacgagacagtgaactgtttgtgcctgaagaggggagcagcgagaaggagagcgaggacgcgccaaaaacatctcctccgacgcctgggaaacatggtttggaacagactggggaggaaaaagtgatggtgactgttcctgacaaaaatccaccttgtccttgctgtggtacccgggtaaactctgtgttgaatctgattgaacatctgaaagtgtcacacgggaaaaggggggtttgttttcggtgtgcaaaatgtggaaaggaaaatagtaactatcacagtgttgtttgtcattttaagaaatgcaggggtccagagacggagaaagccccagctggggagtggatttgtgaggtatgcaacagagattttacaaccaaaattggcctgggacaacacaagagattggcacacccagcagtgagaaatcaggaaaggatcgttgcttcccaaccgaaagaaacatcaaatagaggtgctcacaaaaggtgctggacaaaggaggaggaagaattactaataagactggaggctcagttcgagggaaacaaaaatattaataagcttattgcagaacacataaccaccaaaacagctaagcagatcagtgacaaaaggcgattgctgtccagaaagccagcagaggagccacgtgaggagcctggaacgtgtcatcacaccaggagagcagctgcgagcctgagaacggagcctgagatgagtcatcacgcccaggcagaggacagagataatggacctgggagacgccctctgccaggcagggcagctgccggagggagaacaatggacgagataagacgccaccctgataagggcaacggacagcagagacccaccaagcaaaaatcagaagaacagctgcaggcttactataaaaagacactagaggaacgactttcagctggggcacttaacaccttcccccgagcattcaagcaggtaatggaaggccgggatataaagctagtaatcaatcagacagcgcaggactacttcggatgcctggaatccataagccaaataagaacggcaacccgagataaaaaggacacggtgacccggaagaaacacccaaagaaaccttttcagaagtggatgaagaagagagcaatcaaaaaaggtaattatcttcggttccagcgtttattttatcttgatagagggaaactggctaaaatcattttagatgatattgaatgcttgtcttgtgacataccactcagtgaaatttattcggtttttaaaacaagatgggaaacaactggtagctttaaaagccttggggactttaaaacttacgggaaggctgacaacactgccttcagagaattaattacggctaaagaaattgagaaaaatgtgcaggaaatgagcaaaggctcggctcccggtccagacgggattactcttggggacgtcgtaaagatggatcccgagggctcccggaccatggagattttcaatttatggttaacaactggtaaaatcccggacatggtgagggggtgcagaaccgttttgattccaaaatcatcagacccggatcgtttgaaagacattaataactggagacctatcacgatcggttccatcttgctgagactgttctccaggattgtaacagctaggctgagcaaagcgtgccccctgaacccaaggcaaagaggctttatcagagcggcgggatgctctgaaaacttaaaactcctgcaaactataatttggtcggccaaaagagaacacagaccactgggtgttgtattcgtggacatcgccaaggcttttgacaccgtaagccaccagcacatcattcatgctttgcagcaaagagaggtggatccccacatcgtcggtctggtgagcaatatgtacgagaacatcagtacgtatatcaccacaaagaggaacacacacacagacaaaatccagatccgggttggagtaaagcagggtgacccgatgtcgccccttttatttaacctggcaatggaccctctattatgcaagctggaagagagtggcaaaggataccaccgaggacagagcagcatcacagcgatggcatttgcagacgatctggttttgctgagcgactcctgggaaaatatgaatacaaatattagcatactggagaccttctgcaatctgaccggactcaaaacacaggggcaaaagtgccacggcttttacatcaagccgacaaagaagtcttacaccatcaatgactgcgctgcctggactatcaacggcacacccctgaacatgatcgaccccggcgaatctgagaaatacctcggcctgcagtttgacccgtggattggaatagcaaggtccggtctctccacaaaactagatttttggcttcagcggatcgatcaagcaccacttaaacctctgcagaaactggatattctcaaaacatacaccatccctcggctgatctacatagctgaccactcagaagtgaaaactgcactactcgaaacccttgaccagaagatccggacagcggtcaaggaatggcttcacctacctccgtgcacctgcgatgccatcctgtactcgagcacgagagacggcggtttgggcatcaccaaattggcaggactgatccccagcgtgcaggcccgtagactgcatcggatcgcacagtcatctgacgatacgatgaaatgcttcatggaaaaagagaaaatggaacagctgcataagaaattgtggattcaagctggaggggacagagagaacataccctcgatttgggaagcaccaccgtcgagtgaaccaccaaacaacgtgagcacaaattcggaatgggaagcaccgacccagaaagataaatttccaaagccttgcaattggaggaaaaacgaattcaaaaaatggaccaaattggcatcccaaggccgcggaattgtaaattttgaaagagacaaaattagtaaccattggatccaatactacagacgcatacctcacaggaaactcctcactgcactacaactcagggccaacgtttaccccacgagagaatttctagccaggggtagacaagaccaatacatcaaggcgtgtaggcactgcgatgcggacattgaatcctgcgcccacatcatcggcaactgcccagtgacacaggacgcccgaatcaagaggcacaataagatctgcgaactgcttctcgaggaggcgaagaagaaggactgggtagtgttcaaggaaccgcacataagggattccaacaaggaactgtacaaacctgacctgatatttgtgaaggatgcccgtgcacttgtcgtggatgtgacagtacggtatgaagcagccaaatcatcgctggaggaagccgctgcagagaaagtgagaaagtacaaacacctggaaacggaagtaagacatctcacgaatgcaaaggacgttacttttgtgggctttcccctaggagcgcgggggaaatggcaccaagataactttaaacttttgactgagcttggcctctccaaatcgaggcaagtgaaaatggcagagactttttccacagtagcgctcttttcatctgtggacattgtacatatgtttgccagtagggccagaaaatctatggttatgtgataataggctgccttctgcggggcttgccttctggccatgcccttcttctctcccttgcacctgtacctcttggtctttgaataaagcctgagtaggaaggaccggtagacatgataagatacattgatgagtttggacaaaccacaactagaatgcagtgaaaaaaatgctttatttgtgaaatttgtgatgctattgctttatttgtaaccattataagctgcaataaacaagttaacaacaacaaaaaaaaaaaaaaaaaaaaaaaaaaaaaaacgttgactaaaaaaaaaaaaaaaaaaaaaaaaaaaaaaaaaaaaaaaaaaaaaaaaaaaaaaaaaaaaaaaaaaaaaa

SEQ ID NO: 11680 - DNA, 4703 bp, synthetic construct
  source 1..4703: mol_type = other DNA
ggtctagttacaactgggcatcgctgcagagatcgcacctcctcgtggtcccgctggtagcccttcgaagggtgactaagtcgatctctgccccaggtacggagccgttgggactcaccagtccaacgtaactcctgcctaaattcggtgaaacaaattcctcggtaaaaagccccatggcttcttgcccgaaacctggccccccggtttcagcaggggcaatgagtttggaaagtggactgaccacccactccgttctcgccatcgaacgtggtcccaattcgttggcaaattccggatcagactttgggggggggggtctggggctaccgttacgcctattgagggtatcggtcggcactcagacctcccgctccgactgggtagacctggtgtcctggagccacccaggacccacgtctaagtcccagcaggttgacctggtgtctttatttcctaaacaccgggttgacctgttatccaaaaacgaccaggtagacctggtggctcaatttttaccatctaaatttccccccaatttggcagaaaatgatttggctttgctggtgaacttagagttctacagatcggatttgcatgtgtatgagtgtgttcattttgctgcacattgggagggattaagtggtttgcctgaggtgtatgaacaacttgcaccacaaccgtgtgtgggagaaactttacattctagcctcccacgagacagtgaactgtttgtgcctgaagaggggagcagcgagaaggagagcgaggacgcgccaaaaacatctcctccgacgcctgggaaacatggtttggaacagactggggaggaaaaagtgatggtgactgttcctgacaaaaatccaccttgtccttgctgtggtacccgggtaaactctgtgttgaatctgattgaacatctgaaagtgtcacacgggaaaaggggggtttgttttcggtgtgcaaaatgtggaaaggaaaatagtaactatcacagtgttgtttgtcattttaagaaatgcaggggtccagagacggagaaagccccagctggggagtggatttgtgaggtatgcaacagagattttacaaccaaaattggcctgggacaacacaagagattggcacacccagcagtgagaaatcaggaaaggatcgttgcttcccaaccgaaagaaacatcaaatagaggtgctcacaaaaggtgctggacaaaggaggaggaagaattactaataagactggaggctcagttcgagggaaacaaaaatattaataagcttattgcagaacacataaccaccaaaacagctaagcagatcagtgacaaaaggcgattgctgtccagaaagccagcagaggagccacgtgaggagcctggaacgtgtcatcacaccaggagagcagctgcgagcctgagaacggagcctgagatgagtcatcacgcccaggcagaggacagagataatggacctgggagacgccctctgccaggcagggcagctgccggagggagaacaatggacgagataagacgccaccctgataagggcaacggacagcagagacccaccaagcaaaaatcagaagaacagctgcaggcttactataaaaagacactagaggaacgactttcagctggggcacttaacaccttcccccgagcattcaagcaggtaatggaaggccgggatataaagctagtaatcaatcagacagcgcaggactacttcggatgcctggaatccataagccaaataagaacggcaacccgagataaaaaggacacggtgacccggaagaaacacccaaagaaaccttttcagaagtggatgaagaagagagcaatcaaaaaaggtaattatcttcggttccagcgtttattttatcttgatagagggaaactggctaaaatcattttagatgatattgaatgcttgtcttgtgacataccactcagtgaaatttattcggtttttaaaacaagatgggaaacaactggtagctttaaaagccttggggactttaaaacttacgggaaggctgacaacactgccttcagagaattaattacggctaaagaaattgagaaaaatgtgcaggaaatgagcaaaggctcggctcccggtccagacgggattactcttggggacgtcgtaaagatggatcccgagggctcccggaccatggagattttcaatttatggttaacaactggtaaaatcccggacatggtgagggggtgcagaaccgttttgattccaaaatcatcagacccggatcgtttgaaagacattaataactggagacctatcacgatcggttccatcttgctgagactgttctccaggattgtaacagctaggctgagcaaagcgtgccccctgaacccaaggcaaagaggctttatcagagcggcgggatgctctgaaaacttaaaactcctgcaaactataatttggtcggccaaaagagaacacagaccactgggtgttgtattcgtggacatcgccaaggcttttgacaccgtaagccaccagcacatcattcatgctttgcagcaaagagaggtggatccccacatcgtcggtctggtgagcaatatgtacgagaacatcagtacgtatatcaccacaaagaggaacacacacacagacaaaatccagatccgggttggagtaaagcagggtgacccgatgtcgccccttttatttaacctggcaatggaccctctattatgcaagctggaagagagtggcaaaggataccaccgaggacagagcagcatcacagcgatggcatttgcagacgatctggttttgctgagcgactcctgggaaggcatgaatacaaatattagcatactggagaccttctgcaatctgaccggactcaaaacacaggggcaaaagtgccacggcttttacatcaagccgacaaagaagtcttacaccatcaatgactgcgctgcctggactatcaacggcacacccctgaacatgatcgaccccggcgaatctgagaaatacctcggcctgcagtttgacccgtggattggaatagcaaggtccggtctctccacaaaactagatttttggcttcagcggatcgatcaagcaccacttaaacctctgcagaaactggatattctcaaaacatacaccatccctcggctgatctacatagctgaccactcagaagtgaaaactgcactactcgaaacccttgaccagaagatccggacagcggtcaaggaatggcttcacctacctccgtgcacctgcgatgccatcctgtactcgagcacgagagacggcggtttgggcatcaccaaattggcaggactgatccccagcgtgcaggcccgtagactgcatcggatcgcacagtcatctgacgatacgatgaaatgcttcatggaaaaagagaaaatggaacagctgcataagaaattgtggattcaagctggaggggacagagagaacataccctcgatttgggaagcaccaccgtcgagtgaaccaccaaacaacgtgagcacaaattcggaatgggaagcaccgacccagaaagataaatttccaaagccttgcaattggaggaaaaacgaattcaaaaaatggaccaaattggcatcccaaggccgcggaattgtaaattttgaaagagacaaaattagtaaccattggatccaatactacagacgcatacctcacaggaaactcctcactgcactacaactcagggccaacgtttaccccacgagagaatttctagccaggggtagacaagaccaatacatcaaggcgtgtaggcactgcgatgcggacattgaatcctgcgcccacatcatcggcaactgcccagtgacacaggacgcccgaatcaagaggcacaattacatctgcgaactgcttctcgaggaggcgaagaagaaggactgggtagtgttcaaggaaccgcacataagggattccaacaaggaactgtacaaacctgacctgatatttgtgaaggatgcccgtgcacttgtcgtggatgtgacagtacggtatgaagcagccaaatcatcgctggaggaagccgctgcagagaaagtgagaaagtacaaacacctggaaacggaagtaagacatctcacgaatgcaaaggacgttacttttgtgggctttcccctaggagcgcgggggaaatggcaccaagataactttaaacttttgactgagcttggcctctccaaatcgaggcaagtgaaaatggcagagactttttccacagtagcgctcttttcatctgtggacattgtacatatgtttgccagtagggccagaaaatctatggttatgtgataataggctgccttctgcggggcttgccttctggccatgcccttcttctctcccttgcacctgtacctcttggtctttgaataaagcctgagtaggaaggaccggtagacatgataagatacattgatgagtttggacaaaccacaactagaatgcagtgaaaaaaatgctttatttgtgaaatttgtgatgctattgctttatttgtaaccattataagctgcaataaacaagttaacaacaacaaaaaaaaaaaaaaaaaaaaaaaaaaaaaaacgttgactaaaaaaaaaaaaaaaaaaaaaaaaaaaaaaaaaaaaaaaaaaaaaaaaaaaaaaaaaaaaaaaaaaaaaa

SEQ ID NO: 11681 - DNA, 4703 bp, synthetic construct
  source 1..4703: mol_type = other DNA
ggtctagttacaactgggcatcgctgcagagatcgcacctcctcgtggtcccgctggtagcccttcgaagggtgactaagtcgatctctgccccaggtacggagccgttgggactcaccagtccaacgtaactcctgcctaaattcggtgaaacaaattcctcggtaaaaagccccatggcttcttgcccgaaacctggccccccggtttcagcaggggcaatgagtttggaaagtggactgaccacccactccgttctcgccatcgaacgtggtcccaattcgttggcaaattccggatcagactttgggggggggggtctggggctaccgttacgcctattgagggtatcggtcggcactcagacctcccgctccgactgggtagacctggtgtcctggagccacccaggacccacgtctaagtcccagcaggttgacctggtgtctttatttcctaaacaccgggttgacctgttatccaaaaacgaccaggtagacctggtggctcaatttttaccatctaaatttccccccaatttggcagaaaatgatttggctttgctggtgaacttagagttctacagatcggatttgcatgtgtatgagtgtgttcattttgctgcacattgggagggattaagtggtttgcctgaggtgtatgaacaacttgcaccacaaccgtgtgtgggagaaactttacattctagcctcccacgagacagtgaactgtttgtgcctgaagaggggagcagcgagaaggagagcgaggacgcgccaaaaacatctcctccgacgcctgggaaacatggtttggaacagactggggaggaaaaagtgatggtgactgttcctgacaaaaatccaccttgtccttgctgtggtacccgggtaaactctgtgttgaatctgattgaacatctgaaagtgtcacacgggaaaaggggggtttgttttcggtgtgcaaaatgtggaaaggaaaatagtaactatcacagtgttgtttgtcattttaagaaatgcaggggtccagagacggagaaagccccagctggggagtggatttgtgaggtatgcaacagagattttacaaccaaaattggcctgggacaacacaagagattgtggcacccagcagtgagaaatcaggaaaggatcgttgcttcccaaccgaaagaaacatcaaatagaggtgctcacaaaaggtgctggacaaaggaggagagggaattactaataagactggaggctcagttcgagggaaacaaaaatattaataagcttattgcagaacacataaccaccaaaacagctaagcagatcagtgacaaaaggcgattgctgtccagaaagccagcagaggagccacgtatgatgcctggaacgtgtcatcacaccaggagagcagctgcgagcctgagaacggagcctgagatgagtcatcacgcccaggcagaggacagagataatggacctgggagacgccctctgccaggcagggcagctgccggagggagaacaatggacgagataagacgccaccctgataagggcaacggacagcagagacccaccaagcaaaaatcagaagaacagctgcaggcttactataaaaagacactagaggaacgactttcagctggggcacttaacaccttcccccgagcattcaagcaggtaatggaaggccgggatataaagctagtaatcaatcagacagcgcaggactgcttcggatgcctggaatccataagccaaataagaacggcaacccgagataaaaaggacacggtgacccgggagaaacacccaaagaaaccttttcagaagtggatgaagaagagagcaatcaaaaaaggtaattatcttcggttccagcgtttattttatcttgatagagggaaactggctaaaatcattttagatgatattgaatgcttgtcttgtgacataccactcagtgaaatttattcggtttttaaaacaagatgggaaacaactggtagctttaaaagccttggggactttaaaacttacgggaaggctgacaacactgccttcagagaattaattacggctaaagaaattgagaaaaatgtgcaggaaatgagcaaaggctcggctcccggtccagacgggattactcttggggacgtcgtaaagatggatcccgagggctcccggaccatggagattttcaatttatggttaacaactggtaaaatcccggacatggtgagggggtgcagaaccgttttgattccaaaatcatcagacccggatcgtttgaaagacattaataactggagacctatcacgatcggttccatcttgctgagactgttctccaggattgtaacagctaggctgagcaaagcgtgccccctgaacccaaggcaaagaggctttatcagagcggcgggatgctctgaaaacttaaaactcctgcaaactataatttggtcggccaaaagagaacacagaccactgggtgttgtattcgtggacatcgccaaggcttttgacaccgtaagccaccagcacatcattcatgctttgcagcaaagagaggtggatccccacatcgtcggtctggtgagcaatatgtacgagaacatcagtacgtatatcaccacaaagaggaacacacacacagacaaaatccagatccgggttggagtaaagcagggtgacccgatgtcgccccttttatttaacctggcaatggaccctctattatgcaagctggaagagagtggcaaaggataccaccgaggacagagcagcatcacagcgatggcatttgcagacgatctggttttgctgagcgactcctgggaaaatatgaatacaaatattagcatactggagaccttctgcaatctgaccggactcaaaacacaggggcaaaagtgccacggcttttacatcaagccgacaaagaagtcttacaccatcaatgactgcgctgcctggactatcaacggcacacccctgaacatgatcgaccccggcgaatctgagaaatacctcggcctgcagtttgacccgtggattggaatagcaaggtccggtctctccacaaaactagatttttggcttcagcggatcgatcaagcaccacttaaacctctgcagaaaactgatattctcaaaacatacaccatccctcggctgatctacatagctgaccactcagaagtgaaaactgcactactcgaaacccttgaccagaagatccggacagcggtcaaggaatggcttcacctacctccgtgcacctgcgatgccatcctgtactcgagcacgagagacggcggtttgggcatcaccaaattggcaggactgatccccagcgtgcaggcccgtagactgcatcggatcgcacagtcatctgacgatacgatgaaatgcttcatggaaaaagagaaaatggaacagctgcataagaaattgtggattcaagctggaggggacagagagaacataccctcgatttgggaagcaccaccgtcgagtgaaccaccaaacaacgtgagcacaaattcggaatgggaagcaccgacccagaaagataaatttccaaagccttgcaattggaggaaaaacgaattcaaaaaatggaccaaattggcatcccaaggccgcggaattgtaaattttgaaagagacaaaattagtaaccattggatccaatactacagacgcatacctcacaggaaactcctcactgcactacaactcagggccaacgtttaccccacgagagaatttctagccaggggtagacaagaccaatacatcaaggcgtgtaggcactgcgatgcggacaacgaatcctgcgcccacatcatcggcaactgcccagtgacacaggacgcccgaatcaagaggcacaattacatctgcgaactgcttctcgaggaggcgaagaagaaggactgggtagtgttcaaggaaccgcacataagggattccaacaaggaactgtacaaacctgacctgatatttgtgaaggatgcccgtgcacttgtcgtggatgtgacagtacggtatgaagcagccaaatcatcgctggaggaagccgctgcagagaaagtgagaaagtacaaacacctggaaacggaagtaagacatctcacgaatgcaaaggacgttacttttgtgggctttcccctaggagcgcgggggaaatggcaccaagataactttaaacttttgactgagcttggcctctccaaatcgaggcaagtgaaaatggcagagactttttccacagtagcgctcttttcatctgtggacattgtacatatgtttgccagtagggccagaaaatctatggttatgtgataataggctgccttctgcggggcttgccttctggccatgcccttcttctctcccttgcacctgtacctcttggtctttgaataaagcctgagtaggaaggaccggtagacatgataagatacattgatgagtttggacaaaccacaactagaatgcagtgaaaaaaatgctttatttgtgaaatttgtgatgctattgctttatttgtaaccattataagctgcaataaacaagttaacaacaacaaaaaaaaaaaaaaaaaaaaaaaaaaaaaaacgttgactaaaaaaaaaaaaaaaaaaaaaaaaaaaaaaaaaaaaaaaaaaaaaaaaaaaaaaaaaaaaaaaaaaaaaa

SEQ ID NO: 11682 - DNA, 4703 bp, synthetic construct
  source 1..4703: mol_type = other DNA
ggtctagttacaactgggcatcgctgcagagatcgcacctcctcgtggtcccgctggtagcccttcgaagggtgactaagtcgatctctgccccaggtacggagccgttgggactcaccagtccaacgtaactcctgcctaaattcggtgaaacaaattcctcggtaaaaagccccatggcttcttgcccgaaacctggccccccggtttcagcaggggcaatgagtttggaaagtggactgaccacccactccgttctcgccatcgaacgtggtcccaattcgttggcaaattccggatcagactttgggggggggggtctggggctaccgttacgcctattgagggtatcggtcggcactcagacctcccgctccgactgggtagacctggtgtcctggagccacccaggacccacgtctaagtcccagcaggttgacctggtgtctttatttcctaaacaccgggttgacctgttatccaaaaacgaccaggtagacctggtggctcaatttttaccatctaaatttccccccaatttggcagaaaatgatttggctttgctggtgaacttagagttctacagatcggatttgcatgtgtatgagtgtgttcattttgctgcacattgggagggattaagtggtttgcctgaggtgtatgaacaacttgcaccacaaccgtgtgtgggagaaactttacattctagcctcccacgagacagtgaactgtttgtgcctgaagaggggagcagcgagaaggagagcgaggacgcgccaaaaacatctcctccgacgcctgggaaacatggtttggaacagactggggaggaaaaagtgatggtgactgttcctgacaaaaatccaccttgtccttgctgtggtacccgggtaaactctgtgttgaatctgattgaacatctgaaagtgtcacacgggaaaaggggggtttgttttcggtgtgcaaaatgtggaaaggaaaatagtaactatcacagtgttgtttgtcattttaagaaatgcaggggtccagagacggagaaagccccagctggggagtggatttgtgaggtatgcaacagagattttacaaccaaaattggcctgggacaacacaagagaaggtggcacccagcagtgagaaatcaggaaaggatcgttgcttcccaaccgaaagaaacatcaaatagaggtgctcacaaaaggtgctggacaaaggaggagagggaattactaataagactggaggctcagttcgagggaaacaaaaatattaataagcttattgcagaacacataaccaccaaaacagctaagcagatcagtgacaaaaggcgattgctgtccagaaagccagcagaggagccacgtatgatgcctggaacgtgtcatcacaccaggagagcagctgcgagcctgagaacggagcctgagatgagtcatcacgcccaggcagaggacagagataatggacctgggagacgccctctgccaggcagggcagctgccggagggagaacaatggacgagataagacgccaccctgataagggcaacggacagcagagacccaccaagcaaaaatcagaagaacagctgcaggcttactataaaaagacactagaggaacgactttcagctggggcacttaacaccttcccccgagcattcaagcaggtaatggaaggccgggatataaagctagtaatcaatcagacagcgcaggactgcttcggatgcctggaatccataagccaaataagaacggcaacccgagataaaaaggacacggtgacccgggagaaacacccaaagaaaccttttcagaagtggatgaagaagagagcaatcaaaaaaggtaattatcttcggttccagcgtttattttatcttgatagagggaaactggctaaaatcattttagatgatattgaatgcttgtcttgtgacataccactcagtgaaatttattcggtttttaaaacaagatgggaaacaactggtagctttaaaagccttggggactttaaaacttacgggaaggctgacaacactgccttcagagaattaattacggctaaagaaattgagaaaaatgtgcaggaaatgagcaaaggctcggctcccggtccagacgggattactcttggggacgtcgtaaagatggatcccgagggctcccggaccatggagattttcaatttatggttaacaactggtaaaatcccggacatggtgagggggtgcagaaccgttttgattccaaaatcatcaaagccggatcgtttgaaagacattaataactggagacctatcacgatcggttccatcttgctgagactgttctccaggattgtaacagctaggctgagcaaagcgtgccccctgaacccaaggcaaagaggctttatcagagcggcgggatgctctgaaaacttaaaactcctgcaaactataatttggtcggccaaaagagaacacagaccactgggtgttgtattcgtggacatcgccaaggcttttgacaccgtaagccaccagcacatcattcatgctttgcagcaaagagaggtggatccccacatcgtcggtctggtgagcaatatgtacgagaacatcagtacgtatatcaccacaaagaggaacacacacacagacaaaatccagatccgggttggagtaaagcagggtgacccgatgtcgccccttttatttaacctggcaatggaccctctattatgcaagctggaagagagtggcaaaggataccaccgaggacagagcagcatcacagcgatggcatttgcagacgatctggttttgctgagcgactcctgggaaaatatgaatacaaatattagcatactggagaccttctgcaatctgaccggactcaaaacacaggggcaaaagtgccacggcttttacatcaagccgacaaagaagtcttacaccatcaatgactgcgctgcctggactatcaacggcacacccctgaacatgatcgaccccggcgaatctgagaaatacctcggcctgcagtttgacccgtggattggaatagcaaggtccggtctctccacaaaactagatttttggcttcagcggatcgatcaagcaccacttaaacctctgcagaaaactgatattctcaaaacatacaccatccctcggctgatctacatagctgaccactcagaagtgaaaactgcactactcgaaacccttgaccagaagatccggacagcggtcaaggaatggcttcacctacctccgtgcacctgcgatgccatcctgtactcgagcacgagagacggcggtttgggcatcaccaaattggcaggactgatccccagcgtgcaggcccgtagactgcatcggatcgcacagtcatctgacgatacgatgaaatgcttcatggaaaaagagaaaatggaacagctgcataagaaattgtggattcaagctggaggggacagagagaacataccctcgatttgggaagcaccaccgtcgagtgaaccaccaaacaacgtgagcacaaattcggaatgggaagcaccgacccagaaagataaatttccaaagccttgcaattggaggaaaaacgaattcaaaaaatggaccaaattggcatcccaaggccgcggaattgtaaattttgaaagagacaaaattagtaaccattggatccaatactacagacgcatacctcacaggaaactcctcactgcactacaactcagggccaacgtttaccccacgagagaatttctagccaggggtagacaagaccaatacatcaaggcgtgtaggcactgcgatgcggacaacgaatcctgcgcccacatcatcggcaactgcccagtgacacaggacgcccgaatcaagaggcacaattacatctgcgaactgcttctcgaggaggcgaagaagaaggactgggtagtgttcaaggaaccgcacataagggattccaacaaggaactgtacaaacctgacctgatatttgtgaaggatgcccgtgcacttgtcgtggatgtgacagtacggtatgaagcagccaaatcatcgctggaggaagccgctgcagagaaagtgagaaagtacaaacacctggaaacggaagtaagacatctcacgaatgcaaaggacgttacttttgtgggctttcccctaggagcgcgggggaaatggcaccaagataactttaaacttttgactgagcttggcctctccaaatcgaggcaagtgaaaatggcagagactttttccacagtagcgctcttttcatctgtggacattgtacatatgtttgccagtagggccagaaaatctatggttatgtgataataggctgccttctgcggggcttgccttctggccatgcccttcttctctcccttgcacctgtacctcttggtctttgaataaagcctgagtaggaaggaccggtagacatgataagatacattgatgagtttggacaaaccacaactagaatgcagtgaaaaaaatgctttatttgtgaaatttgtgatgctattgctttatttgtaaccattataagctgcaataaacaagttaacaacaacaaaaaaaaaaaaaaaaaaaaaaaaaaaaaaacgttgactaaaaaaaaaaaaaaaaaaaaaaaaaaaaaaaaaaaaaaaaaaaaaaaaaaaaaaaaaaaaaaaaaaaaaa

SEQ ID NO: 11683 - DNA, 4564 bp, synthetic construct
  source 1..4564: mol_type = other DNA
ggtctagttacaactgggcatcgctgcagagatcgcacctcctcgtggtcccgctggtagcccttcgaagggtgactaagtcgatctctgccccaggtacggagccgttgggactcaccagtccaacgtaactcctgcctaaattcggtgaaacaaattcctcggtaaaaagccccatggcttcttgcccgaaacctggccccccggtttcagcaggggcaatgagtttggaaagtggactgaccacccactccgttctcgccatcgaacgtggtcccaattcgttggcaaattccggatcagactttgggggggggggtctggggctaccgttacgcctattgagggtatcggtcggcactcagacctcccgctccgactgggtagacctggtgtcctggagccacccaggacccacgtctaagtcccagcaggttgacctggtgtctttatttcctaaacaccgggttgacctgttatccaaaaacgaccaggtagacctggtggctcaatttttaccatctaaatttccccccaatttggcagaaaatgatttggctttgctggtgaacttagagttctacagatcggatttgcatgtgtatgagtgtgttcattttgctgcacattgggagggattaagtggtttgcctgaggtgtatgaacaacttgcaccacaaccgtgtgtgggagaaactttacattctagcctcccacgagacagtgaactgtttgtgcctgaagaggggagcagcgagaaggagagcgaggacgcgccaaaaacatctcctccgacgcctgggaaacatggtttggaacagactggggaggaaaaagtgatggtgactgttcctgacaaaaatccaccttgtccttgctgtggtacccgggtaaactctgtgttgaatctgattgaacatctgaaagtgtcacacgggaaaaggggggtttgttttcggtgtgcaaaatgtggaaaggaaaatagtaactatcacagtgttgtttgtcattttccaaaatgcaggggtccagagacggagaaagccccagctggggagtggatttgtgaggtatgcaacagagattttacaaccaaaattggcctgggacaacacaagagattggcacacccagcagtgagaaatcaggaaaggatcgttgcttcccaaccgaaagaaacatcaaatagaggtgctcacaaaaggtgctggacaaaggaggaggaagaattactaataagactggaggctcagttcgagggaaacaaaaatattaataagcttattgcagaacacataaccaccaaaacagctaagcagatcagtgacaaaaggcgattgctgtccagaaagccagcagaggagccacgtgaggagcctggaacgtgtcatcacaccaggagagcagctgcgagcctgagaacggagcctgagatgagtcatcacgcccaggcagaggacagagataatggacctgggagacgccctctgccaggcagggcagctgccggagggagaacaatggacgagataagacgccaccctgataagggcaacggacagcagagacccaccaagcaaaaatcagaagaacagctgcaggcttactataaaaagacactagaggaacgactttcagctggggcacttaacaccttcccccgagcattcaagcaggtaatggaaggccgggatataaagctagtaatcaatcagacagcgcaggactgcttcggatgcctggaatccataagccaaataagaacggcaacccgagataaaaaggacacggtgacccggaagaaacacccaaagaaaccttttcagaagtggatgaagaagagagcaatcaaaaaaggtaattatcttcggttccagcgtttattttatcttgatagagggaaactggctaaaatcattttagatgatattgaatgcttgtcttgtgacataccactcagtgaaatttattcggtttttaaaacaagatgggaaacaactggtagctttaaaagccttggggactttaaaacttacgggaaggctgacaacactgccttcagagaattaattacggctaaagaaattgagaaaaatgtgcaggaaatgagcaaaggctcggctcccggtccagacgggattactcttggggacgtcgtaaagatggatcccgagttttcccggaccatggagattttcaatttatggttaacaactggtaaaatcccggacatggtgagggggtgcagaaccgttttgattccaaaatcatcaaagccggatcgtttgaaagacattaataactggagacctatcacgatcggttccatcttgctgagactgttctccaggattgtaacagctaggctgagcaaagcgtgccccctgaacccaaggcaaagaggctttatcagagcggcgggatgctctgaaaacttaaaactcctgcaaactataatttggtcggccaaaagagaacacagaccactgggtgttgtattcgtggacatcgccaaggcttttgacaccgtaagccaccagcacatcattcatgctttgcagcaaagagaggtggatccccacatcgtcggtctggtgagcaatatgtacgagaacatcagtacgtatatcaccacaaagaggaacacacacacagacaaaatccagatccgggttggagtaaagcagggtgacccgatgtcgccccttttatttaacctggcaatggaccctctattatgcaagctggaagagagtggcaaaggataccaccgaggacagagcagcatcacagcgatggcatttgcagacgatctggttttgctgagcgactcctgggaaggcatgaatacaaatattagcatactggagaccttctgcaatctgaccggactcaaaacacaggggcaaaagtgccacggcttttacatcaagccgacaaagaagtcttacaccatcaatgactgcgctgcctggactatcaacggcacacccctgaacatgatcgaccccggcgaatctgagaaatacctcggcctgcagtttgacccgtggattggaatagcaaggtccggtctctccacaaaactagatttttggcttcagcggatcgatcaagcaccacttaaacctctgcagaaactggatattctcaaaacatacaccatccctcggctgatctacatagctgaccactcagaagtgaaaactgcactactcgaaacccttgaccagaagatccggacagcggtcaaggaatggcttcacctacctccgtgcacctgcgatgccatcctgtactcgagcacgagagacggcggtttgggcatcaccaaattggcaggactgatccccagcgtgcaggcccgtagactgcatcggatcgcacagtcatctgacgatacgatgaaatgcttcatggaaaaagagaaaatggaacagctgcataagaaattgtggattcaagctggaggggacagagagaacataccctcgatttgggaagcaccaccgtcgagtgaaccaccaaacaacgtgagcacaaattcggaatgggaagcaccgacccagaaagataaatttccaaagccttgcaattggaggaaaaacgaattcaaaaaatggaccaaattggcatcccaaggccgcggaattgtaaattttgaaagagacaaaattagtaaccattggatccaatactacagacgcatacctcacaggaaactcctcactgcactacaactcagggccaacgtttaccccacgagagaatttctagccaggggtagacaagaccaatacatcaaggcgtgtaggcactgcgatgcggacattgaatcctgcgcccacatcatcggcaactgcccagtgacacaggacgcccgaatcaagaggcacaattacatctgcgaactgcttctcgaggaggcgaagaagaaggactgggtagtgttcaaggaaccgcacataagggattccaacaaggaactgtacaaacctgacctgatatttgtgaaggatggccgtgcacttgtcgtggatgtgacagtacggtatgaagcagccaaatcatcgctggaggaagccgctgcagagaaagtgagaaagtacaaacacctggaaacggaagtaagacatctcacgaatgcaaaggacgttacttttgtgggctttcccctaggagcgcgggggaaatggcaccaagataactttaaacttttgactgagcttggcctctccaaatcgaggcaagtgaaaatggcagagactttttccacagtagcgctcttttcatctgtggacattgtacatatgtttgccagtagggccagaaaatctatggttatgtgataataggctgccttctgcggggcttgccttctggccatgcccttcttctctcccttgcacctgtacctcttggtctttgaataaagcctgagtaggaaggaccggtaaaaaaaaaaaaaaaaaaaaaaaaaaaaaaacgttgactaaaaaaaaaaaaaaaaaaaaaaaaaaaaaaaaaaaaaaaaaaaaaaaaaaaaaaaaaaaaaaaaaaaaaa

SEQ ID NO: 11684 - DNA, 4564 bp, synthetic construct
  source 1..4564: mol_type = other DNA
ggtctagttacaactgggcatcgctgcagagatcgcacctcctcgtggtcccgctggtagcccttcgaagggtgactaagtcgatctctgccccaggtacggagccgttgggactcaccagtccaacgtaactcctgcctaaattcggtgaaacaaattcctcggtaaaaagccccatggcttcttgcccgaaacctggccccccggtttcagcaggggcaatgagtttggaaagtggactgaccacccactccgttctcgccatcgaacgtggtcccaattcgttggcaaattccggatcagactttgggggggggggtctggggctaccgttacgcctattgagggtatcggtcggcactcagacctcccgctccgactgggtagacctggtgtcctggagccacccaggacccacgtctaagtcccagcaggttgacctggtgtctttatttcctaaacaccgggttgacctgttatccaaaaacgaccaggtagacctggtggctcaatttttaccatctaaatttccccccaatttggcagaaaatgatttggctttgctggtgaacttagagttctacagatcggatttgcatgtgtatgagtgtgttcattttgctgcacattgggagggattaagtggtttgcctgaggtgtatgaacaacttgcaccacaaccgtgtgtgggagaaactttacattctagcctcccacgagacagtgaactgtttgtgcctgaagaggggagcagcgagaaggagagcgaggacgcgccaaaaacatctcctccgacgcctgggaaacatggtttggaacagactggggaggaaaaagtgatggtgactgttcctgacaaaaatccaccttgtccttgctgtggtacccgggtaaactctgtgttgaatctgattgaacatctgaaagtgtcacacgggaaaaggggggtttgttttcggtgtgcaaaatgtggaaaggaaaatagtaactatcacagtgttgtttgtcattttccaaaatgcaggggtccagagacggagaaagccccagctggggagtggatttgtgaggtatgcaacagagattttacaaccaaaattggcctgggacaacacaagagattggcacacccagcagtgagaaatcaggaaaggatcgttgcttcccaaccgaaagaaacatcaaatagaggtgctcacaaaaggtgctggacaaaggaggaggaagaattactaataagactggaggctcagttcgagggaaacaaaaatattaataagcttattgcagaacacataaccaccaaaacagctaagcagatcagtgacaaaaggcgattgctgtccagaaagccagcagaggagccacgtgaggagcctggaacgtgtcatcacaccaggagagcagctgcgagcctgagaacggagcctgagatgagtcatcacgcccaggcagaggacagagataatggacctgggagacgccctctgccaggcagggcagctgccggagggagaacaatggacgagataagacgccaccctgataagggcaacggacagcagagacccaccaagcaaaaatcagaagaacagctgcaggcttactataaaaagacactagaggaacgactttcagctggggcacttaacaccttcccccgagcattcaagcaggtaatggaaggccgggatataaagctagtaatcaatcagacagcgcaggactgcttcggatgcctggaatccataagccaaataagaacggcaacccgagataaaaaggacacggtgacccggaagaaacacccaaagaaaccttttcagaagtggatgaagaagagagcaatcaaaaaaggtaattatcttcggttccagcgtttattttatcttgatagagggaaactggctaaaatcattttagatgatattgaatgcttgtcttgtgacataccactcagtgaaatttattcggtttttaaaacaagatgggaaacaactggtagctttaaaagccttggggactttaaaacttacgggaaggctgacaacactgccttcagagaattaattacggctaaagaaattgagaaaaatgtgcaggaaatgagcaaaggctcggctcccggtccagacgggattactcttggggacgtcgtaaagatggatcccgagttttcccggaccatggagattttcaatttatggttaacaactggtaaaatcccggacatggtgagggggtgcagaaccgttttgattccaaaatcatcaaagccggatcgtttgaaagacattaataactggagacctatcacgatcggttccatcttgctgagactgttctccaggattgtaacagctaggctgagcaaagcgtgccccctgaacccaaggcaaagaggctttatcagagcggcgggatgctctgaaaacttaaaactcctgcaaactataatttggtcggccaaaagagaacacagaccactgggtgttgtattcgtggacatcgccaaggcttttgacaccgtaagccaccagcacatcattcatgctttgcagcaaagagaggtggatccccacatcgtcggtctggtgagcaatatgtacgagaacatcagtacgtatatcaccacaaagaggaacacacacacagacaaaatccagatccgggttggagtaaagcagggtgacccgatgtcgccccttttatttaacctggcaatggaccctctattatgcaagctggaagagagtggcaaaggataccaccgaggacagagcagcatcacagcgatggcatttgcagacgatctggttttgctgagcgactcctgggaaggcatgaatacaaatattagcatactggagaccttctgcaatctgaccggactcaaaacacaggggcaaaagtgccacggcttttacatcaagccgacaaagaagtcttacaccatcaatgactgcgctgcctggactatcaacggcacacccctgaacatgatcgaccccggcgaatctgagaaatacctcggcctgcagtttgacccgtggattggaatagcaaggtccggtctctccacaaaactagatttttggcttcagcggatcgatcaagcaccacttaaacctctgcagaaactggatattctcaaaacatacaccatccctcggctgatctacatagctgaccactcagaagtgaaaactgcactactcgaaacccttgaccagaagatccggacagcggtcaaggaatggcttcacctacctccgtgcacctgcgatgccatcctgtactcgagcacgagagacggcggtttgggcatcaccaaattggcaggactgatccccagcgtgcaggcccgtagactgcatcggatcgcacagtcatctgacgatacgatgaaatgcttcatggaaaaagagaaaatggaacagctgcataagaaattgtggattcaagctggaggggacagagagaacataccctcgatttgggaagcaccaccgtcgagtgaaccaccaaacaacgtgagcacaaattcggaatgggaagcaccgacccagaaagataaatttccaaagccttgcaattggaggaaaaacgaattcaaaaaatggaccaaattggcatcccaaggccgcggaattgtaaattttgaaagagacaaaattagtaaccattggatccaatactacagacgcatacctcacaggaaactcctcactgcactacaactcagggccaacgtttaccccacgagagaatttctagccaggggtagacaagaccaatacatcaaggcgtgtaggcactgcgatgcggacaacgaatcctgcgcccacatcatcggcaactgcccagtgacacaggacgcccgaatcaagaggcacaattacatctgcgaactgcttctcgaggaggcgaagaagaaggactgggtagtgttcaaggaaccgcacataagggattccaacaaggaactgtacaaacctgacctgatatttgtgaaggatgcccgtgcacttgtcgtggatgtgacagtacggtatgaagcagccaaatcatcgctggaggaagccgctgcagagaaagtgagaaagtacaaacacctggaaacggaagtaagacatctcacgaatgcaaaggacgttacttttgtgggctttcccctaggagcgcgggggaaatggcaccaagataactttaaacttttgactgagcttggcctctccaaatcgaggcaagtgaaaatggcagagactttttccacagtagcgctcttttcatctgtggacattgtacatatgtttgccagtagggccagaaaatctatggttatgtgataataggctgccttctgcggggcttgccttctggccatgcccttcttctctcccttgcacctgtacctcttggtctttgaataaagcctgagtaggaaggaccggtaaaaaaaaaaaaaaaaaaaaaaaaaaaaaaacgttgactaaaaaaaaaaaaaaaaaaaaaaaaaaaaaaaaaaaaaaaaaaaaaaaaaaaaaaaaaaaaaaaaaaaaaa

SEQ ID NO: 11685 - DNA, 4564 bp, synthetic construct
  source 1..4564: mol_type = other DNA
ggtctagttacaactgggcatcgctgcagagatcgcacctcctcgtggtcccgctggtagcccttcgaagggtgactaagtcgatctctgccccaggtacggagccgttgggactcaccagtccaacgtaactcctgcctaaattcggtgaaacaaattcctcggtaaaaagccccatggcttcttgcccgaaacctggccccccggtttcagcaggggcaatgagtttggaaagtggactgaccacccactccgttctcgccatcgaacgtggtcccaattcgttggcaaattccggatcagactttgggggggggggtctggggctaccgttacgcctattgagggtatcggtcggcactcagacctcccgctccgactgggtagacctggtgtcctggagccacccaggacccacgtctaagtcccagcaggttgacctggtgtctttatttcctaaacaccgggttgacctgttatccaaaaacgaccaggtagacctggtggctcaatttttaccatctaaatttccccccaatttggcagaaaatgatttggctttgctggtgaacttagagttctacagatcggatttgcatgtgtatgagtgtgttcattttgctgcacattgggagggattaagtggtttgcctgaggtgtatgaacaacttgcaccacaaccgtgtgtgggagaaactttacattctagcctcccacgagacagtgaactgtttgtgcctgaagaggggagcagcgagaaggagagcgaggacgcgccaaaaacatctcctccgacgcctgggaaacatggtttggaacagactggggaggaaaaagtgatggtgactgttcctgacaaaaatccaccttgtccttgctgtggtacccgggtaaactctgtgttgaatctgattgaacatctgaaagtgtcacacgggaaaaggggggtttgttttcggtgtgcaaaatgtggaaaggaaaatagtaactatcacagtgttgtttgtcattttccaaaatgcaggggtccagagacggagaaagccccagctggggagtggatttgtgaggtatgcaacagagattttacaaccaaaattggcctgggacaacacaagagattggcacacccagcagtgagaaatcaggaaaggatcgttgcttcccaaccgaaagaaacatcaaatagaggtgctcacaaaaggtgctggacaaaggaggaggaagaattactaataagactggaggctcagttcgagggaaacaaaaatattaataagcttattgcagaacacataaccaccaaaacagctaagcagatcagtgacaaaaggcgattgctgtccagaaagccagcagaggagccacgtgaggagcctggaacgtgtcatcacaccaggagagcagctgcgagcctgagaacggagcctgagatgagtcatcacgcccaggcagaggacagagataatggacctgggagacgccctctgccaggcagggcagctgccggagggagaacaatggacgagataagacgccaccctgataagggcaacggacagcagagacccaccaagcaaaaatcagaagaacagctgcaggcttactataaaaagacactagaggaacgactttcagctggggcacttaacaccttcccccgagcattcaagcaggtaatggaaggccgggatataaagctagtaatcaatcagacagcgcaggactgcttcggatgcctggaatccataagccaaataagaacggcaacccgagataaaaaggacacggtgacccggaagaaacacccaaagaaaccttttcagaagtggatgaagaagagagcaatcaaaaaaggtaattatcttcggttccagcgtttattttatcttgatagagggaaactggctaaaatcattttagatgatattgaatgcttgtcttgtgacataccactcagtgaaatttattcggtttttaaaacaagatgggaaacaactggtagctttaaaagccttggggactttaaaacttacgggaaggctgacaacactgccttcagagaattaattacggctaaagaaattgagaaaaatgtgcaggaaatgagcaaaggctcggctcccggtccagacgggattactcttggggacgtcgtaaagatggatcccgagttttcccggaccatggagattttcaatttatggttaacaactggtaaaatcccggacatggtgagggggtgcagaaccgttttgattccaaaatcatcaaagccggatcgtttgaaagacattaataactggagacctatcacgatcggttccatcttgctgagactgttctccaggattgtaacagctaggctgagcaaagcgtgccccctgaacccaaggcaaagaggctttatcagagcggcgggatgctctgaaaacttaaaactcctgcaaactataatttggtcggccaaaagagaacacagaccactgggtgttgtattcgtggacatcgccaaggcttttgacaccgtaagccaccagcacatcattcatgctttgcagcaaagagaggtggatccccacatcgtcggtctggtgagcaatatgtacgagaacatcagtacgtatatcaccacaaagaggaacacacacacagacaaaatccagatccgggttggagtaaagcagggtgacccgatgtcgccccttttatttaacctggcaatggaccctctattatgcaagctggaagagagtggcaaaggataccaccgaggacagagcagcatcacagcgatggcatttgcagacgatctggttttgctgagcgactcctgggaaggcatgaatacaaatattagcatactggagaccttctgcaatctgaccggactcaaaacacaggggcaaaagtgccacggcttttacatcaagccgacaaagaagtcttacaccatcaatgactgcgctgcctggactatcaacggcacacccctgaacatgatcgaccccggcgaatctgagaaatacctcggcctgcagtttgacccgtggattggaatagcaaggtccggtctctccacaaaactagatttttggcttcagcggatcgatcaagcaccacttaaacctctgcagaaactggatattctcaaaacatacaccatccctcggctgatctacatagctgaccactcagaagtgaaaactgcactactcgaaacccttgaccagaagatccggacagcggtcaaggaatggcttcacctacctccgtgcacctgcgatgccatcctgtactcgagcacgagagacggcggtttgggcatcaccaaattggcaggactgatccccagcgtgcaggcccgtagactgcatcggatcgcacagtcatctgacgatacgatgaaatgcttcatggaaaaagagaaaatggaacagctgcataagaaattgtggattcaagctggaggggacagagagaacataccctcgatttgggaagcaccaccgtcgagtgaaccaccaaacaacgtgagcacaaattcggaatgggaagcaccgacccagaaagataaatttccaaagccttgcaattggaggaaaaacgaattcaaaaaatggaccaaattggcatcccaaggccgcggaattgtaaattttgaaagagacaaaattagtaaccattggatccaatactacagacgcatacctcacaggaaactcctcactgcactacaactcagggccaacgtttaccccacgagagaatttctagccaggggtagacaagaccaatacatcaaggcgtgtaggcactgcgatgcggacattgaatcctgcgcccacatcatcggcaactgcccagtgacacaggacgcccgaatcaagaggcacaataagatctgcgaactgcttctcgaggaggcgaagaagaaggactgggtagtgttcaaggaaccgcacataagggattccaacaaggaactgtacaaacctgacctgatatttgtgaaggatgcccgtgcacttgtcgtggatgtgacagtacggtatgaagcagccaaatcatcgctggaggaagccgctgcagagaaagtgagaaagtacaaacacctggaaacggaagtaagacatctcacgaatgcaaaggacgttacttttgtgggctttcccctaggagcgcgggggaaatggcaccaagataactttaaacttttgactgagcttggcctctccaaatcgaggcaagtgaaaatggcagagactttttccacagtagcgctcttttcatctgtggacattgtacatatgtttgccagtagggccagaaaatctatggttatgtgataataggctgccttctgcggggcttgccttctggccatgcccttcttctctcccttgcacctgtacctcttggtctttgaataaagcctgagtaggaaggaccggtaaaaaaaaaaaaaaaaaaaaaaaaaaaaaaacgttgactaaaaaaaaaaaaaaaaaaaaaaaaaaaaaaaaaaaaaaaaaaaaaaaaaaaaaaaaaaaaaaaaaaaaaa

SEQ ID NO: 11686 - DNA, 4564 bp, synthetic construct
  source 1..4564: mol_type = other DNA
ggtctagttacaactgggcatcgctgcagagatcgcacctcctcgtggtcccgctggtagcccttcgaagggtgactaagtcgatctctgccccaggtacggagccgttgggactcaccagtccaacgtaactcctgcctaaattcggtgaaacaaattcctcggtaaaaagccccatggcttcttgcccgaaacctggccccccggtttcagcaggggcaatgagtttggaaagtggactgaccacccactccgttctcgccatcgaacgtggtcccaattcgttggcaaattccggatcagactttgggggggggggtctggggctaccgttacgcctattgagggtatcggtcggcactcagacctcccgctccgactgggtagacctggtgtcctggagccacccaggacccacgtctaagtcccagcaggttgacctggtgtctttatttcctaaacaccgggttgacctgttatccaaaaacgaccaggtagacctggtggctcaatttttaccatctaaatttccccccaatttggcagaaaatgatttggctttgctggtgaacttagagttctacagatcggatttgcatgtgtatgagggcgttcataaggctgcacattgggagggattaagtggtttgcctgaggtgtatgaacaacttgcaccacaaccgtgtgtgggagaaactttacattctagcctcccacgagacagtgaactgtttgtgcctgaagaggggagcagcgagaaggagagcgaggacgcgccaaaaacatctcctccgacgcctgggaaacatggtttggaacagactggggaggaaaaagtgatggtgactgttcctgacaaaaatccaccttgtccttgctgtggtacccgggtaaactctgtgttgaatctgattgaacatctgaaagtgtcacacgggaaaaggggggtttgttttcggtgtgcaaaatgtggaaaggaaaatagtaactatcacagtgttgtttgtcattttaagaaatgcaggggtccagagacggagaaagccccagctggggagtggatttgtgaggtatgcaacagagattttacaaccaaaattggcctgggacaacacaagagaagggcacacccagcagtgagaaatcaggaaaggatcgttgcttcccaaccgaaagaaacatcaaatagaggtgctcacaaaaggtgctggacaaaggaggaggaagaattactaataagactggaggctcagttcgagggaaacaaaaatattaataagcttattgcagaacacataaccaccaaaacagctaagcagatcagtgacaaaaggcgattgctgtccagaaagccagcagaggagccacgtgaggagcctggaacgtgtcatcacaccaggagagcagctgcgagcctgagaacggagcctgagatgagtcatcacgcccaggcagaggacagagataatggacctgggagacgccctctgccaggcagggcagctgccggagggagaacaatggacgagataagacgccaccctgataagggcaacggacagcagagacccaccaagcaaaaatcagaagaacagctgcaggcttactataaaaagacactagaggaacgactttcagctggggcacttaacaccttcccccgagcattcaagcaggtaatggaaggccgggatataaagctagtaatcaatcagacagcgcaggactacttcggatgcctggaatccataagccaaataagaacggcaacccgagataaaaaggacacggtgacccggaagaaacacccaaagaaaccttttcagaagtggatgaagaagagagcaatcaaaaaaggtaattatcttcggttccagcgtttattttatcttgatagagggaaactggctaaaatcattttagatgatattgaatgcttgtcttgtgacataccactcagtgaaatttattcggtttttaaaacaagatgggaaacaactggtagctttaaaagccttggggactttaaaacttacgggaaggctgacaacactgccttcagagacttaattacggctaaagaaattgagaaaaatgtgcaggaaatgagcaaaggctcggctcccggtccagacgggattactcttggggacgtcgtaaagatggatcccgagggctcccggaccatggagattttcaatttatggttaacaactggtaaaatcccggacatggtgagggggtgcagaaccgttttgattccaaaatcatcagacccggatcgtttgaaagacattaataactggagacctatcacgatcggttccatcttgctgagactgttctccaggattgtaacagctaggctgagcaaagcgtgccccctgaacccaaggcaaagaggctttatcagagcggcgggatgctctgaaaacttaaaactcctgcaaactataatttggtcggccaaaagagaacacagaccactgggtgttgtattcgtggacatcgccaaggcttttgacaccgtaagccaccagcacatcattcatgctttgcagcaaagagaggtggatccccacatcgtcggtctggtgagcaatatgtacgagaacatcagtacgtatatcaccacaaagaggaacacacacacagacaaaatccagatccgggttggagtaaagcagggtgacccgatgtcgccccttttatttaacctggcaatggaccctctattatgcaagctggaagagagtggcaaaggataccaccgaggacagagcagcatcacagcgatggcatttgcagacgatctggttttgctgagcgactcctgggaaggcatgaatacaaatattagcatactggagaccttctgcaatctgaccggactcaaaacacaggggcaaaagtgccacggcttttacatcaagccgacaaagaagtcttacaccatcaatgactgcgctgcctggactatcaacggcacacccctgaacatgatcgaccccggcgaatctgagaaatacctcggcctgcagtttgacccgtggattggaatagcaaggtccggtctctccacaaaactagatttttggcttcagcggatcgatcaagcaccacttaaacctctgcagaaactggatattctcaaaacatacaccatccctcggctgatctacatagctgaccactcagaagtgaaaactgcactactcgaaacccttgaccagaagatccggacagcggtcaaggaatggcttcacctacctccgtgcacctgcgatgccatcctgtactcgagcacgagagacggcggtttgggcatcaccaaattggcaggactgatccccagcgtgcaggcccgtagactgcatcggatcgcacagtcatctgacgatacgatgaaatgcttcatggaaaaagagaaaatggaacagctgcataagaaattgtggattcaagctggaggggacagagagaacataccctcgatttgggaagcaccaccgtcgagtgaaccaccaaacaacgtgagcacaaattcggaatgggaagcaccgacccagaaagataaatttccaaagccttgcaattggaggaaaaacgaattcaaaaaatggaccaaattggcatcccaaggccgcggaattgtaaattttgaaagagacaaaattagtaaccattggatccaatactacagacgcatacctcacaggaaactcctcactgcactacaactcagggccaacgtttaccccacgagagaatttctagccaggggtagacaagaccaatacatcaaggcgtgtaggcactgcgatgcggacattgaatcctgcgcccacatcatcggcaactgcccagtgacacaggacgcccgaatcaagaggcacaataagatctgcgaactgcttctcgaggaggcgaagaagaaggactgggtagtgttcaaggaaccgcacataagggattccaacaaggaactgtacaaacctgacctgatatttgtgaaggatgcccgtgcacttgtcgtggatgtgacagtacggtatgaagcagccaaatcatcgctggaggaagccgctgcagagaaagtgagaaagtacaaacacctggaaacggaagtaagacatctcacgaatgcaaaggacgttacttttgtgggctttcccctaggagcgcgggggaaatggcaccaagataactttaaacttttgactgagcttggcctctccaaatcgaggcaagtgaaaatggcagagactttttccacagtagcgctcttttcatctgtggacattgtacatatgtttgccagtagggccagaaaatctatggttatgtgataataggctgccttctgcggggcttgccttctggccatgcccttcttctctcccttgcacctgtacctcttggtctttgaataaagcctgagtaggaaggaccggtaaaaaaaaaaaaaaaaaaaaaaaaaaaaaaacgttgactaaaaaaaaaaaaaaaaaaaaaaaaaaaaaaaaaaaaaaaaaaaaaaaaaaaaaaaaaaaaaaaaaaaaaa

SEQ ID NO: 11687 - DNA, 4564 bp, synthetic construct
  source 1..4564: mol_type = other DNA
ggtctagttacaactgggcatcgctgcagagatcgcacctcctcgtggtcccgctggtagcccttcgaagggtgactaagtcgatctctgccccaggtacggagccgttgggactcaccagtccaacgtaactcctgcctaaattcggtgaaacaaattcctcggtaaaaagccccatggctagctgccctaagcctggacctcctgtgtctgctggcgctatgagcctggagagcggacttaccacccactctgtgctggccatcgagagaggccccaactctctggccaactctggcagcgatttcggcggaggaggacttggcctgcctctgagacttctgagagtttctgtgggcacccagaccagcagaagcgactgggtcgaccttgtgagctggagccaccctggtcctacaagcaagagccagcaggtcgatctggtgagcctgttccccaagcacagagtcgacctgctgagcaagaacgaccaggtcgacttggtggcccagttcctgcctagcaagttccctcccaacctggctgagaacgacttagccctgctggtgaacctggagttctatcgttccgacctgcacgtgtacgagtgcgtgcacttcgctgcccattgggagggcttaagcggccttcctgaggtgtacgaacagctggctccccagccctgtgtaggcgagacattacacagcagcctgcccagagacagcgagctgttcgttccggaagagggctctagcgagaaggagagcgaggacgctcctaagaccagccctcctacccctggcaaacacggcctggagcaaacaggcgaggagaaggtcatggtgaccgtgcccgacaagaaccctccctgtccttgctgtggcacaagagtcaacagcgtgctgaacctcatcgagcacctgaaggtgtcccacggcaagagaggcgtgtgcttcagatgcgccaagtgcggcaaggagaacagcaactaccacagcgtcgtgtgccacttcaagaagtgcagaggccctgagaccgagaaggctcccgctggcgaatggatttgcgaggtgtgcaacagagacttcaccaccaagatcggcctgggccagcacaagcggttagctcaccctgctgtgagaaaccaggagagaatcgtggccagccagcccaaggagacaagcaacaggggcgctcacaagagatgctggaccaaggaggaagaggagctgctcatcagactggaggctcagttcgagggcaacaagaacatcaataagcttatcgccgagcacatcaccacaaagaccgccaagcagatcagcgacaagaggagactgctgtccagaaagcccgccgaggagcctagagaggaacctggtacatgtcaccacaccagaagagccgccgctagcctgagaaccgagcccgaaatgtctcaccacgctcaggccgaggacagagacaacggccctggcaggagacctcttcccggcagagctgctgctggaggcagaaccatggacgagatcaggagacaccccgataagggcaacggccagcagagacccacaaagcagaagtccgaggaacagctccaggcctactacaagaaaaccctggaggagagactgtccgcgggagctctgaacaccttccctagagccttcaaacaagtcatggagggcagagacatcaagctggtgatcaaccagaccgcccaggactgcttcggctgccttgagtctatcagccagatcaggaccgccacacgggataagaaggacaccgtcaccagagagaagcaccccaagaagcccttccagaaatggatgaagaagagggccatcaagaagggcaattacctgagattccagaggctgttctacctggacagaggcaagctggccaagatcatcctggacgacatcgagtgcctgagctgcgacatccctctgagcgagatctacagcgtgttcaagaccagatgggagaccaccggcagcttcaagtctctgggcgacttcaagacatacggcaaggccgacaacaccgccttcagagagctcatcaccgctaaggagatcgagaagaacgtgcaggagatgagcaagggcagcgctcctggccccgatggaattacactgggcgatgtggtgaagatggaccccgagttcagcagaacaatggagatcttcaacctgtggctcaccacaggcaagatccccgacatggtgagaggctgcagaaccgtgcttatccccaagagcagcaagcccgacagactgaaggatatcaacaactggagacccatcaccatcggcagcatcctgctgcggctgttcagccggattgtgaccgctagactgagcaaagcctgtcccctgaaccccagacagagaggcttcatcagagccgctggctgcagcgagaacctgaagctgctccagacaatcatctggagcgccaagagagagcacagacccctgggcgttgttttcgtggacatcgccaaggccttcgacaccgtgtcccatcagcacattatccacgccctgcagcagagggaggtcgaccctcatattgtgggcctggtgtccaacatgtacgagaacatctccacctatattacgaccaagagaaacacccacacagacaagatccagatccgggtcggcgtcaagcagggcgatcctatgtctcctctgctgttcaacctcgccatggaccctctgctctgcaagctcgaggagtctggaaagggctaccatagaggccaatcatcgatcaccgccatggccttcgccgacgacctggtgcttttaagcgacagctgggagaacatgaacaccaacatctctatcctggagacattctgcaaccttaccggcctgaaaacccagggccagaagtgtcatggcttctacatcaaacccaccaaggacagctacaccatcaacgactgcgccgcctggacaatcaacggcacccctctcaacatgatcgaccccggcgagtctgagaagtacctgggcctgcagttcgatccctggatcggcatcgctagaagcggcttgagcaccaagctggacttttggctccaacgcatagaccaggcccccctgaagcctcttcagaaaaccgacattttgaaaacttatacgatccccagactcatctacatcgccgaccactccgaggtcaagagcgctctgctggaaaccctggaccagaaaatcagaaccgccgtcaaggaatggctgcacctgcccccttgcacatgcgacgctatcctgtacagcagcaccagggacggcggcttaggaatcaccaagttagccggcctcatccccagcgtgcaggctaggagactccacagaatcgcccagagcagcgacgacaccatgaagtgcttcatggagaaggaaaagatggagcagctgcacaagaagctgtggatccaagcgggcggagatcgtgagaacattcccagcatctgggaggcccctcccagctcagaacctcccaataacgtgtccaccaattctgaatgggaggctcccacccagaaggataagtttcccaagccctgcaactggcggaagaacgagttcaaaaaatggacaaagctggctagccagggcaggggcatcgtgaacttcgaaagggacaagattagcaaccactggatccagtactacagaagaatcccccacagaaagctcctcaccgccctccagttacgtgcaaacgtgtacccaaccagagaattcctggccagaggcagacaggaccagtacatcaaggcctgccggcactgcgatgccgataacgagagctgtgctcacatcatcggcaactgccccgtcacccaggacgccagaatcaagagacacaactacatctgcgagttacttctggaggaagccaagaagaaggattgggttgtgttcaaggagccccacatcagagactccaacaaggagctgtacaagccagacctcatcttcgtgaaggacgctagagccctggtggtggacgtcaccgtcagatacgaggctgctaagtccagccttgaggaggctgccgccgagaaagtgcggaagtacaagcacctggaaacagaggtcagacacctcaccaacgccaaggacgttaccttcgtgggcttccccctaggtgctagaggcaaatggcaccaggacaacttcaagctgcttaccgagctgggcctctccaagagccgacaggttaagatggccgagaccttcagcaccgtcgccctgttctcttctgtggacattgtgcacatgttcgcctccagagccagaaagagcatggtgatgtgataataggctgccttctgcggggcttgccttctggccatgcccttcttctctcccttgcacctgtacctcttggtctttgaataaagcctgagtaggaaggaccggtaaaaaaaaaaaaaaaaaaaaaaaaaaaaaaacgttgactaaaaaaaaaaaaaaaaaaaaaaaaaaaaaaaaaaaaaaaaaaaaaaaaaaaaaaaaaaaaaaaaaaaaaa

SEQ ID NO: 11688 - DNA, 4564 bp, synthetic construct
  source 1..4564: mol_type = other DNA
ggtctagttacaactgggcatcgctgcagagatcgcacctcctcgtggtcccgctggtagcccttcgaagggtgactaagtcgatctctgccccaggtacggagccgttgggactcaccagtccaacgtaactcctgcctaaattcggtgaaacaaattcctcggtaaaaagccccatggcttcttgcccgaaacctggccccccggtttcagcaggggcaatgagtttggaaagtggactgaccacccactccgttctcgccatcgaacgtggtcccaattcgttggcaaattccggatcagactttgggggggggggtctggggctaccgttacgcctattgagggtatcggtcggcactcagacctcccgctccgactgggtagacctggtgtcctggagccacccaggacccacgtctaagtcccagcaggttgacctggtgtctttatttcctaaacaccgggttgacctgttatccaaaaacgaccaggtagacctggtggctcaatttttaccatctaaatttccccccaatttggcagaaaatgatttggctttgctggtgaacttagagttctacagatcggatttgcatgtgtatgagtgtgttcataaggctgcacattgggagggattaagtggtttgcctgaggtgtatgaacaacttgcaccacaaccgtgtgtgggagaaactttacattctagcctcccacgagacagtgaactgtttgtgcctgaagaggggagcagcgagaaggagagcgaggacgcgccaaaaacatctcctccgacgcctgggaaacatggtttggaacagactggggaggaaaaagtgatggtgactgttcctgacaaaaatccaccttgtccttgctgtggtacccgggtaaactctgtgttgaatctgattgaacatctgaaagtgtcacacgggaaaaggggggtttgttttcggtgtgcaaaatgtggaaaggaaaatagtaactatcacagtgttgtttgtcattttaagaaatgcaggggtccagagacggagaaagccccagctggggagtggatttgtgaggtatgcaacagagattttacaaccaaaattggcctgggacaacacaagagattggcacacccagcagtgagaaatcaggaaaggatcgttgcttcccaaccgaaagaaacatcaaatagaggtgctcacaaaaggtgctggacaaaggaggaggaagaattactaataagactggaggctcagttcgagggaaacaaaaatattaataagcttattgcagaacacataaccaccaaaacagctaagcagatcagtgacaaaaggcgattgctgtccagaaagccagcagaggagccacgtgaggagcctggaacgtgtcatcacaccaggagagcagctgcgagcctgagaacggagcctgagatgagtcatcacgcccaggcagaggacagagataatggacctgggagacgccctctgccaggcagggcagctgccggagggagaacaatggacgagataagacgccaccctgataagggcaacggacagcagagacccaccaagcaaaaatcagaagaacagctgcaggcttactataaaaagacactagaggaacgactttcagctggggcacttaacaccttcccccgagcattcaagcaggtaatggaaggccgggatataaagctagtaatcaatcagacagcgcaggactgcttcggatgcctggaatccataagccaaataagaacggcaacccgagataaaaagtacacggtgacccgggagaaacacccaaagaggccttttcagaagtggatgaagaagagagcaatcaaaaaaggtaattatcttcggttccagcgtttattttatcttgatagagggaaactggctaaaatcattttagatgatattgaatgcttgtcttgtgacataccactcagtgaaatttattcggtttttaaaacaagatgggaaacaactggtagctttaaaagccttggggactttaaaacttacgggaaggctgacaacactgccttcagagaattaattacggctaaagaaattgagaaaaatgtgcaggaaatgagcaaaggctcggctcccggtccagacgggattactcttggggacgtcgtaaagatggatcccgagttttccctgaccatggagattttcaatttatggttaacaactggtaaaatcccggacatggtgagggggtgcagaaccgttttgattccaaaatcatcaaagccggatcgtttgaaagacattaataactggagacctatcacgatcggttccatcttgctgagactgttctccaggattgtaacagctaggctgagcaaagcgtgccccctgaacccaaggcaaagaggctttatcagagcggcgggatgctctgaaaacttaaaactcctgcaaactataatttggtcggccaaaagagaacacagaccactgggtgttgtattcgtggacatcgccaaggcttttgacaccgtaagccaccagcacatcattcatgctttgcagcaaagagaggtggatccccacatcgtcggtctggtgagcaatatgtacgagaacatcagtacgtatatcaccacaaagaggaacacacacacagacaaaatccagatccgggttggagtaaagcagggtgacccgatgtcgccccttttatttaacctggcaatggaccctctattatgcaagctggaagagagtggcaaaggataccaccgaggacagagcagcatcacagcgatggcatttgcagacgatctggttttgctgagcgactcctgggaaaatatgaatacaaatattagcatactggagaccttctgcaatctgaccggactcaaaacacaggggcaaaagtgccacggcttttacatcaagccgacaaaggactcttacaccatcaatgactgcgctgcctggactatcaacggcacacccctgaacatgatcgaccccggcgaatctgagaaatacctcggcctgcagtttgacccgtggattggaatagcaaggtccggtctctccacaaaactagatgagtggcttcagcggatcgatcaagcaccacttaaacctctgcagaaaactgatattctcaaaacatacaccatccctcggctgatctacatagctgaccactcagaagtgaaagccgcactactcgaaacccttgaccagaagatccggacagcggtcaaggaatggcttcacctacctccgtgcacctgcgatgccatcctgtactcgagcacgagagacggcggtttgggcatcaccaaattggcaggactgatccccagcgtgcaggcccgtagactgcatcggatcgcacagtcatctgacgatacgatgaaatgcttcatggaaaaagagaggatggaacagctgcataagaaattgtggattcaagctggaggggacagagagaacataccctcgatttgggaagcaccaccgtcgagtgaaccaccaaacaacgtgagcacaaattcggaatgggaagcaccgacccagaaacccaaatttccaaagccttgcaattggaggaaaaacgaattcaaaaaatggaccaaattggcatcccaaggccgcggaattgtaaattttgaaagagacaaaattagtaaccattggatccaatactacagacgcatacctcacaggaaactcctcactgcactacaactcagggccaacgtttaccccacgagagaatttctagccaggggtagacaagaccaatacatcaaggcgtgtaggcactgcgatgcggacattgaatcctgcgcccacatcatcggcaactgcccagtgacacaggacgcccgaatcaagaggcacaattacatctgcgaactgcttctcgaggaggcgaagaagaaggactgggtagtgttcaaggaaccgcacataagggattccaacaaggaactgtacaaacctgacctgatatttgtgaaggatgcccgtgcacttgtcgtggatgtgacagtacggtatgaagcagccaaatcatcgctggaggaagccgctgcagagaaagtgagaaagtacaaacacctggaaacggaagtaagacatctcacgaatgcaaaggacgttacttttgtgggctttcccctaggagcgcgggggaaatggcaccaagataactttaaacttttgactgagcttggcctctccaaatcgaggcaagtgaaaatggcagagactttttccacagtagcgctcttttcatctgtggacattgtacatatgtttgccagtagggccagaaaatctatggttatgtgataataggctgccttctgcggggcttgccttctggccatgcccttcttctctcccttgcacctgtacctcttggtctttgaataaagcctgagtaggaaggaccggtaaaaaaaaaaaaaaaaaaaaaaaaaaaaaaacgttgactaaaaaaaaaaaaaaaaaaaaaaaaaaaaaaaaaaaaaaaaaaaaaaaaaaaaaaaaaaaaaaaaaaaaaa

SEQ ID NO: 11689 - DNA, 5407 bp, synthetic construct
  source 1..5407: mol_type = other DNA
ggtctagttacaactgggcatcgctgcagagatcgcacctcctcgtggtcccgctggtagcccttcgaagggtgactaagtcgatctctgccccaggtacggagccgttgggactcaccagtccaacgtaactcctgcctaaattcggtgaaacaaattcctcggtaaaaagccccatgggaactgcactaacaccgctcctgacgaagttcgccacgcgctacgagatgggtaccacgcctgaagaagtggcgaacacgctcaagcagacctgtttcaagggccaggtcaatgattcgcagatggtcgccctgctgatcgtggcagaccagtacaagcttaaccccttcaccaaggagttgtacgcattccccgacaagaacaacggcatcgtgccggttgttggtgtggatggctgggctcggatcatcaacgagaacccacagttcgatggcatggaattctcaatggaccagcagggaaccgaatgcacctgcaagatctatcggaaggaccgcagccatgccatcagcgcgactgagtacatggccgagtgcaagcggaacacccagccttggcagtcccatccgcgccggatgcttcgccacaaggcaatgatccagtgcgcacgcctcgcgttcgggttcgccggcatatacgaccaggacgaggccgagcggatcgttgaacgagacgtcactcccgcagagcagtacgaggacgtcagcgaggcgatctgcctgatcaaggactccccaacaatggaggacttgcaggcagcattcagcaatgcctggaaagcctataagacaaagggcgcgcgcgaccagcttacggcggccaaggaccagcggaagaaagaattgctggacgcccctatagacgttgaattcgaggagaccggcgatgatcgagcagcgtctggaggatctagcggaggatcctctggcagcgagacaccaggaacaagcgagtcagcaacaccagagagcagtggcggcagcagcggcggcagcagcatggcttcttgcccgaaacctggccccccggtttcagcaggggcaatgagtttggaaagtggactgaccacccactccgttctcgccatcgaacgtggtcccaattcgttggcaaattccggatcagactttgggggggggggtctggggctaccgttacgcctattgagggtatcggtcggcactcagacctcccgctccgactgggtagacctggtgtcctggagccacccaggacccacgtctaagtcccagcaggttgacctggtgtctttatttcctaaacaccgggttgacctgttatccaaaaacgaccaggtagacctggtggctcaatttttaccatctaaatttccccccaatttggcagaaaatgatttggctttgctggtgaacttagagttctacagatcggatttgcatgtgtatgagtgtgttcataaggctgcacattgggagggattaagtggtttgcctgaggtgtatgaacaacttgcaccacaaccgtgtgtgggagaaactttacattctagcctcccacgagacagtgaactgtttgtgcctgaagaggggagcagcgagaaggagagcgaggacgcgccaaaaacatctcctccgacgcctgggaaacatggtttggaacagactggggaggaaaaagtgatggtgactgttcctgacaaaaatccaccttgtccttgctgtggtacccgggtaaactctgtgttgaatctgattgaacatctgaaagtgtcacacgggaaaaggggggtttgttttcggtgtgcaaaatgtggaaaggaaaatagtaactatcacagtgttgtttgtcattttccaaaatgcaggggtccagagacggagaaagccccagctggggagtggatttgtgaggtatgcaacagagattttacaaccaaaattggcctgggacaacacaagagattggcacacccagcagtgagaaatcaggaaaggatcgttgcttcccaaccgaaagaaacatcaaatagaggtgctcacaaaaggtgctggacaaaggaggaggaagaattactaataagactggaggctcagttcgagggacacaaaaatattaataagcttattgcagaacacataaccaccaaaacagctaagcagatcagtgacaaaaggcgattgctgtccagaaagccagcagaggagccacgtgaggagcctggaacgtgtcatcacaccaggagagcagctgcgagcctgagaacggagcctgagatgagtcatcacgcccaggcagaggacagagataatggacctgggagacgccctctgccaggcagggcagctgccggagggagaacaatggacgagataagacgccaccctgataagggcaacggacagcagagacccaccaagcaaaaatcagaagaacagctgcaggcttactataaaaagacactagaggaacgactttcagctggggcacttaacaccttcccccgagcattcaagcaggtaatggaaggccgggatataaagctagtaatcaatcagacagcgcaggactgcttcggatgcctggaatccataagccaaataagaacggcaacccgagataaaaagtacacggtgacccgggagaaacacccaaagaggccttttcagaagtggatgaaggacagagcaatcaaaaaaggtaattatcttcggttccagcgtttattttatcttgatagagggaaactggctaaaatcattttagatgatattgaatgcttgtcttgtgacataccactcagtgaaatttattcggtttttaaaacaagatgggaaacaactggtagctttaaaagccttggggactttaaaacttacgggaaggctgacaacactgccttcagagaattaattacggctaaagaaattgagaaaaatgtgcaggaaatgagcaaaggctcggctcccggtccagacgggattactcttggggacgtcgtaaagatggatcccgagttttccctgaccatggagattttcaatttatggttaacaactggtaaaatcccggacatggtgagggggtgcagaaccgttttgattccaaaatcatcaaagccggatcgtttgaaagacattaataactggagacctatcacgatcggttccatcttgctgagactgttctccaggattgtaacagctaggctgagcaaagcgtgccccctgaacccaaggcaaagaggctttatcagagcggcgggatgctctgaaaacttaaaactcctgcaaactataatttggtcggccaaaagagaacacagaccactgggtgttgtattcgtggacatcgccaaggcttttgacaccgtaagccaccagcacatcattcatgctttgcagcaaagagaggtggatccccacatcgtcggtctggtgagcaatatgtacgagaacatcagtacgtatatcaccacaaagaggaacacacacacagacaaaatccagatccgggttggagtaaagcagggtgacccgatgtcgccccttttatttaacctggcaatggaccctctattatgcaagctggaagagagtggcaaaggataccaccgaggacagagcagcatcacagcgatggcatttgcagacgatctggttttgctgagcgactcctgggaaaatatgaatacaaatattagcatactggagaccttctgcaatctgaccggactcaaaacacaggggcaaaagtgccacggcttttacatcaagccgacaaaggactcttacaccatcaatgactgcgctgcctggactatcaacggcacacccctgaacatgatcgaccccggcgaatctgagaaatacctcggcctgcagtttgacccgtggattggaatagcaaggtccggtctctccacaaaactagatgagtggcttcagcggatcgatcaagcaccacttaaacctctgcagaaaactgatattctcaaaacatacaccatccctcggctgatctacatagctgaccactcagaagtgaaagccgcactactcgaaacccttgaccagaagatccggacagcggtcaaggaatggcttcacctacctccgtgcacctgcgatgccatcctgtactcgagcacgagagacggcggtttgggcatcaccaaattggcaggactgatccccagcgtgcaggcccgtagactgcatcggatcgcacagtcatctgacgatacgatgaaatgcttcatggaaaaagagaggatggaacagctgcataagaaattgtggattcaagctggaggggacagagagaacataccctcgatttgggaagcaccaccgtcgagtgaaccaccaaacaacgtgagcacaaattcggaatgggaagcaccgacccagaaacccaaatttccaaagccttgcaattggaggaaaaacgaattcaaaaaatggaccaaattggcatcccaaggccgcggaattgtaaattttgaaagagacaaaattagtaaccattggatccaatactacagacgcatacctcacaggaaactcctcactgcactacaactcagggccaacgtttaccccacgagagaatttctagccaggggtagacaagaccaatacatcaaggcgtgtaggcactgcgatgcggacattgaatcctgcgcccacatcatcggcaactgcccagtgacacaggacgcccgaatcaagaggcacaattacatctgcgaactgcttctcgaggaggcgaagaagaaggactgggtagtgttcaaggaaccgcacataagggattccaacaaggaactgtacaaacctgacctgatatttgtgaaggatggccgtgcacttgtcgtggatgtgacagtacggtatgaagcagccaaatcatcgctggaggaagccgctgcagagaaagtgagaaagtacaaacacctggaaacggaagtaagacatctcacgaatgcaaaggacgttacttttgtgggctttcccctaggagcgcgggggaaatggcaccaagataactttaaacttttgactgagcttggcctctccaaatcgaggcaagtgaaaatggcagagactttttccacagtagcgctcttttcatctgtggacattgtacatatgtttgccagtagggccagaaaatctatggttatgtgataataggctgccttctgcggggcttgccttctggccatgcccttcttctctcccttgcacctgtacctcttggtctttgaataaagcctgagtaggaaggaccggtaaaaaaaaaaaaaaaaaaaaaaaaaaaaaaacgttgactaaaaaaaaaaaaaaaaaaaaaaaaaaaaaaaaaaaaaaaaaaaaaaaaaaaaaaaaaaaaaaaaaaaaaa

SEQ ID NO: 11690 - DNA, 4919 bp, synthetic construct
  source 1..4919: mol_type = other DNA
gaaataagagagaaaagaagagtaagaagaaatataagagaattcgccaccatggcccctaagaaaaagcggaaggtgaatatcagcggctctagctgcggcagccccaacagcgccgacaccagcagcgacttcaaggacctgtggaccaagctgaaggaatgccacgaccgggaagtgcagggactccaggtgaaggtcaccaaactcaagcaagaaagaatcctggacgcccagagactggaagaattcttcaccaagaaccagcagctgagagagcagcagaaagtgctgcacgagacaatcaaggttctggaagatagactgcgggccggcctgtgcgacagatgcgccgtgaccgaggaacacatgcgcaaaaagcagcaggagttcgagaacattagacagcaaaatctgaaattgatcacagagctgatgaacgagagaaacacactgcaggaggagaacaagaagctgagcgagcagctgcaacagaagatcgagaatgatcagcaacaccaggccgctgagctggaatgtgaagaggacgtgatccccgacagcccaatcacagctttcagcttttctggcgtgaacagactgaggcggaaggaaaacccccacgtgcggtacatcgagcagacccataccaagctggaacacagcgtgtgtgccaacgagatgagaaaggtgtccaagtcctccacccatccccagcacaaccctaacgaaaatgagatcctggtggctgatacctacgaccagtctcagagccctatggccaaggcccacggcaccagctcttatacccctgataagagctccttcaacctggccaccgtggtggccgagacactgggcctgggcgtgcaggaggaaagcgagacacagggcccaatgagccctctgggagatgagctgtaccactgcctggaaggcaaccacaagaaacagccttttgagtccggctccgagactcctggaacaagcgagagcgctacacctgagggcagctatgaacaacttgcaccacaaccgtgtgtgggagaaactttacattctagcctcccacgagacagtgaactgtttgtgcctgaagaggggagcagcgagaaggagagcgaggacgcgccaaaaacatctcctccgacgcctgggaaacatggtttggaacagactggggaggaaaaagtgatggtgactgttcctgacaaaaatccaccttgtccttgctgtggtacccgggtaaactctgtgttgaatctgattgaacatctgaaagtgtcacacgggaaaaggggggtttgttttcggtgtgcaaaatgtggaaaggaaaatagtaactatcacagtgttgtttgtcattttaagaaatgcaggggtccagagacggagaaagccccagctggggagtggatttgtgaggtatgcaacagagattttacaaccaaaattggcctgggacaacacaagagattggcacacccagcagtgagaaatcaggaaaggatcgttgcttcccaaccgaaagaaacatcaaatagaggtgctcacaaaaggtgctggacaaaggaggaggaagaattactaataagactggaggctcagttcgagggaaacaaaaatattaataagcttattgcagaacacataaccaccaaaacagctaagcagatcagtgacaaaaggcgattgctgtccagaaagccagcagaggagccacgtatggagcctggaacgtgtcatcacaccaggagagcagctgcgagcctgagaacggagcctgagatgagtcatcacgcccaggcagaggacagagataatggacctgggagacgccctctgccaggcagggcagctgccggagggagaacaatggacgagataagacgccaccctgataagggcaacggacagcagagacccaccaagcaaaaatcagaagaacagctgcaggcttactataaaaagacactagaggaacgactttcagctggggcacttaacaccttcccccgagcattcaagcaggtaatggaaggccgggatataaagctagtaatcaatcagacagcgcaggactgcttcggatgcctggaatccataagccaaataagaacggcaacccgagataaaaaggacacggtgacccgggagaaacacccaaagaaaccttttcagaagtggatgaagaagagagcaatcaaaaaaggtaattatcttcggttccagcgtttattttatcttgatagagggaaactggctaaaatcattttagatgatattgaatgcttgtcttgtgacataccactcagtgaaatttattcggtttttaaaacaagatgggaaacaactggtagctttaaaagccttggggactttaaaacttacgggaaggctgacaacactgccttcagagaattaattacggctaaagaaattgagaaaaatgtgcaggaaatgagcaaaggctcggctcccggtccagacgggattactcttggggacgtcgtaaagatggatcccgagttttcccggaccatggagattttcaatttatggttaacaactggtaaaatcccggacatggtgagggggtgcagaaccgttttgattccaaaatcatcaaagccggatcgtttgaaagacattaataactggagacctatcacgatcggttccatcttgctgagactgttctccaggattgtaacagctaggctgagcaaagcgtgccccctgaacccaaggcaaagaggctttatcagagcggcgggatgctctgaaaacttaaaactcctgcaaactataatttggtcggccaaaagagaacacagaccactgggtgttgtattcgtggacatcgccaaggcttttgacaccgtaagccaccagcacatcattcatgctttgcagcaaagagaggtggatccccacatcgtcggtctggtgagcaatatgtacgagaacatcagtacgtatatcaccacaaagaggaacacacacacagacaaaatccagatccgggttggagtaaagcagggtgacccgatgtcgccccttttatttaacctggcaatggaccctctattatgcaagctggaagagagtggcaaaggataccaccgaggacagagcagcatcacagcgatggcatttgcagacgatctggttttgctgagcgactcctgggaaaatatgaatacaaatattagcatactggagaccttctgcaatctgaccggactcaaaacacaggggcaaaagtgccacggcttttacatcaagccgacaaagaagtcttacaccatcaatgactgcgctgcctggactatcaacggcacacccctgaacatgatcgaccccggcgaatctgagaaatacctcggcctgcagtttgacccgtggattggaatagcaaggtccggtctctccacaaaactagatttttggcttcagcggatcgatcaagcaccacttaaacctctgcagaaaactgatattctcaaaacatacaccatccctcggctgatctacatagctgaccactcagaagtgaaaagcgcactactcgaaacccttgaccagaagatccggacagcggtcaaggaatggcttcacctacctccgtgcacctgcgatgccatcctgtactcgagcacgagagacggcggtttgggcatcaccaaattggcaggactgatccccagcgtgcaggcccgtagactgcatcggatcgcacagtcatctgacgatacgatgaaatgcttcatggaaaaagagaaaatggaacagctgcataagaaattgtggattcaagctggaggggacagagagaacataccctcgatttgggaagcaccaccgtcgagtgaaccaccaaacaacgtgagcacaaattcggaatgggaagcaccgacccagaaagataaatttccaaagccttgcaattggaggaaaaacgaattcaaaaaatggaccaaattggcatcccaaggccgcggaattgtaaattttgaaagagacaaaattagtaaccattggatccaatactacagacgcatacctcacaggaaactcctcactgcactacaactcagggccaacgtttaccccacgagagaatttctagccaggggtagacaagaccaatacatcaaggcgtgtaggcactgcgatgcggacaacgaatcctgcgcccacatcatcggcaactgcccagtgacacaggacgcccgaatcaagaggcacaattacatctgcgaactgcttctcgaggaggcgaagaagaaggactgggtagtgttcaaggaaccgcacataagggattccaacaaggaactgtacaaacctgacctgatatttgtgaaggatgggcgtgcacttgtcgtggatgtgacagtacggtatgaagcagccaaatcatcgctggaggaagccgctgcagagaaagtgagaaagtacaaacacctggaaacggaagtaagacatctcacgaatgcaaaggacgttacttttgtgggctttcccctaggagcgcgggggaaatggcaccaagataactttaaacttttgactgagcttggcctctccaaatcgaggcaagtgaaaatggcagagactttttccacagtagcgctcttttcatctgtggacattgtacatatgtttgccagtagggccagaaaatctatggttatgtgataataggctgccttctgcggggcttgccttctggccatgcccttcttctctcccttgcacctgtacctcttggtctttgaataaagcctgagtaggaaggaccggtaaaaaaaaaaaaaaaaaaaaaaaaaaaaaaacgttgactaaaaaaaaaaaaaaaaaaaaaaaaaaaaaaaaaaaaaaaaaaaaaaaaaaaaaaaaaaaaaaaaaaaaaa

SEQ ID NO: 11691 - DNA, 4439 bp, synthetic construct
  source 1..4439: mol_type = other DNA
gaaataagagagaaaagaagagtaagaagaaatataagagaattcgccaccatggcttcttgcccgaaacctggccccccggtttcagcaggggcaatgagtttggaaagtggactgaccacccactccgttctcgccatcgaacgtggtcccaattcgttggcaaattccggatcagactttgggggggggggtctggggctaccgttacgcctattgagggtatcggtcggcactcagacctcccgctccgactgggtagacctggtgtcctggagccacccaggacccacgtctaagtcccagcaggttgacctggtgtctttatttcctaaacaccgggttgacctgttatccaaaaacgaccaggtagacctggtggctcaatttttaccatctaaatttccccccaatttggcagaaaatgatttggctttgctggtgaacttagagttctacagatcggatttgcatgtgtatgagggcgttcataaggctgcacattgggagggattaagtggtttgcctgaggtgtatgaacaacttgcaccacaaccgtgtgtgggagaaactttacattctagcctcccacgagacagtgaactgtttgtgcctgaagaggggagcagcgagaaggagagcgaggacgcgccaaaaacatctcctccgacgcctgggaaacatggtttggaacagactggggaggaaaaagtgatggtgactgttcctgacaaaaatccaccttgtccttgctgtggtacccgggtaaactctgtgttgaatctgattgaacatctgaaagtgtcacacgggaaaaggggggtttgttttcggtgtgcaaaatgtggaaaggaaaatagtaactatcacagtgttgtttgtcattttaagaaatgcaggggtccagagacggagaaagccccagctggggagtggatttgtgaggtatgcaacagagattttacaaccaaaattggcctgggacaacacaagagattggcacacccagcagtgagaaatcaggaaaggatcgttgcttcccaaccgaaagaaacatcaaatagaggtgctcacaaaaggtgctggacaaaggaggaggaagaattactaataagactggaggctcagttcgagggaaacaaaaatattaataagcttattgcagaacacataaccaccaaaacagctaagcagatcagtgacaaaaggcgattgctgtccagaaagccagcagaggagccacgtatggagcctggaacgtgtcatcacaccaggagagcagctgcgagcctgagaacggagcctgagatgagtcatcacgcccaggcagaggacagagataatggacctgggagacgccctctgccaggcagggcagctgccggagggagaacaatggacgagataagacgccaccctgataagggcaacggacagcagagacccaccaagcaaaaatcagaagaacagctgcaggcttactataaaaagacactagaggaacgactttcagctggggcacttaacaccttcccccgagcattcaagcaggtaatggaaggccgggatataaagctagtaatcaatcagacagcgcaggactgcttcggatgcctggaatccataagccaaataagaacggcaacccgagataaaaaggacacggtgacccgggagaaacacccaaagaaaccttttcagaagtggatgaagaagagagcaatcaaaaaaggtaattatcttcggttccagcgtttattttatcttgatagagggaaactggctaaaatcattttagatgatattgaatgcttgtcttgtgacataccactcagtgaaatttattcggtttttaaaacaagatgggaaacaactggtagctttaaaagccttggggactttaaaacttacgggaaggctgacaacactgccttcagagaattaattacggctaaagaaattgagaaaaatgtgcaggaaatgagcaaaggctcggctcccggtccagacgggattactcttggggacgtcgtaaagatggatcccgagttttcccggaccatggagattttcaatttatggttaacaactggtaaaatcccggacatggtgagggggtgcagaaccgttttgattccaaaatcatcaaagccggatcgtttgaaagacattaataactggagacctatcacgatcggttccatcttgctgagactgttctccaggattgtaacagctaggctgagcaaagcgtgccccctgaacccaaggcaaagaggctttatcagagcggcgggatgctctgaaaacttaaaactcctgcaaactataatttggtcggccaaaagagaacacagaccactgggtgttgtattcgtggacatcgccaaggcttttgacaccgtaagccaccagcacatcattcatgctttgcagcaaagagaggtggatccccacatcgtcggtctggtgagcaatatgtacgagaacatcagtacgtatatcaccacaaagaggaacacacacacagacaaaatccagatccgggttggagtaaagcagggtgacccgatgtcgccccttttatttaacctggcaatggaccctctattatgcaagctggaagagagtggcaaaggataccaccgaggacagagcagcatcacagcgatggcatttgcagacgatctggttttgctgagcgactcctgggaaaatatgaatacaaatattagcatactggagaccttctgcaatctgaccggactcaaaacacaggggcaaaagtgccacggcttttacatcaagccgacaaagaagtcttacaccatcaatgactgcgctgcctggactatcaacggcacacccctgaacatgatcgaccccggcgaatctgagaaatacctcggcctgcagtttgacccgtggattggaatagcaaggtccggtctctccacaaaactagatttttggcttcagcggatcgatcaagcaccacttaaacctctgcagaaaactgatattctcaaaacatacaccatccctcggctgatctacatagctgaccactcagaagtgaaaagcgcactactcgaaacccttgaccagaagatccggacagcggtcaaggaatggcttcacctacctccgtgcacctgcgatgccatcctgtactcgagcacgagagacggcggtttgggcatcaccaaattggcaggactgatccccagcgtgcaggcccgtagactgcatcggatcgcacagtcatctgacgatacgatgaaatgcttcatggaaaaagagaaaatggaacagctgcataagaaattgtggattcaagctggaggggacagagagaacataccctcgatttgggaagcaccaccgtcgagtgaaccaccaaacaacgtgagcacaaattcggaatgggaagcaccgacccagaaagataaatttccaaagccttgcaattggaggaaaaacgaattcaaaaaatggaccaaattggcatcccaaggccgcggaattgtaaattttgaaagagacaaaattagtaaccattggatccaatactacagacgcatacctcacaggaaactcctcactgcactacaactcagggccaacgtttaccccacgagagaatttctagccaggggtagacaagaccaatacatcaaggcgtgtaggcactgcgatgcggacaacgaatcctgcgcccacatcatcggcaactgcccagtgacacaggacgcccgaatcaagaggcacaattacatctgcgaactgcttctcgaggaggcgaagaagaaggactgggtagtgttcaaggaaccgcacataagggattccaacaaggaactgtacaaacctgacctgatatttgtgaaggatgggcgtgcacttgtcgtggatgtgacagtacggtatgaagcagccaaatcatcgctggaggaagccgctgcagagaaagtgagaaagtacaaacacctggaaacggaagtaagacatctcacgaatgcaaaggacgttacttttgtgggctttcccctaggagcgcgggggaaatggcaccaagataactttaaacttttgactgagcttggcctctccaaatcgaggcaagtgaaaatggcagagactttttccacagtagcgctcttttcatctgtggacattgtacatatgtttgccagtagggccagaaaatctatggttatgtgataataggctgccttctgcggggcttgccttctggccatgcccttcttctctcccttgcacctgtacctcttggtctttgaataaagcctgagtaggaaggaccggtaaaaaaaaaaaaaaaaaaaaaaaaaaaaaaacgttgactaaaaaaaaaaaaaaaaaaaaaaaaaaaaaaaaaaaaaaaaaaaaaaaaaaaaaaaaaaaaaaaaaaaaaa

SEQ ID NO: 11692 - DNA, 6035 bp, synthetic construct
  source 1..6035: mol_type = other DNA
ggtctagttacaactgggcatcgctgcagagatcgcacctcctcgtggtcccgctggtagcccttcgaagggtgactaagtcgatctctgccccaggtacggagccgttgggactcaccagtccaacgtaactcctgcctaaattcggtgaaacaaattcctcggtaaaaagccccatggcccctaagaaaaagcggaaggtgaatatcagcggctctagctgcggcagccccaacagcgccgacaccagcagcgacttcaaggacctgtggaccaagctgaaggaatgccacgaccgggaagtgcagggactccaggtgaaggtcaccaaactcaagcaagaaagaatcctggacgcccagagactggaagaattcttcaccaagaaccagcagctgagagagcagcagaaagtgctgcacgagacaatcaaggttctggaagatagactgcgggccggcctgtgcgacagatgcgccgtgaccgaggaacacatgcgcaaaaagcagcaggagttcgagaacattagacagcaaaatctgaaattgatcacagagctgatgaacgagagaaacacactgcaggaggagaacaagaagctgagcgagcagctgcaacagaagatcgagaatgatcagcaacaccaggccgctgagctggaatgtgaagaggacgtgatccccgacagcccaatcacagctttcagcttttctggcgtgaacagactgaggcggaaggaaaacccccacgtgcggtacatcgagcagacccataccaagctggaacacagcgtgtgtgccaacgagatgagaaaggtgtccaagtcctccacccatccccagcacaaccctaacgaaaatgagatcctggtggctgatacctacgaccagtctcagagccctatggccaaggcccacggcaccagctcttatacccctgataagagctccttcaacctggccaccgtggtggccgagacactgggcctgggcgtgcaggaggaaagcgagacacagggcccaatgagccctctgggagatgagctgtaccactgcctggaaggcaaccacaagaaacagccttttgagtccggctccgagactcctggaacaagcgagagcgctacacctgagggcagccctaagagaaaggtgtccagcgccgagggcgctgccaaggaagagcctaaacggagaagcgccagactgagcgccaagccccccgccaaggtggaagccaagcctaagaaggccgccgctaaggacaagagcagcgataagaaagtccagaccaagggcaagcggggcgccaaaggcaaacaggccgaggtggccaaccaggagacaaaggaagatctgcctgctgagaacggcgaaaccaagaccgaggaatctccagcttctgacgaggccggagagaaggaggccaaaagcgacagcggctctgagacacctggaacaagcgagagcgccaccccggaatccgcttcttgcccgaaacctggccccccggtttcagcaggggcaatgagtttggaaagtggactgaccacccactccgttctcgccatcgaacgtggtcccaattcgttggcaaattccggatcagactttgggggggggggtctggggctaccgttacgcctattgagggtatcggtcggcactcagacctcccgctccgactgggtagacctggtgtcctggagccacccaggacccacgtctaagtcccagcaggttgacctggtgtctttatttcctaaacaccgggttgacctgttatccaaaaacgaccaggtagacctggtggctcaatttttaccatctaaatttccccccaatttggcagaaaatgatttggctttgctggtgaacttagagttctacagatcggatttgcatgtgtatgagtgtgttcattttgctgcacattgggagggattaagtggtttgcctgaggtgtatgaacaacttgcaccacaaccgtgtgtgggagaaactttacattctagcctcccacgagacagtgaactgtttgtgcctgaagaggggagcagcgagaaggagagcgaggacgcgccaaaaacatctcctccgacgcctgggaaacatggtttggaacagactggggaggaaaaagtgatggtgactgttcctgacaaaaatccaccttgtccttgctgtggtacccgggtaaactctgtgttgaatctgattgaacatctgaaagtgtcacacgggaaaaggggggtttgttttcggtgtgcaaaatgtggaaaggaaaatagtaactatcacagtgttgtttgtcattttaagaaatgcaggggtccagagacggagaaagccccagctggggagtggatttgtgaggtatgcaacagagattttacaaccaaaattggcctgggacaacacaagagattggcacacccagcagtgagaaatcaggaaaggatcgttgcttcccaaccgaaagaaacatcaaatagaggtgctcacaaaaggtgctggacaaaggaggaggaagaattactaataagactggaggctcagttcgagggaaacaaaaatattaataagcttattgcagaacacataaccaccaaaacagctaagcagatcagtgacaaaaggcgattgctgtccagaaagccagcagaggagccacgtgaggagcctggaacgtgtcatcacaccaggagagcagctgcgagcctgagaacggagcctgagatgagtcatcacgcccaggcagaggacagagataatggacctgggagacgccctctgccaggcagggcagctgccggagggagaacaatggacgagataagacgccaccctgataagggcaacggacagcagagacccaccaagcaaaaatcagaagaacagctgcaggcttactataaaaagacactagaggaacgactttcagctggggcacttaacaccttcccccgagcattcaagcaggtaatggaaggccgggatataaagctagtaatcaatcagacagcgcaggactgcttcggatgcctggaatccataagccaaataagaacggcaacccgagataaaaaggacacggtgacccgggagaaacacccaaagaaaccttttcagaagtggatgaagaagagagcaatcaaaaaaggtaattatcttcggttccagcgtttattttatcttgatagagggaaactggctaaaatcattttagatgatattgaatgcttgtcttgtgacataccactcagtgaaatttattcggtttttaaaacaagatgggaaacaactggtagctttaaaagccttggggactttaaaacttacgggaaggctgacaacactgccttcagagaattaattacggctaaagaaattgagaaaaatgtgcaggaaatgagcaaaggctcggctcccggtccagacgggattactcttggggacgtcgtaaagatggatcccgagttttcccggaccatggagattttcaatttatggttaacaactggtaaaatcccggacatggtgagggggtgcagaaccgttttgattccaaaatcatcaaagccggatcgtttgaaagacattaataactggagacctatcacgatcggttccatcttgctgagactgttctccaggattgtaacagctaggctgagcaaagcgtgccccctgaacccaaggcaaagaggctttatcagagcggcgggatgctctgaaaacttaaaactcctgcaaactataatttggtcggccaaaagagaacacagaccactgggtgttgtattcgtggacatcgccaaggcttttgacaccgtaagccaccagcacatcattcatgctttgcagcaaagagaggtggatccccacatcgtcggtctggtgagcaatatgtacgagaacatcagtacgtatatcaccacaaagaggaacacacacacagacaaaatccagatccgggttggagtaaagcagggtgacccgatgtcgccccttttatttaacctggcaatggaccctctattatgcaagctggaagagagtggcaaaggataccaccgaggacagagcagcatcacagcgatggcatttgcagacgatctggttttgctgagcgactcctgggaaaatatgaatacaaatattagcatactggagaccttctgcaatctgaccggactcaaaacacaggggcaaaagtgccacggcttttacatcaagccgacaaaggactcttacaccatcaatgactgcgctgcctggactatcaacggcacacccctgaacatgatcgaccccggcgaatctgagaaatacctcggcctgcagtttgacccgtggattggaatagcaaggtccggtctctccacaaaactagatttttggcttcagcggatcgatcaagcaccacttaaacctctgcagaaaactgatattctcaaaacatacaccatccctcggctgatctacatagctgaccactcagaagtgaaaagcgcactactcgaaacccttgaccagaagatccggacagcggtcaaggaatggcttcacctacctccgtgcacctgcgatgccatcctgtactcgagcacgagagacggcggtttgggcatcaccaaattggcaggactgatccccagcgtgcaggcccgtagactgcatcggatcgcacagtcatctgacgatacgatgaaatgcttcatggaaaaagagaaaatggaacagctgcataagaaattgtggattcaagctggaggggacagagagaacataccctcgatttgggaagcaccaccgtcgagtgaaccaccaaacaacgtgagcacaaattcggaatgggaagcaccgacccagaaagataaatttccaaagccttgcaattggaggaaaaacgaattcaaaaaatggaccaaattggcatcccaaggccgcggaattgtaaattttgaaagagacaaaattagtaaccattggatccaatactacagacgcatacctcacaggaaactcctcactgcactacaactcagggccaacgtttaccccacgagagaatttctagccaggggtagacaagaccaatacatcaaggcgtgtaggcactgcgatgcggacattgaatcctgcgcccacatcatcggcaactgcccagtgacacaggacgcccgaatcaagaggcacaattacatctgcgaactgcttctcgaggaggcgaagaagaaggactgggtagtgttcaaggaaccgcacataagggattccaacaaggaactgtacaaacctgacctgatatttgtgaaggatgcccgtgcacttgtcgtggatgtgacagtacggtatgaagcagccaaatcatcgctggaggaagccgctgcagagaaagtgagaaagtacaaacacctggaaacggaagtaagacatctcacgaatgcaaaggacgttacttttgtgggctttcccctaggagcgcgggggaaatggcaccaagataactttaaacttttgactgagcttggcctctccaaatcgaggcaagtgaaaatggcagagactttttccacagtagcgctcttttcatctgtggacattgtacatatgtttgccagtagggccagaaaatctatggttatgaggaagaagaggaggcagaggaggaggtgataataggctgccttctgcggggcttgccttctggccatgcccttcttctctcccttgcacctgtacctcttggtctttgaataaagcctgagtaggaaggaccggtagacatgataagatacattgatgagtttggacaaaccacaactagaatgcagtgaaaaaaatgctttatttgtgaaatttgtgatgctattgctttatttgtaaccattataagctgcaataaacaagttaacaacaacaaaaaaaaaaaaaaaaaaaaaaaaaaaaaaacgttgactaaaaaaaaaaaaaaaaaaaaaaaaaaaaaaaaaaaaaaaaaaaaaaaaaaaaaaaaaaaaaaaaaaaaaa

SEQ ID NO: 11693 - DNA, 4439 bp, synthetic construct
  source 1..4439: mol_type = other DNA
gaaataagagagaaaagaagagtaagaagaaatataagagaattcgccaccatggcttcttgcccgaaacctggccccccggtttcagcaggggcaatgagtttggaaagtggactgaccacccactccgttctcgccatcgaacgtggtcccaattcgttggcaaattccggatcagactttgggggggggggtctggggggcccgttacgcctattgagggtatcggtcggcactcagacctcccgctccgactgggtagacctggtgtcctggagccacccaggacccacgtctaagtcccagcaggttgacctggtgtctttatttcctaaacaccgggttgacctgttatccaaaaacgaccaggtagacctggtggctcaatttttaccatctaaatttccccccaatttggcagaaaatgatttggctttgctggtgaacttagagttctacagatcggatttgcatgtgtatgagtgtgttcataaggctgcacattgggagggattaagtggtttgcctgaggtgtatgaacaacttgcaccacaaccgtgtgtgggagaaactttacattctagcctcccacgagacagtgaactgtttgtgcctgaagaggggagcagcgagaaggagagcgaggacgcgccaaaaacatctcctccgacgcctgggaaacatggtttggaacagactggggaggaaaaagtgatggtgactgttcctgacaaaaatccaccttgtccttgctgtggtacccgggtaaactctgtgttgaatctgattgaacatctgaaagtgtcacacgggaaaaggggggtttgttttcggtgtgcaaaatgtggaaaggaaaatagtaactatcacagtgttgtttgtcattttaagaaatgcaggggtccagagacggagaaagccccagctggggagtggatttgtgaggtatgcaacagagattttacaaccaaaattggcctgggacaacacaagagattggcacacccagcagtgagaaatcaggaaaggatcgttgcttcccaaccgaaagaaacatcaaatagaggtgctcacaaaaggtgctggacaaaggaggaggaagaattactaataagactggaggctcagttcgagggaaacaaaaatattaataagcttattgcagaacacataaccaccaaaacagctaagcagatcagtgacaaaaggcgattgctgtccagaaagccagcagaggagccacgtatggagcctggaacgtgtcatcacaccaggagagcagctgcgagcctgagaacggagcctgagatgagtcatcacgcccaggcagaggacagagataatggacctgggagacgccctctgccaggcagggcagctgccggagggagaacaatggacgagataagacgccaccctgataagggcaacggacagcagagacccaccaagcaaaaatcagaagaacagctgcaggcttactataaaaagacactagaggaacgactttcagctggggcacttaacaccttcccccgagcattcaagcaggtaatggaaggccgggatataaagctagtaatcaatcagacagcgcaggactgcttcggatgcctggaatccataagccaaataagaacggcaacccgagataaaaaggacacggtgacccgggagaaacacccaaagaaaccttttcagaagtggatgaagaagagagcaatcaaaaaaggtaattatcttcggttccagcgtttattttatcttgatagagggaaactggctaaaatcattttagatgatattgaatgcttgtcttgtgacataccactcagtgaaatttattcggtttttaaaacaagatgggaaacaactggtagctttaaaagccttggggactttaaaacttacgggaaggctgacaacactgccttcagagaattaattacggctaaagaaattgagaaaaatgtgcaggaaatgagcaaaggctcggctcccggtccagacgggattactcttggggacgtcgtaaagatggatcccgagttttcccggaccatggagattttcaatttatggttaacaactggtaaaatcccggacatggtgagggggtgcagaaccgttttgattccaaaatcatcaaagccggatcgtttgaaagacattaataactggagacctatcacgatcggttccatcttgctgagactgttctccaggattgtaacagctaggctgagcaaagcgtgccccctgaacccaaggcaaagaggctttatcagagcggcgggatgctctgaaaacttaaaactcctgcaaactataatttggtcggccaaaagagaacacagaccactgggtgttgtattcgtggacatcgccaaggcttttgacaccgtaagccaccagcacatcattcatgctttgcagcaaagagaggtggatccccacatcgtcggtctggtgagcaatatgtacgagaacatcagtacgtatatcaccacaaagaggaacacacacacagacaaaatccagatccgggttggagtaaagcagggtgacccgatgtcgccccttttatttaacctggcaatggaccctctattatgcaagctggaagagagtggcaaaggataccaccgaggacagagcagcatcacagcgatggcatttgcagacgatctggttttgctgagcgactcctgggaaaatatgaatacaaatattagcatactggagaccttctgcaatctgaccggactcaaaacacaggggcaaaagtgccacggcttttacatcaagccgacaaagaagtcttacaccatcaatgactgcgctgcctggactatcaacggcacacccctgaacatgatcgaccccggcgaatctgagaaatacctcggcctgcagtttgacccgtggattggaatagcaaggtccggtctctccacaaaactagatttttggcttcagcggatcgatcaagcaccacttaaacctctgcagaaaactgatattctcaaaacatacaccatccctcggctgatctacatagctgaccactcagaagtgaaaagcgcactactcgaaacccttgaccagaagatccggacagcggtcaaggaatggcttcacctacctccgtgcacctgcgatgccatcctgtactcgagcacgagagacggcggtttgggcatcaccaaattggcaggactgatccccagcgtgcaggcccgtagactgcatcggatcgcacagtcatctgacgatacgatgaaatgcttcatggaaaaagagaaaatggaacagctgcataagaaattgtggattcaagctggaggggacagagagaacataccctcgatttgggaagcaccaccgtcgagtgaaccaccaaacaacgtgagcacaaattcggaatgggaagcaccgacccagaaagataaatttccaaagccttgcaattggaggaaaaacgaattcaaaaaatggaccaaattggcatcccaaggccgcggaattgtaaattttgaaagagacaaaattagtaaccattggatccaatactacagacgcatacctcacaggaaactcctcactgcactacaactcagggccaacgtttaccccacgagagaatttctagccaggggtagacaagaccaatacatcaaggcgtgtaggcactgcgatgcggacaacgaatcctgcgcccacatcatcggcaactgcccagtgacacaggacgcccgaatcaagaggcacaattacatctgcgaactgcttctcgaggaggcgaagaagaaggactgggtagtgttcaaggaaccgcacataagggattccaacaaggaactgtacaaacctgacctgatatttgtgaaggatgggcgtgcacttgtcgtggatgtgacagtacggtatgaagcagccaaatcatcgctggaggaagccgctgcagagaaagtgagaaagtacaaacacctggaaacggaagtaagacatctcacgaatgcaaaggacgttacttttgtgggctttcccctaggagcgcgggggaaatggcaccaagataactttaaacttttgactgagcttggcctctccaaatcgaggcaagtgaaaatggcagagactttttccacagtagcgctcttttcatctgtggacattgtacatatgtttgccagtagggccagaaaatctatggttatgtgataataggctgccttctgcggggcttgccttctggccatgcccttcttctctcccttgcacctgtacctcttggtctttgaataaagcctgagtaggaaggaccggtaaaaaaaaaaaaaaaaaaaaaaaaaaaaaaacgttgactaaaaaaaaaaaaaaaaaaaaaaaaaaaaaaaaaaaaaaaaaaaaaaaaaaaaaaaaaaaaaaaaaaaaaa

SEQ ID NO: 11694 - DNA, 4439 bp, synthetic construct
  source 1..4439: mol_type = other DNA
gaaataagagagaaaagaagagtaagaagaaatataagagaattcgccaccatggcttcttgcccgaaacctggccccccggtttcagcaggggcaatgagtttggaaagtggactgaccacccactccgttctcgccatcgaacgtggtcccaattcgttggcaaattccggatcagactttgggggggggggtctggggctaccgttacgcctattgagggtatcggtcggcactcagacctcccgctccgactgggtagacctggtgtcctggagccacccaggacccacgtctaagtcccagcaggttgacctggtgtctttatttcctaaacaccgggttgacctgttatccaaaaacgaccaggtagacctggtggctcaatttttaccatctaaatttccccccaatttggcagaaaatgatttggctttgctggtgaacttagagttctacagatcggatttgcatgtgtatgagtgtgttcataaggctgcacattgggagggattaagtggtttgcctgaggtgtatgaacaacttgcaccacaaccgtgtgtgggagaaactttacattctagcctcccacgagacagtgaactgtttgtgcctgaagaggggagcagcgagaaggagagcgaggacgcgccaaaaacatctcctccgacgcctgggaaacatggtagagaacagactggggaggaaaaagtgatggtgactgttcctgacaaaaatccaccttgtccttgctgtggtacccgggtaaactctgtgttgaatctgattgaacatctgaaagtgtcacacgggaaaaggggggtttgttttcggtgtgcaaaatgtggaaaggaaaatagtaactatcacagtgttgtttgtcattttaagaaatgcaggggtccagagacggagaaagccccagctggggagtggatttgtgaggtatgcaacagagattttacaaccaaaattggcctgggacaacacaagagattggcacacccagcagtgagaaatcaggaaaggatcgttgcttcccaaccgaaagaaacatcaaatagaggtgctcacaaaaggtgctggacaaaggaggaggaagaattactaataagactggaggctcagttcgagggaaacaaaaatattaataagcttattgcagaacacataaccaccaaaacagctaagcagatcagtgacaaaaggcgattgctgtccagaaagccagcagaggagccacgtatggagcctggaacgtgtcatcacaccaggagagcagctgcgagcctgagaacggagcctgagatgagtcatcacgcccaggcagaggacagagataatggacctgggagacgccctctgccaggcagggcagctgccggagggagaacaatggacgagataagacgccaccctgataagggcaacggacagcagagacccaccaagcaaaaatcagaagaacagctgcaggcttactataaaaagacactagaggaacgactttcagctggggcacttaacaccttcccccgagcattcaagcaggtaatggaaggccgggatataaagctagtaatcaatcagacagcgcaggactgcttcggatgcctggaatccataagccaaataagaacggcaacccgagataaaaaggacacggtgacccgggagaaacacccaaagaaaccttttcagaagtggatgaagaagagagcaatcaaaaaaggtaattatcttcggttccagcgtttattttatcttgatagagggaaactggctaaaatcattttagatgatattgaatgcttgtcttgtgacataccactcagtgaaatttattcggtttttaaaacaagatgggaaacaactggtagctttaaaagccttggggactttaaaacttacgggaaggctgacaacactgccttcagagaattaattacggctaaagaaattgagaaaaatgtgcaggaaatgagcaaaggctcggctcccggtccagacgggattactcttggggacgtcgtaaagatggatcccgagttttcccggaccatggagattttcaatttatggttaacaactggtaaaatcccggacatggtgagggggtgcagaaccgttttgattccaaaatcatcaaagccggatcgtttgaaagacattaataactggagacctatcacgatcggttccatcttgctgagactgttctccaggattgtaacagctaggctgagcaaagcgtgccccctgaacccaaggcaaagaggctttatcagagcggcgggatgctctgaaaacttaaaactcctgcaaactataatttggtcggccaaaagagaacacagaccactgggtgttgtattcgtggacatcgccaaggcttttgacaccgtaagccaccagcacatcattcatgctttgcagcaaagagaggtggatccccacatcgtcggtctggtgagcaatatgtacgagaacatcagtacgtatatcaccacaaagaggaacacacacacagacaaaatccagatccgggttggagtaaagcagggtgacccgatgtcgccccttttatttaacctggcaatggaccctctattatgcaagctggaagagagtggcaaaggataccaccgaggacagagcagcatcacagcgatggcatttgcagacgatctggttttgctgagcgactcctgggaaaatatgaatacaaatattagcatactggagaccttctgcaatctgaccggactcaaaacacaggggcaaaagtgccacggcttttacatcaagccgacaaagaagtcttacaccatcaatgactgcgctgcctggactatcaacggcacacccctgaacatgatcgaccccggcgaatctgagaaatacctcggcctgcagtttgacccgtggattggaatagcaaggtccggtctctccacaaaactagatttttggcttcagcggatcgatcaagcaccacttaaacctctgcagaaaactgatattctcaaaacatacaccatccctcggctgatctacatagctgaccactcagaagtgaaaagcgcactactcgaaacccttgaccagaagatccggacagcggtcaaggaatggcttcacctacctccgtgcacctgcgatgccatcctgtactcgagcacgagagacggcggtttgggcatcaccaaattggcaggactgatccccagcgtgcaggcccgtagactgcatcggatcgcacagtcatctgacgatacgatgaaatgcttcatggaaaaagagaaaatggaacagctgcataagaaattgtggattcaagctggaggggacagagagaacataccctcgatttgggaagcaccaccgtcgagtgaaccaccaaacaacgtgagcacaaattcggaatgggaagcaccgacccagaaagataaatttccaaagccttgcaattggaggaaaaacgaattcaaaaaatggaccaaattggcatcccaaggccgcggaattgtaaattttgaaagagacaaaattagtaaccattggatccaatactacagacgcatacctcacaggaaactcctcactgcactacaactcagggccaacgtttaccccacgagagaatttctagccaggggtagacaagaccaatacatcaaggcgtgtaggcactgcgatgcggacaacgaatcctgcgcccacatcatcggcaactgcccagtgacacaggacgcccgaatcaagaggcacaattacatctgcgaactgcttctcgaggaggcgaagaagaaggactgggtagtgttcaaggaaccgcacataagggattccaacaaggaactgtacaaacctgacctgatatttgtgaaggatgggcgtgcacttgtcgtggatgtgacagtacggtatgaagcagccaaatcatcgctggaggaagccgctgcagagaaagtgagaaagtacaaacacctggaaacggaagtaagacatctcacgaatgcaaaggacgttacttttgtgggctttcccctaggagcgcgggggaaatggcaccaagataactttaaacttttgactgagcttggcctctccaaatcgaggcaagtgaaaatggcagagactttttccacagtagcgctcttttcatctgtggacattgtacatatgtttgccagtagggccagaaaatctatggttatgtgataataggctgccttctgcggggcttgccttctggccatgcccttcttctctcccttgcacctgtacctcttggtctttgaataaagcctgagtaggaaggaccggtaaaaaaaaaaaaaaaaaaaaaaaaaaaaaaacgttgactaaaaaaaaaaaaaaaaaaaaaaaaaaaaaaaaaaaaaaaaaaaaaaaaaaaaaaaaaaaaaaaaaaaaaa

SEQ ID NO: 11695 - DNA, 4457 bp, synthetic construct
  source 1..4457: mol_type = other DNA
gaaataagagagaaaagaagagtaagaagaaatataagagaattcgccaccatgaagaagaagagcaagaaggcttcttgcccgaaacctggccccccggtttcagcaggggcaatgagtttggaaagtggactgaccacccactccgttctcgccatcgaacgtggtcccaattcgttggcaaattccggatcagactttgggggggggggtctggggctaccgttacgcctattgagggtatcggtcggcactcagacctcccgctccgactgggtagacctggtgtcctggagccacccaggacccacgtctaagtcccagcaggttgacctggtgtctttatttcctaaacaccgggttgacctgttatccaaaaacgaccaggtagacctggtggctcaatttttaccatctaaatttccccccaatttggcagaaaatgatttggctttgctggtgaacttagagttctacagatcggatttgcatgtgtatgagtgtgttcataaggctgcacattgggagggattaagtggtttgcctgaggtgtatgaacaacttgcaccacaaccgtgtgtgggagaaactttacattctagcctcccacgagacagtgaactgtttgtgcctgaagaggggagcagcgagaaggagagcgaggacgcgccaaaaacatctcctccgacgcctgggaaacatggtttggaacagactggggaggaaaaagtgatggtgactgttcctgacaaaaatccaccttgtccttgctgtggtacccgggtaaactctgtgttgaatctgattgaacatctgaaagtgtcacacgggaaaaggggggtttgttttcggtgtgcaaaatgtggaaaggaaaatagtaactatcacagtgttgtttgtcattttaagaaatgcaggggtccagagacggagaaagccccagctggggagtggatttgtgaggtatgcaacagagattttacaaccaaaattggcctgggacaacacaagagattggcacacccagcagtgagaaatcaggaaaggatcgttgcttcccaaccgaaagaaacatcaaatagaggtgctcacaaaaggtgctggacaaaggaggaggaagaattactaataagactggaggctcagttcgagggaaacaaaaatattaataagcttattgcagaacacataaccaccaaaacagctaagcagatcagtgacaaaaggcgattgctgtccagaaagccagcagaggagccacgtatggagcctggaacgtgtcatcacaccaggagagcagctgcgagcctgagaacggagcctgagatgagtcatcacgcccaggcagaggacagagataatggacctgggagacgccctctgccaggcagggcagctgccggagggagaacaatggacgagataagacgccaccctgataagggcaacggacagcagagacccaccaagcaaaaatcagaagaacagctgcaggcttactataaaaagacactagaggaacgactttcagctggggcacttaacaccttcccccgagcattcaagcaggtaatggaaggccgggatataaagctagtaatcaatcagacagcgcaggactacttcggatgcctggaatccataagccaaataagaacggcaacccgagataaaaaggacacggtgacccgggagaaacacccaaagaaaccttttcagaagtggatgaagaagagagcaatcaaaaaaggtaattatcttcggttccagcgtttattttatcttgatagagggaaactggctaaaatcattttagatgatattgaatgcttgtcttgtgacataccactcagtgaaatttattcggtttttaaaacaagatgggaaacaactggtagctttaaaagccttggggactttaaaacttacgggaaggctgacaacactgccttcagagaattaattacggctaaagaaattgagaaaaatgtgcaggaaatgagcaaaggctcggctcccggtccagacgggattactcttggggacgtcgtaaagatggatcccgagttttcccggaccatggagattttcaatttatggttaacaactggtaaaatcccggacatggtgagggggtgcagaaccgttttgattccaaaatcatcagacccggatcgtttgaaagacattaataactggagacctatcacgatcggttccatcttgctgagactgttctccaggattgtaacagctaggctgagcaaagcgtgccccctgaacccaaggcaaagaggctttatcagagcggcgggatgctctgaaaacttaaaactcctgcaaactataatttggtcggccaaaagagaacacagaccactgggtgttgtattcgtggacatcgccaaggcttttgacaccgtaagccaccagcacatcattcatgctttgcagcaaagagaggtggatccccacatcgtcggtctggtgagcaatatgtacgagaacatcagtacgtatatcaccacaaagaggaacacacacacagacaaaatccagatccgggttggagtaaagcagggtgacccgatgtcgccccttttatttaacctggcaatggaccctctattatgcaagctggaagagagtggcaaaggataccaccgaggacagagcagcatcacagcgatggcatttgcagacgatctggttttgctgagcgactcctgggaaaatatgaatacaaatattagcatactggagaccttctgcaatctgaccggactcaaaacacaggggcaaaagtgccacggcttttacatcaagccgacaaagaagtcttacaccatcaatgactgcgctgcctggactatcaacggcacacccctgaacatgatcgaccccggcgaatctgagaaatacctcggcctgcagtttgacccgtggattggaatagcaaggtccggtctctccacaaaactagatttttggcttcagcggatcgatcaagcaccacttaaacctctgcagaaaactgatattctcaaaacatacaccatccctcggctgatctacatagctgaccactcagaagtgaaaagcgcactactcgaaacccttgaccagaagatccggacagcggtcaaggaatggcttcacctacctccgtgcacctgcgatgccatcctgtactcgagcacgagagacggcggtttgggcatcaccaaattggcaggactgatccccagcgtgcaggcccgtagactgcatcggatcgcacagtcatctgacgatacgatgaaatgcttcatggaaaaagagaaaatggaacagctgcataagaaattgtggattcaagctggaggggacagagagaacataccctcgatttgggaagcaccaccgtcgagtgaaccaccaaacaacgtgagcacaaattcggaatgggaagcaccgacccagaaagataaatttccaaagccttgcaattggaggaaaaacgaattcaaaaaatggaccaaattggcatcccaaggccgcggaattgtaaattttgaaagagacaaaattagtaaccattggatccaatactacagacgcatacctcacaggaaactcctcactgcactacaactcagggccaacgtttaccccacgagagaatttctagccaggggtagacaagaccaatacatcaaggcgtgtaggcactgcgatgcggacaacgaatcctgcgcccacatcatcggcaactgcccagtgacacaggacgcccgaatcaagaggcacaattacatctgcgaactgcttctcgaggaggcgaagaagaaggactgggtagtgttcaaggaaccgcacataagggattccaacaaggaactgtacaaacctgacctgatatttgtgaaggatgggcgtgcacttgtcgtggatgtgacagtacggtatgaagcagccaaatcatcgctggaggaagccgctgcagagaaagtgagaaagtacaaacacctggaaacggaagtaagacatctcacgaatgcaaaggacgttacttttgtgggctttcccctaggagcgcgggggaaatggcaccaagataactttaaacttttgactgagcttggcctctccaaatcgaggcaagtgaaaatggcagagactttttccacagtagcgctcttttcatctgtggacattgtacatatgtttgccagtagggccagaaaatctatggttatgtgataataggctgccttctgcggggcttgccttctggccatgcccttcttctctcccttgcacctgtacctcttggtctttgaataaagcctgagtaggaaggaccggtaaaaaaaaaaaaaaaaaaaaaaaaaaaaaaacgttgactaaaaaaaaaaaaaaaaaaaaaaaaaaaaaaaaaaaaaaaaaaaaaaaaaaaaaaaaaaaaaaaaaaaaaa

SEQ ID NO: 11696 - DNA, 4919 bp, synthetic construct
  source 1..4919: mol_type = other DNA
gaaataagagagaaaagaagagtaagaagaaatataagagaattcgccaccatggcccctaagaaaaagcggaaggtgaatatcagcggctctagctgcggcagccccaacagcgccgacaccagcagcgacttcaaggacctgtggaccaagctgaaggaatgccacgaccgggaagtgcagggactccaggtgaaggtcaccaaactcaagcaagaaagaatcctggacgcccagagactggaagaattcttcaccaagaaccagcagctgagagagcagcagaaagtgctgcacgagacaatcaaggttctggaagatagactgcgggccggcctgtgcgacagatgcgccgtgaccgaggaacacatgcgcaaaaagcagcaggagttcgagaacattagacagcaaaatctgaaattgatcacagagctgatgaacgagagaaacacactgcaggaggagaacaagaagctgagcgagcagctgcaacagaagatcgagaatgatcagcaacaccaggccgctgagctggaatgtgaagaggacgtgatccccgacagcccaatcacagctttcagcttttctggcgtgaacagactgaggcggaaggaaaacccccacgtgcggtacatcgagcagacccataccaagctggaacacagcgtgtgtgccaacgagatgagaaaggtgtccaagtcctccacccatccccagcacaaccctaacgaaaatgagatcctggtggctgatacctacgaccagtctcagagccctatggccaaggcccacggcaccagctcttatacccctgataagagctccttcaacctggccaccgtggtggccgagacactgggcctgggcgtgcaggaggaaagcgagacacagggcccaatgagccctctgggagatgagctgtaccactgcctggaaggcaaccacaagaaacagccttttgagtccggctccgagactcctggaacaagcgagagcgctacacctgagggcagctatgaacaacttgcaccacaaccgtgtgtgggagaaactttacattctagcctcccacgagacagtgaactgtttgtgcctgaagaggggagcagcgagaaggagagcgaggacgcgccaaaaacatctcctccgacgcctgggaaacatggtttgagacagactggggaggaaaaagtgatggtgactgttcctgacaaaaatccaccttgtccttgctgtggtacccgggtaaactctgtgttgaatctgattgaacatctgaaagtgtcacacgggaaaaggggggtttgttttcggtgtgcaaaatgtggaaaggaaaatagtaactatcacagtgttgtttgtcattttaagaaatgcaggggtccagagacggagaaagccccagctggggagtggatttgtgaggtatgcaacagagattttacaaccaaaattggcctgggacaacacaagagattggcacacccagcagtgagaaatcaggaaaggatcgttgcttcccaaccgaaagaaacatcaaatagaggtgctcacaaaaggtgctggacaaaggaggaggaagaattactaataagactggaggctcagttcgagggaaacaaaaatattaataagcttattgcagaacacataaccaccaaaacagctaagcagatcagtgacaaaaggcgattgctgtccagaaagccagcagaggagccacgtatggagcctggaacgtgtcatcacaccaggagagcagctgcgagcctgagaacggagcctgagatgagtcatcacgcccaggcagaggacagagataatggacctgggagacgccctctgccaggcagggcagctgccggagggagaacaatggacgagataagacgccaccctgataagggcaacggacagcagagacccaccaagcaaaaatcagaagaacagctgcaggcttactataaaaagacactagaggaacgactttcagctggggcacttaacaccttcccccgagcattcaagcaggtaatggaaggccgggatataaagctagtaatcaatcagacagcgcaggactgcttcggatgcctggaatccataagccaaataagaacggcaacccgagataaaaaggacacggtgacccgggagaaacacccaaagaaaccttttcagaagtggatgaagaagagagcaatcaaaaaaggtaattatcttcggttccagcgtttattttatcttgatagagggaaactggctaaaatcattttagatgatattgaatgcttgtcttgtgacataccactcagtgaaatttattcggtttttaaaacaagatgggaaacaactggtagctttaaaagccttggggactttaaaacttacgggaaggctgacaacactgccttcagagaattaattacggctaaagaaattgagaaaaatgtgcaggaaatgagcaaaggctcggctcccggtccagacgggattactcttggggacgtcgtaaagatggatcccgagttttcccggaccatggagattttcaatttatggttaacaactggtaaaatcccggacatggtgagggggtgcagaaccgttttgattccaaaatcatcaaagccggatcgtttgaaagacattaataactggagacctatcacgatcggttccatcttgctgagactgttctccaggattgtaacagctaggctgagcaaagcgtgccccctgaacccaaggcaaagaggctttatcagagcggcgggatgctctgaaaacttaaaactcctgcaaactataatttggtcggccaaaagagaacacagaccactgggtgttgtattcgtggacatcgccaaggcttttgacaccgtaagccaccagcacatcattcatgctttgcagcaaagagaggtggatccccacatcgtcggtctggtgagcaatatgtacgagaacatcagtacgtatatcaccacaaagaggaacacacacacagacaaaatccagatccgggttggagtaaagcagggtgacccgatgtcgccccttttatttaacctggcaatggaccctctattatgcaagctggaagagagtggcaaaggataccaccgaggacagagcagcatcacagcgatggcatttgcagacgatctggttttgctgagcgactcctgggaaaatatgaatacaaatattagcatactggagaccttctgcaatctgaccggactcaaaacacaggggcaaaagtgccacggcttttacatcaagccgacaaagaagtcttacaccatcaatgactgcgctgcctggactatcaacggcacacccctgaacatgatcgaccccggcgaatctgagaaatacctcggcctgcagtttgacccgtggattggaatagcaaggtccggtctctccacaaaactagatttttggcttcagcggatcgatcaagcaccacttaaacctctgcagaaactggatattctcaaaacatacaccatccctcggctgatctacatagctgaccactcagaagtgaaaagcgcactactcgaaacccttgaccagaagatccggacagcggtcaaggaatggcttcacctacctccgtgcacctgcgatgccatcctgtactcgagcacgagagacggcggtttgggcatcaccaaattggcaggactgatccccagcgtgcaggcccgtagactgcatcggatcgcacagtcatctgacgatacgatgaaatgcttcatggaaaaagagaaaatggaacagctgcataagaaattgtggattcaagctggaggggacagagagaacataccctcgatttgggaagcaccaccgtcgagtgaaccaccaaacaacgtgagcacaaattcggaatgggaagcaccgacccagaaagataaatttccaaagccttgcaattggaggaaaaacgaattcaaaaaatggaccaaattggcatcccaaggccgcggaattgtaaattttgaaagagacaaaattagtaaccattggatccaatactacagacgcatacctcacaggaaactcctcactgcactacaactcagggccaacgtttaccccacgagagaatttctagccaggggtagacaagaccaatacatcaaggcgtgtaggcactgcgatgcggacaacgaatcctgcgcccacatcatcggcaactgcccagtgacacaggacgcccgaatcaagaggcacaattacatctgcgaactgcttctcgaggaggcgaagaagaaggactgggtagtgttcaaggaaccgcacataagggattccaacaaggaactgtacaaacctgacctgatatttgtgaaggatgggcgtgcacttgtcgtggatgtgacagtacggtatgaagcagccaaatcatcgctggaggaagccgctgcagagaaagtgagaaagtacaaacacctggaaacggaagtaagacatctcacgaatgcaaaggacgttacttttgtgggctttcccctaggagcgcgggggaaatggcaccaagataactttaaacttttgactgagcttggcctctccaaatcgaggcaagtgaaaatggcagagactttttccacagtagcgctcttttcatctgtggacattgtacatatgtttgccagtagggccagaaaatctatggttatgtgataataggctgccttctgcggggcttgccttctggccatgcccttcttctctcccttgcacctgtacctcttggtctttgaataaagcctgagtaggaaggaccggtaaaaaaaaaaaaaaaaaaaaaaaaaaaaaaacgttgactaaaaaaaaaaaaaaaaaaaaaaaaaaaaaaaaaaaaaaaaaaaaaaaaaaaaaaaaaaaaaaaaaaaaaa

SEQ ID NO: 11697 - DNA, 5171 bp, synthetic construct
  source 1..5171: mol_type = other DNA
gaaataagagagaaaagaagagtaagaagaaatataagagaattcgccaccatgcctaagagaaaggtgtccagcgccgagggcgctgccaaggaagagcctaaacggagaagcgccagactgagcgccaagccccccgccaaggtggaagccaagcctaagaaggccgccgctaaggacaagagcagcgataagaaagtccagaccaagggcaagcggggcgccaaaggcaaacaggccgaggtggccaaccaggagacaaaggaagatctgcctgctgagaacggcgaaaccaagaccgaggaatctccagcttctgacgaggccggagagaaggaggccaaaagcgacagcggctctgagacacctggaacaagcgagagcgccaccccggaatccaatatcagcggctctagctgcggcagccccaacagcgccgacaccagcagcgacttcaaggacctgtggaccaagctgaaggaatgccacgaccgggaagtgcagggactccaggtgaaggtcaccaaactcaagcaagaaagaatcctggacgcccagagactggaagaattcttcaccaagaaccagcagctgagagagcagcagaaagtgctgcacgagacaatcaaggttctggaagatagactgcgggccggcctgtgcgacagatgcgccgtgaccgaggaacacatgcgcaaaaagcagcaggagttcgagaacattagacagcaaaatctgaaattgatcacagagctgatgaacgagagaaacacactgcaggaggagaacaagaagctgagcgagcagctgcaacagaagatcgagaatgatcagcaacaccaggccgctgagctggaatgtgaagaggacgtgatccccgacagcccaatcacagctttcagcttttctggcgtgaacagactgaggcggaaggaaaacccccacgtgcggtacatcgagcagacccataccaagctggaacacagcgtgtgtgccaacgagatgagaaaggtgtccaagtcctccacccatccccagcacaaccctaacgaaaatgagatcctggtggctgatacctacgaccagtctcagagccctatggccaaggcccacggcaccagctcttatacccctgataagagctccttcaacctggccaccgtggtggccgagacactgggcctgggcgtgcaggaggaaagcgagacacagggcccaatgagccctctgggagatgagctgtaccactgcctggaaggcaaccacaagaaacagccttttgagtccggctccgagactcctggaacaagcgagagcgctacacctgagggcagcctgtttgtgcctgaagaggggagcagcgagaaggagagcgaggacgcgccaaaaacatctcctccgacgcctgggaaacatggtttggaacagactggggaggaaaaagtgatggtgactgttcctgacaaaaatccaccttgtccttgctgtggtacccgggtaaactctgtgttgaatctgattgaacatctgaaagtgtcacacgggaaaaggggggtttgttttcggtgtgcaaaatgtggaaaggaaaatagtaactatcacagtgttgtttgtcattttaagaaatgcaggggtccagagacggagaaagccccagctggggagtggatttgtgaggtatgcaacagagattttacaaccaaaattggcctgggacaacacaagagattggcacacccagcagtgagaaatcaggaaaggatcgttgcttcccaaccgaaagaaacatcaaatagaggtgctcacaaaaggtgctggacaaaggaggaggaagaattactaataagactggaggctcagttcgagggaaacaaaaatattaataagcttattgcagaacacataaccaccaaaacagctaagcagatcagtgacaaaaggcgattgctgtccagaaagccagcagaggagccacgtatggagcctggaacgtgtcatcacaccaggagagcagctgcgagcctgagaacggagcctgagatgagtcatcacgcccaggcagaggacagagataatggacctgggagacgccctctgccaggcagggcagctgccggagggagaacaatggacgagataagacgccaccctgataagggcaacggacagcagagacccaccaagcaaaaatcagaagaacagctgcaggcttactataaaaagacactagaggaacgactttcagctggggcacttaacaccttcccccgagcattcaagcaggtaatggaaggccgggatataaagctagtaatcaatcagacagcgcaggactgcttcggatgcctggaatccataagccaaataagaacggcaacccgagataaaaaggacacggtgacccgggagaaacacccaaagaaaccttttcagaagtggatgaagaagagagcaatcaaaaaaggtaattatcttcggttccagcgtttattttatcttgatagagggaaactggctaaaatcattttagatgatattgaatgcttgtcttgtgacataccactcagtgaaatttattcggtttttaaaacaagatgggaaacaactggtagctttaaaagccttggggactttaaaacttacgggaaggctgacaacactgccttcagagaattaattacggctaaagaaattgagaaaaatgtgcaggaaatgagcaaaggctcggctcccggtccagacgggattactcttggggacgtcgtaaagatggatcccgagttttcccggaccatggagattttcaatttatggttaacaactggtaaaatcccggacatggtgagggggtgcagaaccgttttgattccaaaatcatcaaagccggatcgtttgaaagacattaataactggagacctatcacgatcggttccatcttgctgagactgttctccaggattgtaacagctaggctgagcaaagcgtgccccctgaacccaaggcaaagaggctttatcagagcggcgggatgctctgaaaacttaaaactcctgcaaactataatttggtcggccaaaagagaacacagaccactgggtgttgtattcgtggacatcgccaaggcttttgacaccgtaagccaccagcacatcattcatgctttgcagcaaagagaggtggatccccacatcgtcggtctggtgagcaatatgtacgagaacatcagtacgtatatcaccacaaagaggaacacacacacagacaaaatccagatccgggttggagtaaagcagggtgacccgatgtcgccccttttatttaacctggcaatggaccctctattatgcaagctggaagagagtggcaaaggataccaccgaggacagagcagcatcacagcgatggcatttgcagacgatctggttttgctgagcgactcctgggaaaatatgaatacaaatattagcatactggagaccttctgcaatctgaccggactcaaaacacaggggcaaaagtgccacggcttttacatcaagccgacaaagaagtcttacaccatcaatgactgcgctgcctggactatcaacggcacacccctgaacatgatcgaccccggcgaatctgagaaatacctcggcctgcagtttgacccgtggattggaatagcaaggtccggtctctccacaaaactagatttttggcttcagcggatcgatcaagcaccacttaaacctctgcagaaaactgatattctcaaaacatacaccatccctcggctgatctacatagctgaccactcagaagtgaaaagcgcactactcgaaacccttgaccagaagatccggacagcggtcaaggaatggcttcacctacctccgtgcacctgcgatgccatcctgtactcgagcacgagagacggcggtttgggcatcaccaaattggcaggactgatccccagcgtgcaggcccgtagactgcatcggatcgcacagtcatctgacgatacgatgaaatgcttcatggaaaaagagaaaatggaacagctgcataagaaattgtggattcaagctggaggggacagagagaacataccctcgatttgggaagcaccaccgtcgagtgaaccaccaaacaacgtgagcacaaattcggaatgggaagcaccgacccagaaagataaatttccaaagccttgcaattggaggaaaaacgaattcaaaaaatggaccaaattggcatcccaaggccgcggaattgtaaattttgaaagagacaaaattagtaaccattggatccaatactacagacgcatacctcacaggaaactcctcactgcactacaactcagggccaacgtttaccccacgagagaatttctagccaggggtagacaagaccaatacatcaaggcgtgtaggcactgcgatgcggacaacgaatcctgcgcccacatcatcggcaactgcccagtgacacaggacgcccgaatcaagaggcacaattacatctgcgaactgcttctcgaggaggcgaagaagaaggactgggtagtgttcaaggaaccgcacataagggattccaacaaggaactgtacaaacctgacctgatatttgtgaaggatgggcgtgcacttgtcgtggatgtgacagtacggtatgaagcagccaaatcatcgctggaggaagccgctgcagagaaagtgagaaagtacaaacacctggaaacggaagtaagacatctcacgaatgcaaaggacgttacttttgtgggctttcccctaggagcgcgggggaaatggcaccaagataactttaaacttttgactgagcttggcctctccaaatcgaggcaagtgaaaatggcagagactttttccacagtagcgctcttttcatctgtggacattgtacatatgtttgccagtagggccagaaaatctatggttatgtgataataggctgccttctgcggggcttgccttctggccatgcccttcttctctcccttgcacctgtacctcttggtctttgaataaagcctgagtaggaaggaccggtaaaaaaaaaaaaaaaaaaaaaaaaaaaaaaacgttgactaaaaaaaaaaaaaaaaaaaaaaaaaaaaaaaaaaaaaaaaaaaaaaaaaaaaaaaaaaaaaaaaaaaaaa

SEQ ID NO: 11698 - DNA, 5308 bp, synthetic construct
  source 1..5308: mol_type = other DNA
ggtctagttacaactgggcatcgctgcagagatcgcacctcctcgtggtcccgctggtagcccttcgaagggtgactaagtcgatctctgccccaggtacggagccgttgggactcaccagtccaacgtaactcctgcctaaattcggtgaaacaaattcctcggtaaaaagccccatggcccctaagaaaaagcggaaggtgaatatcagcggctctagctgcggcagccccaacagcgccgacaccagcagcgacttcaaggacctgtggaccaagctgaaggaatgccacgaccgggaagtgcagggactccaggtgaaggtcaccaaactcaagcaagaaagaatcctggacgcccagagactggaagaattcttcaccaagaaccagcagctgagagagcagcagaaagtgctgcacgagacaatcaaggttctggaagatagactgcgggccggcctgtgcgacagatgcgccgtgaccgaggaacacatgcgcaaaaagcagcaggagttcgagaacattagacagcaaaatctgaaattgatcacagagctgatgaacgagagaaacacactgcaggaggagaacaagaagctgagcgagcagctgcaacagaagatcgagaatgatcagcaacaccaggccgctgagctggaatgtgaagaggacgtgatccccgacagcccaatcacagctttcagcttttctggcgtgaacagactgaggcggaaggaaaacccccacgtgcggtacatcgagcagacccataccaagctggaacacagcgtgtgtgccaacgagatgagaaaggtgtccaagtcctccacccatccccagcacaaccctaacgaaaatgagatcctggtggctgatacctacgaccagtctcagagccctatggccaaggcccacggcaccagctcttatacccctgataagagctccttcaacctggccaccgtggtggccgagacactgggcctgggcgtgcaggaggaaagcgagacacagggcccaatgagccctctgggagatgagctgtaccactgcctggaaggcaaccacaagaaacagccttttgagtccggctccgagactcctggaacaagcgagagcgctacacctgagggcagcgtgaccgtgaagttcaagtacaagggcgaggaaaaggaagtggacatcagcaagatcaagaaggtctggcgggtgggcaagatgatcagctttacctacgacgataacggcaagacaggcagaggcgccgtgtccgagaaggacgcccctaaagagctgctgcagatgctggaaaaaagcggctctgagacacctggaacaagcgagagcgccaccccggaatcctatgaacaacttgcaccacaaccgtgtgtgggagaaactttacattctagcctcccacgagacagtgaactgtttgtgcctgaagaggggagcagcgagaaggagagcgaggacgcgccaaaaacatctcctccgacgcctgggaaacatggtttggaacagactggggaggaaaaagtgatggtgactgttcctgacaaaaatccaccttgtccttgctgtggtacccgggtaaactctgtgttgaatctgattgaacatctgaaagtgtcacacgggaaaaggggggtttgttttcggtgtgcaaaatgtggaaaggaaaatagtaactatcacagtgttgtttgtcattttccaaaatgcaggggtccagagacggagaaagccccagctggggagtggatttgtgaggtatgcaacagagattttacaaccaaaattggcctgggacaacacaagagattggcacacccagcagtgagaaatcaggaaaggatcgttgcttcccaaccgaaagaaacatcaaatagaggtgctcacaaaaggtgctggacaaaggaggaggaagaattactaataagactggaggctcagttcgagggaaacaaaaatattaataagcttattgcagaacacataaccaccaaaacagctaagcagatcagtgacaaaaggcgattgctgtccagaaagccagcagaggagccacgtgaggagcctggaacgtgtcatcacaccaggagagcagctgcgagcctgagaacggagcctgagatgagtcatcacgcccaggcagaggacagagataatggacctgggagacgccctctgccaggcagggcagctgccggagggagaacaatggacgagataagacgccaccctgataagggcaacggacagcagagacccaccaagcaaaaatcagaagaacagctgcaggcttactataaaaagacactagaggaacgactttcagctggggcacttaacaccttcccccgagcattcaagcaggtaatggaaggccgggatataaagctagtaatcaatcagacagcgcaggactgcttcggatgcctggaatccataagccaaataagaacggcaacccgagataaaaaggacacggtgacccgggagaaacacccaaagaaaccttttcagaagtggatgaaggacagagcaatcaaaaaaggtaattatcttcggttccagcgtttattttatcttgatagagggaaactggctaaaatcattttagatgatattgaatgcttgtcttgtgacataccactcagtgaaatttattcggtttttaaaacaagatgggaaacaactggtagctttaaaagccttggggactttaaaacttacgggaaggctgacaacactgccttcagagaattaattacggctaaagaaattgagaaaaatgtgcaggaaatgagcaaaggctcggctcccggtccagacgggattactcttggggacgtcgtaaagatggatcccgagttttcccggaccatggagattttcaatttatggttaacaactggtaaaatcccggacatggtgagggggtgcagaaccgttttgattccaaaatcatcaaagccggatcgtttgaaagacattaataactggagacctatcacgatcggttccatcttgctgagactgttctccaggattgtaacagctaggctgagcaaagcgtgccccctgaacccaaggcaaagaggctttatcagagcggcgggatgctctgaaaacttaaaactcctgcaaactataatttggtcggccaaaagagaacacagaccactgggtgttgtattcgtggacatcgccaaggcttttgacaccgtaagccaccagcacatcattcatgctttgcagcaaagagaggtggatccccacatcgtcggtctggtgagcaatatgtacgagaacatcagtacgtatatcaccacaaagaggaacacacacacagacaaaatccagatccgggttggagtaaagcagggtgacccgatgtcgccccttttatttaacctggcaatggaccctctattatgcaagctggaagagagtggcaaaggataccaccgaggacagagcagcatcacagcgatggcatttgcagacgatctggttttgctgagcgactcctgggaaaatatgaatacaaatattagcatactggagaccttctgcaatctgaccggactcaaaacacaggggcaaaagtgccacggcttttacatcaagccgacaaaggactcttacaccatcaatgactgcgctgcctggactatcaacggcacacccctgaacatgatcgaccccggcgaatctgagaaatacctcggcctgcagtttgacccgtggattggaatagcaaggtccggtctctccacaaaactagatttttggcttcagcggatcgatcaagcaccacttaaacctctgcagaaaactgatattctcaaaacatacaccatccctcggctgatctacatagctgaccactcagaagtgaaaactgcactactcgaaacccttgaccagaagatccggacagcggtcaaggaatggcttcacctacctccgtgcacctgcgatgccatcctgtactcgagcacgagagacggcggtttgggcatcaccaaattggcaggactgatccccagcgtgcaggcccgtagactgcatcggatcgcacagtcatctgacgatacgatgaaatgcttcatggaaaaagagaaaatggaacagctgcataagaaattgtggattcaagctggaggggacagagagaacataccctcgatttgggaagcaccaccgtcgagtgaaccaccaaacaacgtgagcacaaattcggaatgggaagcaccgacccagaaagataaatttccaaagccttgcaattggaggaaaaacgaattcaaaaaatggaccaaattggcatcccaaggccgcggaattgtaaattttgaaagagacaaaattagtaaccattggatccaatactacagacgcatacctcacaggaaactcctcactgcactacaactcagggccaacgtttaccccacgagagaatttctagccaggggtagacaagaccaatacatcaaggcgtgtaggcactgcgatgcggacattgaatcctgcgcccacatcatcggcaactgcccagtgacacaggacgcccgaatcaagaggcacaattacatctgcgaactgcttctcgaggaggcgaagaagaaggactgggtagtgttcaaggaaccgcacataagggattccaacaaggaactgtacaaacctgacctgatatttgtgaaggatgcccgtgcacttgtcgtggatgtgacagtacggtatgaagcagccaaatcatcgctggaggaagccgctgcagagaaagtgagaaagtacaaacacctggaaacggaagtaagacatctcacgaatgcaaaggacgttacttttgtgggctttcccctaggagcgcgggggaaatggcaccaagataactttaaacttttgactgagcttggcctctccaaatcgaggcaagtgaaaatggcagagactttttccacagtagcgctcttttcatctgtggacattgtacatatgtttgccagtagggccagaaaatctatggttatgtaaaccggtagacatgataagatacattgatgagtttggacaaaccacaactagaatgcagtgaaaaaaatgctttatttgtgaaatttgtgatgctattgctttatttgtaaccattataagctgcaataaacaagttaacaacaacaaaaaaaaaaaaaaaaaaaaaaaaaaaaaaacgttgactaaaaaaaaaaaaaaaaaaaaaaaaaaaaaaaaaaaaaaaaaaaaaaaaaaaaaaaaaaaaaaaaaaaaaa

SEQ ID NO: 11699 - DNA, 4624 bp, synthetic construct
  source 1..4624: mol_type = other DNA
ggtctagttacaactgggcatcgctgcagagatcgcacctcctcgtggtcccgctggtagcccttcgaagggtgactaagtcgatctctgccccaggtacggagccgttgggactcaccagtccaacgtaactcctgcctaaattcggtgaaacaaattcctcggtaaaaagccccatgcctaagagaaaggtgtccagcgccgagggcgctgccaaggaagagcctaaacggagaagcgccagactgagcgccaagccccccgccaaggtggaagccaagcctaagaaggccgccgctaaggacaagagcagcgataagaaagtccagaccaagggcaagcggggcgccaaaggcaaacaggccgaggtggccaaccaggagacaaaggaagatctgcctgctgagaacggcgaaaccaagaccgaggaatctccagcttctgacgaggccggagagaaggaggccaaaagcgacagcggctctgagacacctggaacaagcgagagcgccaccccggaatccgtgaccgtgaagttcaagtacaagggcgaggaaaaggaagtggacatcagcaagatcaagaaggtctggcgggtgggcaagatgatcagctttacctacgacgataacggcaagacaggcagaggcgccgtgtccgagaaggacgcccctaaagagctgctgcagatgctggaaaaaagcggctctgagacacctggaacaagcgagagcgccaccccggaatccctgtttgtgcctgaagaggggagcagcgagaaggagagcgaggacgcgccaaaaacatctcctccgacgcctgggaaacatggtttggaacagactggggaggaaaaagtgatggtgactgttcctgacaaaaatccaccttgtccttgctgtggtacccgggtaaactctgtgttgaatctgattgaacatctgaaagtgtcacacgggaaaaggggggtttgttttcggtgtgcaaaatgtggaaaggaaaatagtaactatcacagtgttgtttgtcattttccaaaatgcaggggtccagagacggagaaagccccagctggggagtggatttgtgaggtatgcaacagagattttacaaccaaaattggcctgggacaacacaagagattggcacacccagcagtgagaaatcaggaaaggatcgttgcttcccaaccgaaagaaacatcaaatagaggtgctcacaaaaggtgctggacaaaggaggaggaagaattactaataagactggaggctcagttcgagggaaacaaaaatattaataagcttattgcagaacacataaccaccaaaacagctaagcagatcagtgacaaaaggcgattgctgtccagaaagccagcagaggagccacgtgaggagcctggaacgtgtcatcacaccaggagagcagctgcgagcctgagaacggagcctgagatgagtcatcacgcccaggcagaggacagagataatggacctgggagacgccctctgccaggcagggcagctgccggagggagaacaatggacgagataagacgccaccctgataagggcaacggacagcagagacccaccaagcaaaaatcagaagaacagctgcaggcttactataaaaagacactagaggaacgactttcagctggggcacttaacaccttcccccgagcattcaagcaggtaatggaaggccgggatataaagctagtaatcaatcagacagcgcaggactgcttcggatgcctggaatccataagccaaataagaacggcaacccgagataaaaaggacacggtgacccgggagaaacacccaaagaaaccttttcagaagtggatgaaggacagagcaatcaaaaaaggtaattatcttcggttccagcgtttattttatcttgatagagggaaactggctaaaatcattttagatgatattgaatgcttgtcttgtgacataccactcagtgaaatttattcggtttttaaaacaagatgggaaacaactggtagctttaaaagccttggggactttaaaacttacgggaaggctgacaacactgccttcagagaattaattacggctaaagaaattgagaaaaatgtgcaggaaatgagcaaaggctcggctcccggtccagacgggattactcttggggacgtcgtaaagatggatcccgagttttcccggaccatggagattttcaatttatggttaacaactggtaaaatcccggacatggtgagggggtgcagaaccgttttgattccaaaatcatcaaagccggatcgtttgaaagacattaataactggagacctatcacgatcggttccatcttgctgagactgttctccaggattgtaacagctaggctgagcaaagcgtgccccctgaacccaaggcaaagaggctttatcagagcggcgggatgctctgaaaacttaaaactcctgcaaactataatttggtcggccaaaagagaacacagaccactgggtgttgtattcgtggacatcgccaaggcttttgacaccgtaagccaccagcacatcattcatgctttgcagcaaagagaggtggatccccacatcgtcggtctggtgagcaatatgtacgagaacatcagtacgtatatcaccacaaagaggaacacacacacagacaaaatccagatccgggttggagtaaagcagggtgacccgatgtcgccccttttatttaacctggcaatggaccctctattatgcaagctggaagagagtggcaaaggataccaccgaggacagagcagcatcacagcgatggcatttgcagacgatctggttttgctgagcgactcctgggaaaatatgaatacaaatattagcatactggagaccttctgcaatctgaccggactcaaaacacaggggcaaaagtgccacggcttttacatcaagccgacaaaggactcttacaccatcaatgactgcgctgcctggactatcaacggcacacccctgaacatgatcgaccccggcgaatctgagaaatacctcggcctgcagtttgacccgtggattggaatagcaaggtccggtctctccacaaaactagatttttggcttcagcggatcgatcaagcaccacttaaacctctgcagaaaactgatattctcaaaacatacaccatccctcggctgatctacatagctgaccactcagaagtgaaaactgcactactcgaaacccttgaccagaagatccggacagcggtcaaggaatggcttcacctacctccgtgcacctgcgatgccatcctgtactcgagcacgagagacggcggtttgggcatcaccaaattggcaggactgatccccagcgtgcaggcccgtagactgcatcggatcgcacagtcatctgacgatacgatgaaatgcttcatggaaaaagagaaaatggaacagctgcataagaaattgtggattcaagctggaggggacagagagaacataccctcgatttgggaagcaccaccgtcgagtgaaccaccaaacaacgtgagcacaaattcggaatgggaagcaccgacccagaaagataaatttccaaagccttgcaattggaggaaaaacgaattcaaaaaatggaccaaattggcatcccaaggccgcggaattgtaaattttgaaagagacaaaattagtaaccattggatccaatactacagacgcatacctcacaggaaactcctcactgcactacaactcagggccaacgtttaccccacgagagaatttctagccaggggtagacaagaccaatacatcaaggcgtgtaggcactgcgatgcggacattgaatcctgcgcccacatcatcggcaactgcccagtgacacaggacgcccgaatcaagaggcacaattacatctgcgaactgcttctcgaggaggcgaagaagaaggactgggtagtgttcaaggaaccgcacataagggattccaacaaggaactgtacaaacctgacctgatatttgtgaaggatgcccgtgcacttgtcgtggatgtgacagtacggtatgaagcagccaaatcatcgctggaggaagccgctgcagagaaagtgagaaagtacaaacacctggaaacggaagtaagacatctcacgaatgcaaaggacgttacttttgtgggctttcccctaggagcgcgggggaaatggcaccaagataactttaaacttttgactgagcttggcctctccaaatcgaggcaagtgaaaatggcagagactttttccacagtagcgctcttttcatctgtggacattgtacatatgtttgccagtagggccagaaaatctatggttatgtaaaccggtagacatgataagatacattgatgagtttggacaaaccacaactagaatgcagtgaaaaaaatgctttatttgtgaaatttgtgatgctattgctttatttgtaaccattataagctgcaataaacaagttaacaacaacaaaaaaaaaaaaaaaaaaaaaaaaaaaaaaacgttgactaaaaaaaaaaaaaaaaaaaaaaaaaaaaaaaaaaaaaaaaaaaaaaaaaaaaaaaaaaaaaaaaaaaaaa

SEQ ID NO: 11700 - DNA, 4100 bp, synthetic construct
  source 1..4100: mol_type = other DNA
gaaataagagagaaaagaagagtaagaagaaatataagagaattcgccaccatggcccctaagaagaaaagaaaggtgcccacactgctgggcttccacaccgccagcggcaagaaggtgaagatcgccaaggaatccctggataaggtgaaaaacctgttcgacgagaaggagcagggcggaagcggaggcggctatgaacaacttgcaccacaaccgtgtgtgggagaaactttacattctagcctcccacgagacagtgaactgtttgtgcctgaagaggggagcagcgagaaggagagcgaggacgcgccaaaaacatctcctccgacgcctgggaaacatggtttggaacagactggggaggaaaaagtgatggtgactgttcctgacaaaaatccaccttgtccttgctgtggtacccgggtaaactctgtgttgaatctgattgaacatctgaaagtgtcacacgggaaaaggggggtttgttttcggtgtgcaaaatgtggaaaggaaaatagtaactatcacagtgttgtttgtcattttaagaaatgcaggggtccagagacggagaaagccccagctggggagtggatttgtgaggtatgcaacagagattttacaaccaaaattggcctgggacaacacaagagattggcacacccagcagtgagaaatcaggaaaggatcgttgcttcccaaccgaaagaaacatcaaatagaggtgctcacaaaaggtgctggacaaaggaggaggaagaattactaataagactggaggctcagttcgagggaaacaaaaatattaataagcttattgcagaacacataaccaccaaaacagctaagcagatcagtgacaaaaggcgattgctgtccagaaagccagcagaggagccacgtatggagcctggaacgtgtcatcacaccaggagagcagctgcgagcctgagaacggagcctgagatgagtcatcacgcccaggcagaggacagagataatggacctgggagacgccctctgccaggcagggcagctgccggagggagaacaatggacgagataagacgccaccctgataagggcaacggacagcagagacccaccaagcaaaaatcagaagaacagctgcaggcttactataaaaagacactagaggaacgactttcagctggggcacttaacaccttcccccgagcattcaagcaggtaatggaaggccgggatataaagctagtaatcaatcagacagcgcaggactgcttcggatgcctggaatccataagccaaataagaacggcaacccgagataaaaaggacacggtgacccgggagaaacacccaaagaaaccttttcagaagtggatgaagaagagagcaatcaaaaaaggtaattatcttcggttccagcgtttattttatcttgatagagggaaactggctaaaatcattttagatgatattgaatgcttgtcttgtgacataccactcagtgaaatttattcggtttttaaaacaagatgggaaacaactggtagctttaaaagccttggggactttaaaacttacgggaaggctgacaacactgccttcagagaattaattacggctaaagaaattgagaaaaatgtgcaggaaatgagcaaaggctcggctcccggtccagacgggattactcttggggacgtcgtaaagatggatcccgagttttcccggaccatggagattttcaatttatggttaacaactggtaaaatcccggacatggtgagggggtgcagaaccgttttgattccaaaatcatcaaagccggatcgtttgaaagacattaataactggagacctatcacgatcggttccatcttgctgagactgttctccaggattgtaacagctaggctgagcaaagcgtgccccctgaacccaaggcaaagaggctttatcagagcggcgggatgctctgaaaacttaaaactcctgcaaactataatttggtcggccaaaagagaacacagaccactgggtgttgtattcgtggacatcgccaaggcttttgacaccgtaagccaccagcacatcattcatgctttgcagcaaagagaggtggatccccacatcgtcggtctggtgagcaatatgtacgagaacatcagtacgtatatcaccacaaagaggaacacacacacagacaaaatccagatccgggttggagtaaagcagggtgacccgatgtcgccccttttatttaacctggcaatggaccctctattatgcaagctggaagagagtggcaaaggataccaccgaggacagagcagcatcacagcgatggcatttgcagacgatctggttttgctgagcgactcctgggaaaatatgaatacaaatattagcatactggagaccttctgcaatctgaccggactcaaaacacaggggcaaaagtgccacggcttttacatcaagccgacaaagaagtcttacaccatcaatgactgcgctgcctggactatcaacggcacacccctgaacatgatcgaccccggcgaatctgagaaatacctcggcctgcagtttgacccgtggattggaatagcaaggtccggtctctccacaaaactagatttttggcttcagcggatcgatcaagcaccacttaaacctctgcagaaaactgatattctcaaaacatacaccatccctcggctgatctacatagctgaccactcagaagtgaaaagcgcactactcgaaacccttgaccagaagatccggacagcggtcaaggaatggcttcacctacctccgtgcacctgcgatgccatcctgtactcgagcacgagagacggcggtttgggcatcaccaaattggcaggactgatccccagcgtgcaggcccgtagactgcatcggatcgcacagtcatctgacgatacgatgaaatgcttcatggaaaaagagaaaatggaacagctgcataagaaattgtggattcaagctggaggggacagagagaacataccctcgatttgggaagcaccaccgtcgagtgaaccaccaaacaacgtgagcacaaattcggaatgggaagcaccgacccagaaagataaatttccaaagccttgcaattggaggaaaaacgaattcaaaaaatggaccaaattggcatcccaaggccgcggaattgtaaattttgaaagagacaaaattagtaaccattggatccaatactacagacgcatacctcacaggaaactcctcactgcactacaactcagggccaacgtttaccccacgagagaatttctagccaggggtagacaagaccaatacatcaaggcgtgtaggcactgcgatgcggacaacgaatcctgcgcccacatcatcggcaactgcccagtgacacaggacgcccgaatcaagaggcacaattacatctgcgaactgcttctcgaggaggcgaagaagaaggactgggtagtgttcaaggaaccgcacataagggattccaacaaggaactgtacaaacctgacctgatatttgtgaaggatgggcgtgcacttgtcgtggatgtgacagtacggtatgaagcagccaaatcatcgctggaggaagccgctgcagagaaagtgagaaagtacaaacacctggaaacggaagtaagacatctcacgaatgcaaaggacgttacttttgtgggctttcccctaggagcgcgggggaaatggcaccaagataactttaaacttttgactgagcttggcctctccaaatcgaggcaagtgaaaatggcagagactttttccacagtagcgctcttttcatctgtggacattgtacatatgtttgccagtagggccagaaaatctatggttatgtgataataggctgccttctgcggggcttgccttctggccatgcccttcttctctcccttgcacctgtacctcttggtctttgaataaagcctgagtaggaaggaccggtaaaaaaaaaaaaaaaaaaaaaaaaaaaaaaacgttgactaaaaaaaaaaaaaaaaaaaaaaaaaaaaaaaaaaaaaaaaaaaaaaaaaaaaaaaaaaaaaaaaaaaaaa

SEQ ID NO: 11701 - DNA, 5555 bp, synthetic construct
  source 1..5555: mol_type = other DNA
ggtctagttacaactgggcatcgctgcagagatcgcacctcctcgtggtcccgctggtagcccttcgaagggtgactaagtcgatctctgccccaggtacggagccgttgggactcaccagtccaacgtaactcctgcctaaattcggtgaaacaaattcctcggtaaaaagccccatggcccctaagaaaaagcggaaggtgcctaagagaaaggtgtccagcgccgagggcgctgccaaggaagagcctaaacggagaagcgccagactgagcgccaagccccccgccaaggtggaagccaagcctaagaaggccgccgctaaggacaagagcagcgataagaaagtccagaccaagggcaagcggggcgccaaaggcaaacaggccgaggtggccaaccaggagacaaaggaagatctgcctgctgagaacggcgaaaccaagaccgaggaatctccagcttctgacgaggccggagagaaggaggccaaaagcgacagcggctctgagacacctggaacaagcgagagcgccaccccggaatccaatatcagcggctctagctgcggcagccccaacagcgccgacaccagcagcgacttcaaggacctgtggaccaagctgaaggaatgccacgaccgggaagtgcagggactccaggtgaaggtcaccaaactcaagcaagaaagaatcctggacgcccagagactggaagaattcttcaccaagaaccagcagctgagagagcagcagaaagtgctgcacgagacaatcaaggttctggaagatagactgcgggccggcctgtgcgacagatgcgccgtgaccgaggaacacatgcgcaaaaagcagcaggagttcgagaacattagacagcaaaatctgaaattgatcacagagctgatgaacgagagaaacacactgcaggaggagaacaagaagctgagcgagcagctgcaacagaagatcgagaatgatcagcaacaccaggccgctgagctggaatgtgaagaggacgtgatccccgacagcccaatcacagctttcagcttttctggcgtgaacagactgaggcggaaggaaaacccccacgtgcggtacatcgagcagacccataccaagctggaacacagcgtgtgtgccaacgagatgagaaaggtgtccaagtcctccacccatccccagcacaaccctaacgaaaatgagatcctggtggctgatacctacgaccagtctcagagccctatggccaaggcccacggcaccagctcttatacccctgataagagctccttcaacctggccaccgtggtggccgagacactgggcctgggcgtgcaggaggaaagcgagacacagggcccaatgagccctctgggagatgagctgtaccactgcctggaaggcaaccacaagaaacagccttttgagtccggctccgagactcctggaacaagcgagagcgctacacctgagggcagctatgaacaacttgcaccacaaccgtgtgtgggagaaactttacattctagcctcccacgagacagtgaactgtttgtgcctgaagaggggagcagcgagaaggagagcgaggacgcgccaaaaacatctcctccgacgcctgggaaacatggtttggaacagactggggaggaaaaagtgatggtgactgttcctgacaaaaatccaccttgtccttgctgtggtacccgggtaaactctgtgttgaatctgattgaacatctgaaagtgtcacacgggaaaaggggggtttgttttcggtgtgcaaaatgtggaaaggaaaatagtaactatcacagtgttgtttgtcattttaagaaatgcaggggtccagagacggagaaagccccagctggggagtggatttgtgaggtatgcaacagagattttacaaccaaaattggcctgggacaacacaagagattggcacacccagcagtgagaaatcaggaaaggatcgttgcttcccaaccgaaagaaacatcaaatagaggtgctcacaaaaggtgctggacaaaggaggaggaagaattactaataagactggaggctcagttcgagggaaacaaaaatattaataagcttattgcagaacacataaccaccaaaacagctaagcagatcagtgacaaaaggcgattgctgtccagaaagccagcagaggagccacgtgaggagcctggaacgtgtcatcacaccaggagagcagctgcgagcctgagaacggagcctgagatgagtcatcacgcccaggcagaggacagagataatggacctgggagacgccctctgccaggcagggcagctgccggagggagaacaatggacgagataagacgccaccctgataagggcaacggacagcagagacccaccaagcaaaaatcagaagaacagctgcaggcttactataaaaagacactagaggaacgactttcagctggggcacttaacaccttcccccgagcattcaagcaggtaatggaaggccgggatataaagctagtaatcaatcagacagcgcaggactgcttcggatgcctggaatccataagccaaataagaacggcaacccgagataaaaaggacacggtgacccgggagaaacacccaaagaaaccttttcagaagtggatgaagaagagagcaatcaaaaaaggtaattatcttcggttccagcgtttattttatcttgatagagggaaactggctaaaatcattttagatgatattgaatgcttgtcttgtgacataccactcagtgaaatttattcggtttttaaaacaagatgggaaacaactggtagctttaaaagccttggggactttaaaacttacgggaaggctgacaacactgccttcagagaattaattacggctaaagaaattgagaaaaatgtgcaggaaatgagcaaaggctcggctcccggtccagacgggattactcttggggacgtcgtaaagatggatcccgagttttcccggaccatggagattttcaatttatggttaacaactggtaaaatcccggacatggtgagggggtgcagaaccgttttgattccaaaatcatcaaagccggatcgtttgaaagacattaataactggagacctatcacgatcggttccatcttgctgagactgttctccaggattgtaacagctaggctgagcaaagcgtgccccctgaacccaaggcaaagaggctttatcagagcggcgggatgctctgaaaacttaaaactcctgcaaactataatttggtcggccaaaagagaacacagaccactgggtgttgtattcgtggacatcgccaaggcttttgacaccgtaagccaccagcacatcattcatgctttgcagcaaagagaggtggatccccacatcgtcggtctggtgagcaatatgtacgagaacatcagtacgtatatcaccacaaagaggaacacacacacagacaaaatccagatccgggttggagtaaagcagggtgacccgatgtcgccccttttatttaacctggcaatggaccctctattatgcaagctggaagagagtggcaaaggataccaccgaggacagagcagcatcacagcgatggcatttgcagacgatctggttttgctgagcgactcctgggaaaatatgaatacaaatattagcatactggagaccttctgcaatctgaccggactcaaaacacaggggcaaaagtgccacggcttttacatcaagccgacaaaggactcttacaccatcaatgactgcgctgcctggactatcaacggcacacccctgaacatgatcgaccccggcgaatctgagaaatacctcggcctgcagtttgacccgtggattggaatagcaaggtccggtctctccacaaaactagatttttggcttcagcggatcgatcaagcaccacttaaacctctgcagaaaactgatattctcaaaacatacaccatccctcggctgatctacatagctgaccactcagaagtgaaaagcgcactactcgaaacccttgaccagaagatccggacagcggtcaaggaatggcttcacctacctccgtgcacctgcgatgccatcctgtactcgagcacgagagacggcggtttgggcatcaccaaattggcaggactgatccccagcgtgcaggcccgtagactgcatcggatcgcacagtcatctgacgatacgatgaaatgcttcatggaaaaagagaaaatggaacagctgcataagaaattgtggattcaagctggaggggacagagagaacataccctcgatttgggaagcaccaccgtcgagtgaaccaccaaacaacgtgagcacaaattcggaatgggaagcaccgacccagaaagataaatttccaaagccttgcaattggaggaaaaacgaattcaaaaaatggaccaaattggcatcccaaggccgcggaattgtaaattttgaaagagacaaaattagtaaccattggatccaatactacagacgcatacctcacaggaaactcctcactgcactacaactcagggccaacgtttaccccacgagagaatttctagccaggggtagacaagaccaatacatcaaggcgtgtaggcactgcgatgcggacattgaatcctgcgcccacatcatcggcaactgcccagtgacacaggacgcccgaatcaagaggcacaattacatctgcgaactgcttctcgaggaggcgaagaagaaggactgggtagtgttcaaggaaccgcacataagggattccaacaaggaactgtacaaacctgacctgatatttgtgaaggatgcccgtgcacttgtcgtggatgtgacagtacggtatgaagcagccaaatcatcgctggaggaagccgctgcagagaaagtgagaaagtacaaacacctggaaacggaagtaagacatctcacgaatgcaaaggacgttacttttgtgggctttcccctaggagcgcgggggaaatggcaccaagataactttaaacttttgactgagcttggcctctccaaatcgaggcaagtgaaaatggcagagactttttccacagtagcgctcttttcatctgtggacattgtacatatgtttgccagtagggccagaaaatctatggttatgaggaagaagaggaggcagaggaggaggtgataataggctgccttctgcggggcttgccttctggccatgcccttcttctctcccttgcacctgtacctcttggtctttgaataaagcctgagtaggaaggaccggtagacatgataagatacattgatgagtttggacaaaccacaactagaatgcagtgaaaaaaatgctttatttgtgaaatttgtgatgctattgctttatttgtaaccattataagctgcaataaacaagttaacaacaacaaaaaaaaaaaaaaaaaaaaaaaaaaaaaaacgttgactaaaaaaaaaaaaaaaaaaaaaaaaaaaaaaaaaaaaaaaaaaaaaaaaaaaaaaaaaaaaaaaaaaaaaa

SEQ ID NO: 11702 - DNA, 4564 bp, synthetic construct
  source 1..4564: mol_type = other DNA
ggtctagttacaactgggcatcgctgcagagatcgcacctcctcgtggtcccgctggtagcccttcgaagggtgactaagtcgatctctgccccaggtacggagccgttgggactcaccagtccaacgtaactcctgcctaaattcggtgaaacaaattcctcggtaaaaagccccatggcttcttgcccgaaacctggccccccggtttcagcaggggcaatgagtttggaaagtggactgaccacccactccgttctcgccatcgaacgtggtcccaattcgttggcaaattccggatcagactttgggggggggggtctggggctaccgttacgcctattgagggtatcggtcggcactcagacctcccgctccgactgggtagacctggtgtcctggagccacccaggacccacgtctaagtcccagcaggttgacctggtgtctttatttcctaaacaccgggttgacctgttatccaaaaacgaccaggtagacctggtggctcaatttttaccatctaaatttccccccaatttggcagaaaatgatttggctttgctggtgaacttagagttctacagatcggatttgcatgtgtatgagggcgttcataaggctgcacattgggagggattaagtggtttgcctgaggtgtatgaacaacttgcaccacaaccgtgtgtgggagaaactttacattctagcctcccacgagacagtgaactgtttgtgcctgaagaggggagcagcgagaaggagagcgaggacgcgccaaaaacatctcctccgacgcctgggaaacatggtttggaacagactggggaggaaaaagtgatggtgactgttcctgacaaaaatccaccttgtccttgctgtggtacccgggtaaactctgtgttgaatctgattgaacatctgaaagtgtcacacgggaaaaggggggtttgttttcggtgtgcaaaatgtggaaaggaaaatagtaactatcacagtgttgtttgtcattttaagaaatgcaggggtccagagacggagaaagccccagctggggagtggatttgtgaggtatgcaacagagattttacaaccaaaattggcctgggacaacacaagagaagggcacacccagcagtgagaaatcaggaaaggatcgttgcttcccaaccgaaagaaacatcaaatagaggtgctcacaaaaggtgctggacaaaggaggaggaagaattactaataagactggaggctcagttcgagggaaacaaaaatattaataagcttattgcagaacacataaccaccaaaacagctaagcagatcagtgacaaaaggcgattgctgtccagaaagccagcagaggagccacgtgagatgcctggaacgtgtcatcacaccaggagagcagctgcgagcctgagaacggagcctgagatgagtcatcacgcccaggcagaggacagagataatggacctgggagacgccctctgccaggcagggcagctgccggagggagaacaatggacgagataagacgccaccctgataagggcaacggacagcagagacccaccaagcaaaaatcagaagaacagctgcaggcttactataaaaagacactagaggaacgactttcagctggggcacttaacaccttcccccgagcattcaagcaggtaatggaaggccgggatataaagctagtaatcaatcagacagcgcaggactacttcggatgcctggaatccataagccaaataagaacggcaacccgagataaaaaggacacggtgacccggaagaaacacccaaagaaaccttttcagaagtggatgaagaagagagcaatcaaaaaaggtaattatcttcggttccagcgtttattttatcttgatagagggaaactggctaaaatcattttagatgatattgaatgcttgtcttgtgacataccactcagtgaaatttattcggtttttaaaacaagatgggaaacaactggtagctttaaaagccttggggactttaaaacttacgggaaggctgacaacactgccttcagagacttaattacggctaaagaaattgagaaaaatgtgcaggaaatgagcaaaggctcggctcccggtccagacgggattactcttggggacgtcgtaaagatggatcccgagggctcccggaccatggagattttcaatttatggttaacaactggtaaaatcccggacatggtgagggggtgcagaaccgttttgattccaaaatcatcagacccggatcgtttgaaagacattaataactggagacctatcacgatcggttccatcttgctgagactgttctccaggattgtaacagctaggctgagcaaagcgtgccccctgaacccaaggcaaagaggctttatcagagcggcgggatgctctgaaaacttaaaactcctgcaaactataatttggtcggccaaaagagaacacagaccactgggtgttgtattcgtggacatcgccaaggcttttgacaccgtaagccaccagcacatcattcatgctttgcagcaaagagaggtggatccccacatcgtcggtctggtgagcaatatgtacgagaacatcagtacgtatatcaccacaaagaggaacacacacacagacaaaatccagatccgggttggagtaaagcagggtgacccgatgtcgccccttttatttaacctggcaatggaccctctattatgcaagctggaagagagtggcaaaggataccaccgaggacagagcagcatcacagcgatggcatttgcagacgatctggttttgctgagcgactcctgggaaggcatgaatacaaatattagcatactggagaccttctgcaatctgaccggactcaaaacacaggggcaaaagtgccacggcttttacatcaagccgacaaagaagtcttacaccatcaatgactgcgctgcctggactatcaacggcacacccctgaacatgatcgaccccggcgaatctgagaaatacctcggcctgcagtttgacccgtggattggaatagcaaggtccggtctctccacaaaactagatttttggcttcagcggatcgatcaagcaccacttaaacctctgcagaaactggatattctcaaaacatacaccatccctcggctgatctacatagctgaccactcagaagtgaaaactgcactactcgaaacccttgaccagaagatccggacagcggtcaaggaatggcttcacctacctccgtgcacctgcgatgccatcctgtactcgagcacgagagacggcggtttgggcatcaccaaattggcaggactgatccccagcgtgcaggcccgtagactgcatcggatcgcacagtcatctgacgatacgatgaaatgcttcatggaaaaagagaaaatggaacagctgcataagaaattgtggattcaagctggaggggacagagagaacataccctcgatttgggaagcaccaccgtcgagtgaaccaccaaacaacgtgagcacaaattcggaatgggaagcaccgacccagaaagataaatttccaaagccttgcaattggaggaaaaacgaattcaaaaaatggaccaaattggcatcccaaggccgcggaattgtaaattttgaaagagacaaaattagtaaccattggatccaatactacagacgcatacctcacaggaaactcctcactgcactacaactcagggccaacgtttaccccacgagagaatttctagccaggggtagacaagaccaatacatcaaggcgtgtaggcactgcgatgcggacattgaatcctgcgcccacatcatcggcaactgcccagtgacacaggacgcccgaatcaagaggcacaataagatctgcgaactgcttctcgaggaggcgaagaagaaggactgggtagtgttcaaggaaccgcacataagggattccaacaaggaactgtacaaacctgacctgatatttgtgaaggatgcccgtgcacttgtcgtggatgtgacagtacggtatgaagcagccaaatcatcgctggaggaagccgctgcagagaaagtgagaaagtacaaacacctggaaacggaagtaagacatctcacgaatgcaaaggacgttacttttgtgggctttcccctaggagcgcgggggaaatggcaccaagataactttaaacttttgactgagcttggcctctccaaatcgaggcaagtgaaaatggcagagactttttccacagtagcgctcttttcatctgtggacattgtacatatgtttgccagtagggccagaaaatctatggttatgtgataataggctgccttctgcggggcttgccttctggccatgcccttcttctctcccttgcacctgtacctcttggtctttgaataaagcctgagtaggaaggaccggtaaaaaaaaaaaaaaaaaaaaaaaaaaaaaaacgttgactaaaaaaaaaaaaaaaaaaaaaaaaaaaaaaaaaaaaaaaaaaaaaaaaaaaaaaaaaaaaaaaaaaaaaa

SEQ ID NO: 11703 - DNA, 4564 bp, synthetic construct
  source 1..4564: mol_type = other DNA
ggtctagttacaactgggcatcgctgcagagatcgcacctcctcgtggtcccgctggtagcccttcgaagggtgactaagtcgatctctgccccaggtacggagccgttgggactcaccagtccaacgtaactcctgcctaaattcggtgaaacaaattcctcggtaaaaagccccatggcttcttgcccgaaacctggccccccggtttcagcaggggcaatgagtttggaaagtggactgaccacccactccgttctcgccatcgaacgtggtcccaattcgttggcaaattccggatcagactttgggggggggggtctggggctaccgttacgcctattgagggtatcggtcggcactcagacctcccgctccgactgggtagacctggtgtcctggagccacccaggacccacgtctaagtcccagcaggttgacctggtgtctttatttcctaaacaccgggttgacctgttatccaaaaacgaccaggtagacctggtggctcaatttttaccatctaaatttccccccaatttggcagaaaatgatttggctttgctggtgaacttagagttctacagatcggatttgcatgtgtatgagggcgttcataaggctgcacattgggagggattaagtggtttgcctgaggtgtatgaacaacttgcaccacaaccgtgtgtgggagaaactttacattctagcctcccacgagacagtgaactgtttgtgcctgaagaggggagcagcgagaaggagagcgaggacgcgccaaaaacatctcctccgacgcctgggaaacatggtttggaacagactggggaggaaaaagtgatggtgactgttcctgacaaaaatccaccttgtccttgctgtggtacccgggtaaactctgtgttgaatctgattgaacatctgaaagtgtcacacgggaaaaggggggtttgttttcggtgtgcaaaatgtggaaaggaaaatagtaactatcacagtgttgtttgtcattttaagaaatgcaggggtccagagacggagaaagccccagctggggagtggatttgtgaggtatgcaacagagattttacaaccaaaattggcctgggacaacacaagagaagggcacacccagcagtgagaaatcaggaaaggatcgttgcttcccaaccgaaagaaacatcaaatagaggtgctcacaaaaggtgctggacaaaggaggaggaagaattactaataagactggaggctcagttcgagggaaacaaaaatattaataagcttattgcagaacacataaccaccaaaacagctaagcagatcagtgacaaaaggcgattgctgtccagaaagccagcagaggagccacgtgagatgcctggaacgtgtcatcacaccaggagagcagctgcgagcctgagaacggagcctgagatgagtcatcacgcccaggcagaggacagagataatggacctgggagacgccctctgccaggcagggcagctgccggagggagaacaatggacgagataagacgccaccctgataagggcaacggacagcagagacccaccaagcaaaaatcagaagaacagctgcaggcttactataaaaagacactagaggaacgactttcagctggggcacttaacaccttcccccgagcattcaagcaggtaatggaaggccgggatataaagctagtaatcaatcagacagcgcaggactacttcggatgcctggaatccataagccaaataagaacggcaacccgagataaaaaggacacggtgacccggaagaaacacccaaagaaaccttttcagaagtggatgaagaagagagcaatcaaaaaaggtaattatcttcggttccagcgtttatttcaccttgatagagggaaactggctaaaatcattttagatgatattgaatgcttgtcttgtgacataccactcagtgaaatttattcggtttttaaaacaagatgggaaacaactggtagctttaaaagccttggggactttaaaacttacgggaaggctgacaacactgccttcagagacttaattacggctaaagaaattgagaaaaatgtgcaggaaatgagcaaaggctcggctcccggtccagacgggattactcttggggacgtcgtaaagatggatcccgagggctcccggaccatggagattttcaatttatggttaacaactggtaaaatcccggacatggtgagggggtgcagaaccgttttgattccaaaatcatcagacccggatcgtttgaaagacattaataactggagacctatcacgatcggttccatcttgctgagactgttctccaggattgtaacagctaggctgagcaaagcgtgccccctgaacccaaggcaaagaggctttatcagagcggcgggatgctctgaaaacttaaaactcctgcaaactataatttggtcggccaaaagagaacacagaccactgggtgttgtattcgtggacatcgccaaggcttttgacaccgtaagccaccagcacatcattcatgctttgcagcaaagagaggtggatccccacatcgtcggtctggtgagcaatatgtacgagaacatcagtacgtatatcaccacaaagaggaacacacacacagacaaaatccagatccgggttggagtaaagcagggtgacccgatgtcgccccttttatttaacctggcaatggaccctctattatgcaagctggaagagagtggcaaaggataccaccgaggacagagcagcatcacagcgatggcatttgcagacgatctggttttgctgagcgactcctgggaaggcatgaatacaaatattagcatactggagaccttctgcaatctgaccggactcaaaacacaggggcaaaagtgccacggcttttacatcaagccgacaaagaagtcttacaccatcaatgactgcgctgcctggactatcaacggcacacccctgaacatgatcgaccccggcgaatctgagaaatacctcggcctgcagtttgacccgtggattggaatagcaaggtccggtctctccacaaaactagatttttggcttcagcggatcgatcaagcaccacttaaacctctgcagaaactggatattctcaaaacatacaccatccctcggctgatctacatagctgaccactcagaagtgaaaactgcactactcgaaacccttgaccagaagatccggacagcggtcaaggaatggcttcacctacctccgtgcacctgcgatgccatcctgtactcgagcacgagagacggcggtttgggcatcaccaaattggcaggactgatccccagcgtgcaggcccgtagactgcatcggatcgcacagtcatctgacgatacgatgaaatgcttcatggaaaaagagaaaatggaacagctgcataagaaattgtggattcaagctggaggggacagagagaacataccctcgatttgggaagcaccaccgtcgagtgaaccaccaaacaacgtgagcacaaattcggaatgggaagcaccgacccagaaagataaatttccaaagccttgcaattggaggaaaaacgaattcaaaaaatggaccaaattggcatcccaaggccgcggaattgtaaattttgaaagagacaaaattagtaaccattggatccaatactacagacgcatacctcacaggaaactcctcactgcactacaactcagggccaacgtttaccccacgagagaatttctagccaggggtagacaagaccaatacatcaaggcgtgtaggcactgcgatgcggacattgaatcctgcgcccacatcatcggcaactgcccagtgacacaggacgcccgaatcaagaggcacaataagatctgcgaactgcttctcgaggaggcgaagaagaaggactgggtagtgttcaaggaaccgcacataagggattccaacaaggaactgtacaaacctgacctgatatttgtgaaggatgcccgtgcacttgtcgtggatgtgacagtacggtatgaagcagccaaatcatcgctggaggaagccgctgcagagaaagtgagaaagtacaaacacctggaaacggaagtaagacatctcacgaatgcaaaggacgttacttttgtgggctttcccctaggagcgcgggggaaatggcaccaagataactttaaacttttgactgagcttggcctctccaaatcgaggcaagtgaaaatggcagagactttttccacagtagcgctcttttcatctgtggacattgtacatatgtttgccagtagggccagaaaatctatggttatgtgataataggctgccttctgcggggcttgccttctggccatgcccttcttctctcccttgcacctgtacctcttggtctttgaataaagcctgagtaggaaggaccggtaaaaaaaaaaaaaaaaaaaaaaaaaaaaaaacgttgactaaaaaaaaaaaaaaaaaaaaaaaaaaaaaaaaaaaaaaaaaaaaaaaaaaaaaaaaaaaaaaaaaaaaaa

SEQ ID NO: 11704 - DNA, 4564 bp, synthetic construct
  source 1..4564: mol_type = other DNA
ggtctagttacaactgggcatcgctgcagagatcgcacctcctcgtggtcccgctggtagcccttcgaagggtgactaagtcgatctctgccccaggtacggagccgttgggactcaccagtccaacgtaactcctgcctaaattcggtgaaacaaattcctcggtaaaaagccccatggcttcttgcccgaaacctggccccccggtttcagcaggggcaatgagtttggaaagtggactgaccacccactccgttctcgccatcgaacgtggtcccaattcgttggcaaattccggatcagactttgggggggggggtctggggctaccgttacgcctattgagggtatcggtcggcactcagacctcccgctccgactgggtagacctggtgtcctggagccacccaggacccacgtctaagtcccagcaggttgacctggtgtctttatttcctaaacaccgggttgacctgttatccaaaaacgaccaggtagacctggtggctcaatttttaccatctaaatttccccccaatttggcagaaaatgatttggctttgctggtgaacttagagttctacagatcggatttgcatgtgtatgagggcgttcataaggctgcacattgggagggattaagtggtttgcctgaggtgtatgaacaacttgcaccacaaccgtgtgtgggagaaactttacattctagcctcccacgagacagtgaactgtttgtgcctgaagaggggagcagcgagaaggagagcgaggacgcgccaaaaacatctcctccgacgcctgggaaacatggtaagaggcagactggggaggaaaaagtgatggtgactgttcctgacaaaaatccaccttgtccttgctgtggtacccgggtaaactctgtgttgaatctgattgaacatctgaaagtgtcacacgggaaaaggagggtttgttttcggtgtgcaaaatgtggaaaggaaaatagtaactatcacagtgttgtttgtcattttaagaaatgcaggggtccagagacggagaaagccccagctggggagtggatttgtgaggtatgcaacagagattttacaaccaaaattggcctgggacaacacaagagattggcacacccagcagtgagaaatcaggaaaggatcgttgcttcccaaccgaaagaaacatcaaatagaggtgctcacaaaaggtgctggacaaaggaggaggaagaattactaataagactggaggctcagttcgagggaaacaaaaatattaataagcttattgcagaacacataaccaccaaaacagctaagcagatcagtgacaaaaggcgattgctgtccagaaagccagcagaggagccacgtgaggagcctggaacgtgtcatcacaccaggagagcagctgcgagcctgagaacggagcctgagatgagtcatcacgcccaggcagaggacagagataatggacctgggagacgccctctgccaggcagggcagctgccggagggagaacaatggacgagataagacgccaccctgataagggcaacggacagcagagacccaccaagcaaaaatcagaagaacagctgcaggcttactataaaaagacactagaggaacgactttcagctggggcacttaacaccttcccccgagcattcaagcaggtaatggaaggccgggatataaagctagtaatcaatcagacagcgcaggactgcttcggatgcctggaatccataagccaaataagaacggcaacccgagataaaaagtacacggtgacccggaagaaacacccaaagaaaccttttcagaagtggatgaagaagagagcaatcaaaaaaggtaattatcttcggttccagcgtttattttatcttgatagagggaaactggctaaaatcattttagatgatattgaatgcttgtcttgtgacataccactcagtgaaatttattcggtttttaaaacaagatgggaaacaactggtagctttaaaagccttggggactttaaaacttacgggaaggctgacaacactgccttcagagaattaattacggctaaagaaattgagaaaaatgtgcaggaaatgagcaaaggctcggctcccggtccagacgggattactcttggggacgtcgtaaagatggatcccgagggctcccggaccatggagattttcaatttatggttaacaactggtaaaatcccggacatggtgagggggtgcagaaccgttttgattccaaaatcatcagacccggatcgtttgaaagacattaataactggagacctatcacgatcggttccatcttgctgagactgttctccaggattgtaacagctaggctgagcaaagcgtgccccctgaacccaaggcaaagaggctttatcagagcggcgggatgctctgaaaacttaaaactcctgcaaactataatttggtcggccaaaagagaacacagaccactgggtgttgtattcgtggacatcgccaaggcttttgacaccgtaagccaccagcacatcattcatgctttgcagcaaagagaggtggatccccacatcgtcggtctggtgagcaatatgtacgagaacatcagtacgtatatcaccacaaagaggaacacacacacagacaaaatccagatccgggttggagtaaagcagggtgacccgatgtcgccccttttatttaacctggcaatggaccctctattatgcaagctggaagagagtggcaaaggataccaccgaggacagagcagcatcacagcgatggcatttgcagacgatctggttttgctgagcgactcctgggaaaatatgaatacaaatattagcatactggagaccttctgcaatctgaccggactcaaaacacaggggcaaaagtgccacggcttttacatcaagccgacaaaggactcttacaccatcaatgactgcgctgcctggactatcaacggcacacccctgaacatgatcgaccccggcgaatctgagaaatacctcggcctgcagtttgacccgtggattggaatagcaaggtccggtctctccacaaaactagatttttggcttcagcggatcgatcaagcaccacttaaacctctgcagaaactggatattctcaaaacatacaccatccctcggctgatctacatagctgaccactcagaagtgaaaactgcactactcgaaacccttgaccagaagatccggacagcggtcaaggaatggcttcacctacctccgtgcacctgcgatgccatcctgtactcgagcacgagagacggcggtttgggcatcaccaaattggcaggactgatccccagcgtgcaggcccgtagactgcatcggatcgcacagtcatctgacgatacgatgaaatgcttcatggaaaaagagaaaatggaacagctgcataagaaattgtggattcaagctggaggggacagagagaacataccctcgatttgggaagcaccaccgtcgagtgaaccaccaaacaacgtgagcacaaattcggaatgggaagcaccgacccagaaagataaatttccaaagccttgcaattggaggaaaaacgaattcaaaaaatggaccaaattggcatcccaaggccgcggaattgtaaattttgaaagagacaaaattagtaaccattggatccaatactacagacgcatacctcacaggaaactcctcactgcactacaactcagggccaacgtttaccccacgagagaatttctagccaggggtagacaagaccaatacatcaaggcgtgtaggcactgcgatgcggacattgaatcctgcgcccacatcatcggcaactgcccagtgacacaggacgcccgaatcaagaggcacaataagatctgcgaactgcttctcgaggaggcgaagaagaaggactgggtagtgttcaaggaaccgcacataagggattccaacaaggaactgtacaaacctgacctgatatttgtgaaggatggccgtgcacttgtcgtggatgtgacagtacggtatgaagcagccaaatcatcgctggaggaagccgctgcagagaaagtgagaaagtacaaacacctggaaacggaagtaagacatctcacgaatgcaaaggacgttacttttgtgggctttcccctaggagcgcgggggaaatggcaccaagataactttaaacttttgactgagcttggcctctccaaatcgaggcaagtgaaaatggcagagactttttccacagtagcgctcttttcatctgtggacattgtacatatgtttgccagtagggccagaaaatctatggttatgtgataataggctgccttctgcggggcttgccttctggccatgcccttcttctctcccttgcacctgtacctcttggtctttgaataaagcctgagtaggaaggaccggtaaaaaaaaaaaaaaaaaaaaaaaaaaaaaaacgttgactaaaaaaaaaaaaaaaaaaaaaaaaaaaaaaaaaaaaaaaaaaaaaaaaaaaaaaaaaaaaaaaaaaaaaa

SEQ ID NO: 11705 - DNA, 4564 bp, synthetic construct
  source 1..4564: mol_type = other DNA
ggtctagttacaactgggcatcgctgcagagatcgcacctcctcgtggtcccgctggtagcccttcgaagggtgactaagtcgatctctgccccaggtacggagccgttgggactcaccagtccaacgtaactcctgcctaaattcggtgaaacaaattcctcggtaaaaagccccatggcttcttgcccgaaacctggccccccggtttcagcaggggcaatgagtttggaaagtggactgaccacccactccgttctcgccatcgaacgtggtcccaattcgttggcaaattccggatcagactttgggggggggggtctggggctaccgttacgcctattgagggtatcggtcggcactcagacctcccgctccgactgggtagacctggtgtcctggagccacccaggacccacgtctaagtcccagcaggttgacctggtgtctttatttcctaaacaccgggttgacctgttatccaaaaacgaccaggtagacctggtggctcaatttttaccatctaaatttccccccaatttggcagaaaatgatttggctttgctggtgaacttagagttctacagatcggatttgcatgtgtatgagtgtgttcataaggctgcacattgggagggattaagtggtttgcctgaggtgtatgaacaacttgcaccacaaccgtgtgtgggagaaactttacattctagcctcccacgagacagtgaactgtttgtgcctgaagaggggagcagcgagaaggagagcgaggacgcgccaaaaacatctcctccgacgcctgggaaacatggtttggaacagactggggaggaaaaagtgatggtgactgttcctgacaaaaatccaccttgtccttgctgtggtacccgggtaaactctgtgttgaatctgattgaacatctgaaagtgtcacacgggaaaaggggggtttgttttcggtgtgcaaaatgtggaaaggaaaatagtaactatcacagtgttgtttgtcattttccaaaatgcaggggtccagagacggagaaagccccagctggggagtggatttgtgaggtatgcaacagagattttacaaccaaaattggcctgggacaacacaagagattggcacacccagcagtgagaaatcaggaaaggatcgttgcttcccaaccgaaagaaacatcaaatagaggtgctcacaaaaggtgctggacaaaggaggaggaagaattactaataagactggaggctcagttcgagggacacaaaaatattaataagcttattgcagaacacataaccaccaaaacagctaagcagatcagtgacaaaaggcgattgctgtccagaaagccagcagaggagccacgtgaggagcctggaacgtgtcatcacaccaggagagcagctgcgagcctgagaacggagcctgagatgagtcatcacgcccaggcagaggacagagataatggacctgggagacgccctctgccaggcagggcagctgccggagggagaacaatggacgagataagacgccaccctgataagggcaacggacagcagagacccaccaagcaaaaatcagaagaacagctgcaggcttactataaaaagacactagaggaacgactttcagctggggcacttaacaccttcccccgagcattcaagcaggtaatggaaggccgggatataaagctagtaatcaatcagacagcgcaggactgcttcggatgcctggaatccataagccaaataagaacggcaacccgagataaaaagtacacggtgacccgggagaaacacccaaagaggccttttcagaagtggatgaaggacagagcaatcaaaaaaggtaattatcttcggttccagcgtttattttatcttgatagagggaaactggctaaaatcattttagatgatattgaatgcttgtcttgtgacataccactcagtgaaatttattcggtttttaaaacaagatgggaaacaactggtagctttaaaagccttggggactttaaaacttacgggaaggctgacaacactgccttcagagaattaattacggctaaagaaattgagaaaaatgtgcaggaaatgagcaaaggctcggctcccggtccagacgggattactcttggggacgtcgtaaagatggatcccgagttttccctgaccatggagattttcaatttatggttaacaactggtaaaatcccggacatggtgagggggtgcagaaccgttttgattccaaaatcatcaaagccggatcgtttgaaagacattaataactggagacctatcacgatcggttccatcttgctgagactgttctccaggattgtaacagctaggctgagcaaagcgtgccccctgaacccaaggcaaagaggctttatcagagcggcgggatgctctgaaaacttaaaactcctgcaaactataatttggtcggccaaaagagaacacagaccactgggtgttgtattcgtggacatcgccaaggcttttgacaccgtaagccaccagcacatcattcatgctttgcagcaaagagaggtggatccccacatcgtcggtctggtgagcaatatgtacgagaacatcagtacgtatatcaccacaaagaggaacacacacacagacaaaatccagatccgggttggagtaaagcagggtgacccgatgtcgccccttttatttaacctggcaatggaccctctattatgcaagctggaagagagtggcaaaggataccaccgaggacagagcagcatcacagcgatggcatttgcagacgatctggttttgctgagcgactcctgggaaaatatgaatacaaatattagcatactggagaccttctgcaatctgaccggactcaaaacacaggggcaaaagtgccacggcttttacatcaagccgacaaaggactcttacaccatcaatgactgcgctgcctggactatcaacggcacacccctgaacatgatcgaccccggcgaatctgagaaatacctcggcctgcagtttgacccgtggattggaatagcaaggtccggtctctccacaaaactagatgagtggcttcagcggatcgatcaagcaccacttaaacctctgcagaaaactgatattctcaaaacatacaccatccctcggctgatctacatagctgaccactcagaagtgaaagccgcactactcgaaacccttgaccagaagatccggacagcggtcaaggaatggcttcacctacctccgtgcacctgcgatgccatcctgtactcgagcacgagagacggcggtttgggcatcaccaaattggcaggactgatccccagcgtgcaggcccgtagactgcatcggatcgcacagtcatctgacgatacgatgaaatgcttcatggaaaaagagaggatggaacagctgcataagaaattgtggattcaagctggaggggacagagagaacataccctcgatttgggaagcaccaccgtcgagtgaaccaccaaacaacgtgagcacaaattcggaatgggaagcaccgacccagaaacccaaatttccaaagccttgcaattggaggaaaaacgaattcaaaaaatggaccaaattggcatcccaaggccgcggaattgtaaattttgaaagagacaaaattagtaaccattggatccaatactacagacgcatacctcacaggaaactcctcactgcactacaactcagggccaacgtttaccccacgagagaatttctagccaggggtagacaagaccaatacatcaaggcgtgtaggcactgcgatgcggacattgaatcctgcgcccacatcatcggcaactgcccagtgacacaggacgcccgaatcaagaggcacaattacatctgcgaactgcttctcgaggaggcgaagaagaaggactgggtagtgttcaaggaaccgcacataagggattccaacaaggaactgtacaaacctgacctgatatttgtgaaggatgcccgtgcacttgtcgtggatgtgacagtacggtatgaagcagccaaatcatcgctggaggaagccgctgcagagaaagtgagaaagtacaaacacctggaaacggaagtaagacatctcacgaatgcaaaggacgttacttttgtgggctttcccctaggagcgcgggggaaatggcaccaagataactttaaacttttgactgagcttggcctctccaaatcgaggcaagtgaaaatggcagagactttttccacagtagcgctcttttcatctgtggacattgtacatatgtttgccagtagggccagaaaatctatggttatgtgataataggctgccttctgcggggcttgccttctggccatgcccttcttctctcccttgcacctgtacctcttggtctttgaataaagcctgagtaggaaggaccggtaaaaaaaaaaaaaaaaaaaaaaaaaaaaaaacgttgactaaaaaaaaaaaaaaaaaaaaaaaaaaaaaaaaaaaaaaaaaaaaaaaaaaaaaaaaaaaaaaaaaaaaaa

SEQ ID NO: 11706 - DNA, 4564 bp, synthetic construct
  source 1..4564: mol_type = other DNA
ggtctagttacaactgggcatcgctgcagagatcgcacctcctcgtggtcccgctggtagcccttcgaagggtgactaagtcgatctctgccccaggtacggagccgttgggactcaccagtccaacgtaactcctgcctaaattcggtgaaacaaattcctcggtaaaaagccccatggcttcttgcccgaaacctggccccccggtttcagcaggggcaatgagtttggaaagtggactgaccacccactccgttctcgccatcgaacgtggtcccaattcgttggcaaattccggatcagactttgggggggggggtctggggctaccgttacgcctattgagggtatcggtcggcactcagacctcccgctccgactgggtagacctggtgtcctggagccacccaggacccacgtctaagtcccagcaggttgacctggtgtctttatttcctaaacaccgggttgacctgttatccaaaaacgaccaggtagacctggtggctcaatttttaccatctaaatttccccccaatttggcagaaaatgatttggctttgctggtgaacttagagttctacagatcggatttgcatgtgtatgagtgtgttcataaggctgcacattgggagggattaagtggtttgcctgaggtgtatgaacaacttgcaccacaaccgtgtgtgggagaaactttacattctagcctcccacgagacagtgaactgtttgtgcctgaagaggggagcagcgagaaggagagcgaggacgcgccaaaaacatctcctccgacgcctgggaaacatggtttggaacagactggggaggaaaaagtgatggtgactgttcctgacaaaaatccaccttgtccttgctgtggtacccgggtaaactctgtgttgaatctgattgaacatctgaaagtgtcacacgggaaaaggggggtttgttttcggtgtgcaaaatgtggaaaggaaaatagtaactatcacagtgttgtttgtcattttaagaaatgcaggggtccagagacggagaaagccccagctggggagtggatttgtgaggtatgcaacagagattttacaaccaaaattggcctgggacaacacaagagattggcacacccagcagtgagaaatcaggaaaggatcgttgcttcccaaccgaaagaaacatcaaatagaggtgctcacaaaaggtgctggacaaaggaggaggaagaattactaataagactggaggctcagttcgagggacacaaaaatattaataagcttattgcagaacacataaccaccaaaacagctaagcagatcagtgacaaaaggcgattgctgtccagaaagccagcagaggagccacgtgaggagcctggaacgtgtcatcacaccaggagagcagctgcgagcctgagaacggagcctgagatgagtcatcacgcccaggcagaggacagagataatggacctgggagacgccctctgccaggcagggcagctgccggagggagaacaatggacgagataagacgccaccctgataagggcaacggacagcagagacccaccaagcaaaaatcagaagaacagctgcaggcttactataaaaagacactagaggaacgactttcagctggggcacttaacaccttcccccgagcattcaagcaggtaatggaaggccgggatataaagctagtaatcaatcagacagcgcaggactgcttcggatgcctggaatccataagccaaataagaacggcaacccgagataaaaagtacacggtgacccgggagaaacacccaaagaggccttttcagaagtggatgaagaagagagcaatcaaaaaaggtaattatcttcggttccagcgtttattttatcttgatagagggaaactggctaaaatcattttagatgatattgaatgcttgtcttgtgacataccactcagtgaaatttattcggtttttaaaacaagatgggaaacaactggtagctttaaaagccttggggactttaaaacttacgggaaggctgacaacactgccttcagagaattaattacggctaaagaaattgagaaaaatgtgcaggaaatgagcaaaggctcggctcccggtccagacgggattactcttggggacgtcgtaaagatggatcccgagttttccctgaccatggagattttcaatttatggttaacaactggtaaaatcccggacatggtgagggggtgcagaaccgttttgattccaaaatcatcaaagccggatcgtttgaaagacattaataactggagacctatcacgatcggttccatcttgctgagactgttctccaggattgtaacagctaggctgagcaaagcgtgccccctgaacccaaggcaaagaggctttatcagagcggcgggatgctctgaaaacttaaaactcctgcaaactataatttggtcggccaaaagagaacacagaccactgggtgttgtattcgtggacatcgccaaggcttttgacaccgtaagccaccagcacatcattcatgctttgcagcaaagagaggtggatccccacatcgtcggtctggtgagcaatatgtacgagaacatcagtacgtatatcaccacaaagaggaacacacacacagacaaaatccagatccgggttggagtaaagcagggtgacccgatgtcgccccttttatttaacctggcaatggaccctctattatgcaagctggaagagagtggcaaaggataccaccgaggacagagcagcatcacagcgatggcatttgcagacgatctggttttgctgagcgactcctgggaaaatatgaatacaaatattagcatactggagaccttctgcaatctgaccggactcaaaacacaggggcaaaagtgccacggcttttacatcaagccgacaaaggactcttacaccatcaatgactgcgctgcctggactatcaacggcacacccctgaacatgatcgaccccggcgaatctgagaaatacctcggcctgcagtttgacccgtggattggaatagcaaggtccggtctctccacaaaactagatgagtggcttcagcggatcgatcaagcaccacttaaacctctgcagaaaactgatattctcaaaacatacaccatccctcggctgatctacatagctgaccactcagaagtgaaagccgcactactcgaaacccttgaccagaagatccggacagcggtcaaggaatggcttcacctacctccgtgcacctgcgatgccatcctgtactcgagcacgagagacggcggtttgggcatcaccaaattggcaggactgatccccagcgtgcaggcccgtagactgcatcggatcgcacagtcatctgacgatacgatgaaatgcttcatggaaaaagagaggatggaacagctgcataagaaattgtggattcaagctggaggggacagagagaacataccctcgatttgggaagcaccaccgtcgagtgaaccaccaaacaacgtgagcacaaattcggaatgggaagcaccgacccagaaacccaaatttccaaagccttgcaattggaggaaaaacgaattcaaaaaatggaccaaattggcatcccaaggccgcggaattgtaaattttgaaagagacaaaattagtaaccattggatccaatactacagacgcatacctcacaggaaactcctcactgcactacaactcagggccaacgtttaccccacgagagaatttctagccaggggtagacaagaccaatacatcaaggcgtgtaggcactgcgatgcggacattgaatcctgcgcccacatcatcggcaactgcccagtgacacaggacgcccgaatcaagaggcacaattacatctgcgaactgcttctcgaggaggcgaagaagaaggactgggtagtgttcaaggaaccgcacataagggattccaacaaggaactgtacaaacctgacctgatatttgtgaaggatgcccgtgcacttgtcgtggatgtgacagtacggtatgaagcagccaaatcatcgctggaggaagccgctgcagagaaagtgagaaagtacaaacacctggaaacggaagtaagacatctcacgaatgcaaaggacgttacttttgtgggctttcccctaggagcgcgggggaaatggcaccaagataactttaaacttttgactgagcttggcctctccaaatcgaggcaagtgaaaatggcagagactttttccacagtagcgctcttttcatctgtggacattgtacatatgtttgccagtagggccagaaaatctatggttatgtgataataggctgccttctgcggggcttgccttctggccatgcccttcttctctcccttgcacctgtacctcttggtctttgaataaagcctgagtaggaaggaccggtaaaaaaaaaaaaaaaaaaaaaaaaaaaaaaacgttgactaaaaaaaaaaaaaaaaaaaaaaaaaaaaaaaaaaaaaaaaaaaaaaaaaaaaaaaaaaaaaaaaaaaaaa

SEQ ID NO: 11707 - DNA, 5407 bp, synthetic construct
  source 1..5407: mol_type = other DNA
ggtctagttacaactgggcatcgctgcagagatcgcacctcctcgtggtcccgctggtagcccttcgaagggtgactaagtcgatctctgccccaggtacggagccgttgggactcaccagtccaacgtaactcctgcctaaattcggtgaaacaaattcctcggtaaaaagccccatgggaactgcactaacaccgctcctgacgaagttcgccacgcgctacgagatgggtaccacgcctgaagaagtggcgaacacgctcaagcagacctgtttcaagggccaggtcaatgattcgcagatggtcgccctgctgatcgtggcagaccagtacaagcttaaccccttcaccaaggagttgtacgcattccccgacaagaacaacggcatcgtgccggttgttggtgtggatggctgggctcggatcatcaacgagaacccacagttcgatggcatggaattctcaatggaccagcagggaaccgaatgcacctgcaagatctatcggaaggaccgcagccatgccatcagcgcgactgagtacatggccgagtgcaagcggaacacccagccttggcagtcccatccgcgccggatgcttcgccacaaggcaatgatccagtgcgcacgcctcgcgttcgggttcgccggcatatacgaccaggacgaggccgagcggatcgttgaacgagacgtcactcccgcagagcagtacgaggacgtcagcgaggcgatctgcctgatcaaggactccccaacaatggaggacttgcaggcagcattcagcaatgcctggaaagcctataagacaaagggcgcgcgcgaccagcttacggcggccaaggaccagcggaagaaagaattgctggacgcccctatagacgttgaattcgaggagaccggcgatgatcgagcagcgtctggaggatctagcggaggatcctctggcagcgagacaccaggaacaagcgagtcagcaacaccagagagcagtggcggcagcagcggcggcagcagcatggcttcttgcccgaaacctggccccccggtttcagcaggggcaatgagtttggaaagtggactgaccacccactccgttctcgccatcgaacgtggtcccaattcgttggcaaattccggatcagactttgggggggggggtctggggctaccgttacgcctattgagggtatcggtcggcactcagacctcccgctccgactgggtagacctggtgtcctggagccacccaggacccacgtctaagtcccagcaggttgacctggtgtctttatttcctaaacaccgggttgacctgttatccaaaaacgaccaggtagacctggtggctcaatttttaccatctaaatttccccccaatttggcagaaaatgatttggctttgctggtgaacttagagttctacagatcggatttgcatgtgtatgagtgtgttcataaggctgcacattgggagggattaagtggtttgcctgaggtgtatgaacaacttgcaccacaaccgtgtgtgggagaaactttacattctagcctcccacgagacagtgaactgtttgtgcctgaagaggggagcagcgagaaggagagcgaggacgcgccaaaaacatctcctccgacgcctgggaaacatggtttggaacagactggggaggaaaaagtgatggtgactgttcctgacaaaaatccaccttgtccttgctgtggtacccgggtaaactctgtgttgaatctgattgaacatctgaaagtgtcacacgggaaaaggagggtttgttttcggtgtgcaaaatgtggaaaggaaaatagtaactatcacagtgttgtttgtcattttccaaaatgcaggggtccagagacggagaaagccccagctggggagtggatttgtgaggtatgcaacagagattttacaaccaaaattggcctgggacaacacaagagattggcacacccagcagtgagaaatcaggaaaggatcgttgcttcccaaccgaaagaaacatcaaatagaggtgctcacaaaaggtgctggacaaaggaggaggaagaattactaataagactggaggctcagttcgagggacacaaaaatattaataagcttattgcagaacacataaccaccaaaacagctaagcagatcagtgacaaaaggcgattgctgtccagaaagccagcagaggagccacgtgaggagcctggaacgtgtcatcacaccaggagagcagctgcgagcctgagaacggagcctgagatgagtcatcacgcccaggcagaggacagagataatggacctgggagacgccctctgccaggcaggcccgctgccggagggagaacaatggacgagataagacgccaccctgataagggcaacggacagcagagacccaccaagcaaaaatcagaagaacagctgcaggcttactataaaaagacactagaggaacgactttcagctggggcacttaacaccttcccccgagcattcaagcaggtaatggaaggccgggatataaagctagtaatcaatcagacagcgcaggactgcttcggatgcctggaatccataagccaaataagaacggcaacccgagataaaaagtacacggtgacccgggagaaacacccaaagaggccttttcagaagtggatgaaggacagagcaatcaaaaaaggtaattatcttcggttccagcgtttattttatcttgatagagggaaactggctaaaatcattttagatgatattgaatgcttgtcttgtgacataccactcagtgaaatttattcggtttttaaaacaagatgggaaacaactggtagctttaaaagccttggggactttaaaacttacgggaaggctgacaacactgccttcagagaattaattacggctaaagaaattgagaaaaatgtgcaggaaatgagcaaaggctcggctcccggtccagacgggattactcttggggacgtcgtaaagatggatcccgagttttccctgaccatggagattttcaatttatggttaacaactggtaaaatcccggacatggtgagggggtgcagaaccgttttgattccaaaatcatcaaagccggatcgtttgaaagacattaataactggagacctatcacgatcggttccatcttgctgagactgttctccaggattgtaacagctaggctgagcaaagcgtgccccctgaacccaaggcaaagaggctttatcagagcggcgggatgctctgaaaacttaaaactcctgcaaactataatttggtcggccaaaagagaacacagaccactgggtgttgtattcgtggacatcgccaaggcttttgacaccgtaagccaccagcacatcattcatgctttgcagcaaagagaggtggatccccacatcgtcggtctggtgagcaatatgtacgagaacatcagtacgtatatcaccacaaagaggaacacacacacagacaaaatccagatccgggttggagtaaagcagggtgacccgatgtcgccccttttatttaacctggcaatggaccctctattatgcaagctggaagagagtggcaaaggataccaccgaggacagagcagcatcacagcgatggcatttgcagacgatctggttttgctgagcgactcctgggaaaatatgaatacaaatattagcatactggagaccttctgcaatctgaccggactcaaaacacaggggcaaaagtgccacggcttttacatcaagccgacaaaggactcttacaccatcaatgactgcgctgcctggactatcaacggcacacccctgaacatgatcgaccccggcgaatctgagaaatacctcggcctgcagtttgacccgtggattggaatagcaaggtccggtctctccacaaaactagatgagtggcttcagcggatcgatcaagcaccacttaaacctctgcagaaaactgatattctcaaaacatacaccatccctcggctgatctacatagctgaccactcagaagtgaaagccgcactactcgaaacccttgaccagaagatccggacagcggtcaaggaatggcttcacctacctccgtgcacctgcgatgccatcctgtactcgagcacgagagacggcggtttgggcatcaccaaattggcaggactgatccccagcgtgcaggcccgtagactgcatcggatcgcacagtcatctgacgatacgatgaaatgcttcatggaaaaagagaggatggaacagctgcataagaaattgtggattcaagctggaggggacagagagaacataccctcgatttgggaagcaccaccgtcgagtgaaccaccaaacaacgtgagcacaaattcggaatgggaagcaccgacccagaaacccaaatttccaaagccttgcaattggaggaaaaacgaattcaaaaaatggaccaaattggcatcccaaggccgcggaattgtaaattttgaaagagacaaaattagtaaccattggatccaatactacagacgcatacctcacaggaaactcctcactgcactacaactcagggccaacgtttaccccacgagagaatttctagccaggggtagacaagaccaatacatcaaggcgtgtaggcactgcgatgcggacattgaatcctgcgcccacatcatcggcaactgcccagtgacacaggacgcccgaatcaagaggcacaattacatctgcgaactgcttctcgaggaggcgaagaagaaggactgggtagtgttcaaggaaccgcacataagggattccaacaaggaactgtacaaacctgacctgatatttgtgaaggatggccgtgcacttgtcgtggatgtgacagtacggtatgaagcagccaaatcatcgctggaggaagccgctgcagagaaagtgagaaagtacaaacacctggaaacggaagtaagacatctcacgaatgcaaaggacgttacttttgtgggctttcccctaggagcgcgggggaaatggcaccaagataactttaaacttttgactgagcttggcctctccaaatcgaggcaagtgaaaatggcagagactttttccacagtagcgctcttttcatctgtggacattgtacatatgtttgccagtagggccagaaaatctatggttatgtgataataggctgccttctgcggggcttgccttctggccatgcccttcttctctcccttgcacctgtacctcttggtctttgaataaagcctgagtaggaaggaccggtaaaaaaaaaaaaaaaaaaaaaaaaaaaaaaacgttgactaaaaaaaaaaaaaaaaaaaaaaaaaaaaaaaaaaaaaaaaaaaaaaaaaaaaaaaaaaaaaaaaaaaaaa

SEQ ID NO: 11708 - DNA, 5407 bp, synthetic construct
  source 1..5407: mol_type = other DNA
ggtctagttacaactgggcatcgctgcagagatcgcacctcctcgtggtcccgctggtagcccttcgaagggtgactaagtcgatctctgccccaggtacggagccgttgggactcaccagtccaacgtaactcctgcctaaattcggtgaaacaaattcctcggtaaaaagccccatgggaactgcactaacaccgctcctgacgaagttcgccacgcgctacgagatgggtaccacgcctgaagaagtggcgaacacgctcaagcagacctgtttcaagggccaggtcaatgattcgcagatggtcgccctgctgatcgtggcagaccagtacaagcttaaccccttcaccaaggagttgtacgcattccccgacaagaacaacggcatcgtgccggttgttggtgtggatggctgggctcggatcatcaacgagaacccacagttcgatggcatggaattctcaatggaccagcagggaaccgaatgcacctgcaagatctatcggaaggaccgcagccatgccatcagcgcgactgagtacatggccgagtgcaagcggaacacccagccttggcagtcccatccgcgccggatgcttcgccacaaggcaatgatccagtgcgcacgcctcgcgttcgggttcgccggcatatacgaccaggacgaggccgagcggatcgttgaacgagacgtcactcccgcagagcagtacgaggacgtcagcgaggcgatctgcctgatcaaggactccccaacaatggaggacttgcaggcagcattcagcaatgcctggaaagcctataagacaaagggcgcgcgcgaccagcttacggcggccaaggaccagcggaagaaagaattgctggacgcccctatagacgttgaattcgaggagaccggcgatgatcgagcagcgtctggaggatctagcggaggatcctctggcagcgagacaccaggaacaagcgagtcagcaacaccagagagcagtggcggcagcagcggcggcagcagcatggcttcttgcccgaaacctggccccccggtttcagcaggggcaatgagtttggaaagtggactgaccacccactccgttctcgccatcgaacgtggtcccaattcgttggcaaattccggatcagactttgggggggggggtctggggctaccgttacgcctattgagggtatcggtcggcactcagacctcccgctccgactgggtagacctggtgtcctggagccacccaggacccacgtctaagtcccagcaggttgacctggtgtctttatttcctaaacaccgggttgacctgttatccaaaaacgaccaggtagacctggtggctcaatttttaccatctaaatttccccccaatttggcagaaaatgatttggctttgctggtgaacttagagttctacagatcggatttgcatgtgtatgagtgtgttcataaggctgcacattgggagggattaagtggtttgcctgaggtgtatgaacaacttgcaccacaaccgtgtgtgggagaaactttacattctagcctcccacgagacagtgaactgtttgtgcctgaagaggggagcagcgagaaggagagcgaggacgcgccaaaaacatctcctccgacgcctgggaaacatggtttggaacagactggggaggaaaaagtgatggtgactgttcctgacaaaaatccaccttgtccttgctgtggtacccgggtaaactctgtgttgaatctgattgaacatctgaaagtgtcacacgggaaaaggggggtttgttttcggtgtgcaaaatgtggaaaggaaaatagtaactatcacagtgttgtttgtcattttaagaaatgcaggggtccagagacggagaaagccccagctggggagtggatttgtgaggtatgcaacagagattttacaaccaaaattggcctgggacaacacaagagattggcacacccagcagtgagaaatcaggaaaggatcgttgcttcccaaccgaaagaaacatcaaatagaggtgctcacaaaaggtgctggacaaaggaggaggaagaattactaataagactggaggctcagttcgagggaaacaaaaatattaataagcttattgcagaacacataaccaccaaaacagctaagcagatcagtgacaaaaggcgattgctgtccagaaagccagcagaggagccacgtgaggagcctggaacgtgtcatcacaccaggagagcagctgcgagcctgagaacggagcctgagatgagtcatcacgcccaggcagaggacagagataatggacctgggagacgccctctgccaggcagggcagctgccggagggagaacaatggacgagataagacgccaccctgataagggcaacggacagcagagacccaccaagcaaaaatcagaagaacagctgcaggcttactataaaaagacactagaggaacgactttcagctggggcacttaacaccttcccccgagcattcaagcaggtaatggaaggccgggatataaagctagtaatcaatcagacagcgcaggactgcttcggatgcctggaatccataagccaaataagaacggcaacccgagataaaaagtacacggtgacccgggagaaacacccaaagaaaccttttcagaagtggatgaagaagagagcaatcaaaaaaggtaattatcttcggttccagcgtttattttatcttgatagagggaaactggctaaaatcattttagatgatattgaatgcttgtcttgtgacataccactcagtgaaatttattcggtttttaaaacaagatgggaaacaactggtagctttaaaagccttggggactttaaaacttacgggaaggctgacaacactgccttcagagaattaattacggctaaagaaattgagaaaaatgtgcaggaaatgagcaaaggctcggctcccggtccagacgggattactcttggggacgtcgtaaagatggatcccgagttttccctgaccatggagattttcaatttatggttaacaactggtaaaatcccggacatggtgagggggtgcagaaccgttttgattccaaaatcatcaaagccggatcgtttgaaagacattaataactggagacctatcacgatcggttccatcttgctgagactgttctccaggattgtaacagctaggctgagcaaagcgtgccccctgaacccaaggcaaagaggctttatcagagcggcgggatgctctgaaaacttaaaactcctgcaaactataatttggtcggccaaaagagaacacagaccactgggtgttgtattcgtggacatcgccaaggcttttgacaccgtaagccaccagcacatcattcatgctttgcagcaaagagaggtggatccccacatcgtcggtctggtgagcaatatgtacgagaacatcagtacgtatatcaccacaaagaggaacacacacacagacaaaatccagatccgggttggagtaaagcagggtgacccgatgtcgccccttttatttaacctggcaatggaccctctattatgcaagctggaagagagtggcaaaggataccaccgaggacagagcagcatcacagcgatggcatttgcagacgatctggttttgctgagcgactcctgggaaaatatgaatacaaatattagcatactggagaccttctgcaatctgaccggactcaaaacacaggggcaaaagtgccacggcttttacatcaagccgacaaaggactcttacaccatcaatgactgcgctgcctggactatcaacggcacacccctgaacatgatcgaccccggcgaatctgagaaatacctcggcctgcagtttgacccgtggattggaatagcaaggtccggtctctccacaaaactagatgagtggcttcagcggatcgatcaagcaccacttaaacctctgcagaaaactgatattctcaaaacatacaccatccctcggctgatctacatagctgaccactcagaagtgaaagccgcactactcgaaacccttgaccagaagatccggacagcggtcaaggaatggcttcacctacctccgtgcacctgcgatgccatcctgtactcgagcacgagagacggcggtttgggcatcaccaaattggcaggactgatccccagcgtgcaggcccgtagactgcatcggatcgcacagtcatctgacgatacgatgaaatgcttcatggaaaaagagaaaatggaacagctgcataagaaattgtggattcaagctggaggggacagagagaacataccctcgatttgggaagcaccaccgtcgagtgaaccaccaaacaacgtgagcacaaattcggaatgggaagcaccgacccagaaacccaaatttccaaagccttgcaattggaggaaaaacgaattcaaaaaatggaccaaattggcatcccaaggccgcggaattgtaaattttgaaagagacaaaattagtaaccattggatccaatactacagacgcatacctcacaggaaactcctcactgcactacaactcagggccaacgtttaccccacgagagaatttctagccaggggtagacaagaccaatacatcaaggcgtgtaggcactgcgatgcggacattgaatcctgcgcccacatcatcggcaactgcccagtgacacaggacgcccgaatcaagaggcacaattacatctgcgaactgcttctcgaggaggcgaagaagaaggactgggtagtgttcaaggaaccgcacataagggattccaacaaggaactgtacaaacctgacctgatatttgtgaaggatgcccgtgcacttgtcgtggatgtgacagtacggtatgaagcagccaaatcatcgctggaggaagccgctgcagagaaagtgagaaagtacaaacacctggaaacggaagtaagacatctcacgaatgcaaaggacgttacttttgtgggctttcccctaggagcgcgggggaaatggcaccaagataactttaaacttttgactgagcttggcctctccaaatcgaggcaagtgaaaatggcagagactttttccacagtagcgctcttttcatctgtggacattgtacatatgtttgccagtagggccagaaaatctatggttatgtgataataggctgccttctgcggggcttgccttctggccatgcccttcttctctcccttgcacctgtacctcttggtctttgaataaagcctgagtaggaaggaccggtaaaaaaaaaaaaaaaaaaaaaaaaaaaaaaacgttgactaaaaaaaaaaaaaaaaaaaaaaaaaaaaaaaaaaaaaaaaaaaaaaaaaaaaaaaaaaaaaaaaaaaaaa

SEQ ID NO: 11709 - DNA, 4730 bp, synthetic construct
  source 1..4730: mol_type = other DNA
ggtctagttacaactgggcatcgctgcagagatcgcacctcctcgtggtcccgctggtagcccttcgaagggtgactaagtcgatctctgccccaggtacggagccgttgggactcaccagtccaacgtaactcctgcctaaattcggtgaaacaaattcctcggtaaaaagccccatggcttcttgcccgaaacctggccccccggtttcagcaggggcaatgagtttggaaagtggactgaccacccactccgttctcgccatcgaacgtggtcccaattcgttggcaaattccggatcagactttgggggggggggtctggggctaccgttacgcctattgagggtatcggtcggcactcagacctcccgctccgactgggtagacctggtgtcctggagccacccaggacccacgtctaagtcccagcaggttgacctggtgtctttatttcctaaacaccgggttgacctgttatccaaaaacgaccaggtagacctggtggctcaatttttaccatctaaatttccccccaatttggcagaaaatgatttggctttgctggtgaacttagagttctacagatcggatttgcatgtgtatgagtgtgttcataaggctgcacattgggagggattaagtggtttgcctgaggtgtatgaacaacttgcaccacaaccgtgtgtgggagaaactttacattctagcctcccacgagacagtgaactgtttgtgcctgaagaggggagcagcgagaaggagagcgaggacgcgccaaaaacatctcctccgacgcctgggaaacatggtttggaacagactggggaggaaaaagtgatggtgactgttcctgacaaaaatccaccttgtccttgctgtggtacccgggtaaactctgtgttgaatctgattgaacatctgaaagtgtcacacgggaaaaggggggtttgttttcggtgtgcaaaatgtggaaaggaaaatagtaactatcacagtgttgtttgtcattttaagaaatgcaggggtccagagacggagaaagccccagctggggagtggatttgtgaggtatgcaacagagattttacaaccaaaattggcctgggacaacacaagagattggcacacccagcagtgagaaatcaggaaaggatcgttgcttcccaaccgaaagaaacatcaaatagaggtgctcacaaaaggtgctggacaaaggaggaggaagaattactaataagactggaggctcagttcgagggaaacaaaaatattaataagcttattgcagaacacataaccaccaaaacagctaagcagatcagtgacaaaaggcgattgctgtccagaaagccagcagaggagccacgtgaggagcctggaacgtgtcatcacaccaggagagcagctgcgagcctgagaacggagcctgagatgagtcatcacgcccaggcagaggacagagataatggacctgggagacgccctctgccaggcagggcagctgccggagggagaacaatggacgagataagacgccaccctgataagggcaacggacagcagagacccaccaagcaaaaatcagaagaacagctgcaggcttactataaaaagacactagaggaacgactttcagctggggcacttaacaccttcccccgagcattcaagcaggtaatggaaggccgggatataaagctagtaatcaatcagacagcgcaggactgcttcggatgcctggaatccataagccaaataagaacggcaacccgagataaaaaggacacggtgacccgggagaaacacccaaagaaaccttttcagaagtggatgaagaagagagcaatcaaaaaaggtaattatcttcggttccagcgtttattttatcttgatagagggaaactggctaaaatcattttagatgatattgaatgcttgtcttgtgacataccactcagtgaaatttattcggtttttaaaacaagatgggaaacaactggtagctttaaaagccttggggactttaaaacttacgggaaggctgacaacactgccttcagagaattaattacggctaaagaaattgagaaaaatgtgcaggaaatgagcaaaggctcggctcccggtccagacgggattactcttggggacgtcgtaaagatggatcccgagttttcccggaccatggagattttcaatttatggttaacaactggtaaaatcccggacatggtgagggggtgcagaaccgttttgattccaaaatcatcaaagccggatcgtttgaaagacattaataactggagacctatcacgatcggttccatcttgctgagactgttctccaggattgtaacagctaggctgagcaaagcgtgccccctgaacccaaggcaaagaggctttatcagagcggcgggatgctctgaaaacttaaaactcctgcaaactataatttggtcggccaaaagagaacacagaccactgggtgttgtattcgtggacatcgccaaggcttttgacaccgtaagccaccagcacatcattcatgctttgcagcaaagagaggtggatccccacatcgtcggtctggtgagcaatatgtacgagaacatcagtacgtatatcaccacaaagaggaacacacacacagacaaaatccagatccgggttggagtaaagcagggtgacccgatgtcgccccttttatttaacctggcaatggaccctctattatgcaagctggaagagagtggcaaaggataccaccgaggacagagcagcatcacagcgatggcatttgcagacgatctggttttgctgagcgactcctgggaaaatatgaatacaaatattagcatactggagaccttctgcaatctgaccggactcaaaacacaggggcaaaagtgccacggcttttacatcaagccgacaaaggactcttacaccatcaatgactgcgctgcctggactatcaacggcacacccctgaacatgatcgaccccggcgaatctgagaaatacctcggcctgcagtttgacccgtggattggaatagcaaggtccggtctctccacaaaactagatttttggcttcagcggatcgatcaagcaccacttaaacctctgcagaaaactgatattctcaaaacatacaccatccctcggctgatctacatagctgaccactcagaagtgaaaagcgcactactcgaaacccttgaccagaagatccggacagcggtcaaggaatggcttcacctacctccgtgcacctgcgatgccatcctgtactcgagcacgagagacggcggtttgggcatcaccaaattggcaggactgatccccagcgtgcaggcccgtagactgcatcggatcgcacagtcatctgacgatacgatgaaatgcttcatggaaaaagagaaaatggaacagctgcataagaaattgtggattcaagctggaggggacagagagaacataccctcgatttgggaagcaccaccgtcgagtgaaccaccaaacaacgtgagcacaaattcggaatgggaagcaccgacccagaaagataaatttccaaagccttgcaattggaggaaaaacgaattcaaaaaatggaccaaattggcatcccaaggccgcggaattgtaaattttgaaagagacaaaattagtaaccattggatccaatactacagacgcatacctcacaggaaactcctcactgcactacaactcagggccaacgtttaccccacgagagaatttctagccaggggtagacaagaccaatacatcaaggcgtgtaggcactgcgatgcggacaacgaatcctgcgcccacatcatcggcaactgcccagtgacacaggacgcccgaatcaagaggcacaattacatctgcgaactgcttctcgaggaggcgaagaagaaggactgggtagtgttcaaggaaccgcacataagggattccaacaaggaactgtacaaacctgacctgatatttgtgaaggatggccgtgcacttgtcgtggatgtgacagtacggtatgaagcagccaaatcatcgctggaggaagccgctgcagagaaagtgagaaagtacaaacacctggaaacggaagtaagacatctcacgaatgcaaaggacgttacttttgtgggctttcccctaggagcgcgggggaaatggcaccaagataactttaaacttttgactgagcttggcctctccaaatcgaggcaagtgaaaatggcagagactttttccacagtagcgctcttttcatctgtggacattgtacatatgtttgccagtagggccagaaaatctatggttatgaggaagaagaggaggcagaggaggaggtgataataggctgccttctgcggggcttgccttctggccatgcccttcttctctcccttgcacctgtacctcttggtctttgaataaagcctgagtaggaaggaccggtagacatgataagatacattgatgagtttggacaaaccacaactagaatgcagtgaaaaaaatgctttatttgtgaaatttgtgatgctattgctttatttgtaaccattataagctgcaataaacaagttaacaacaacaaaaaaaaaaaaaaaaaaaaaaaaaaaaaaacgttgactaaaaaaaaaaaaaaaaaaaaaaaaaaaaaaaaaaaaaaaaaaaaaaaaaaaaaaaaaaaaaaaaaaaaaa

SEQ ID NO: 11710 - DNA, 5555 bp, synthetic construct
  source 1..5555: mol_type = other DNA
ggtctagttacaactgggcatcgctgcagagatcgcacctcctcgtggtcccgctggtagcccttcgaagggtgactaagtcgatctctgccccaggtacggagccgttgggactcaccagtccaacgtaactcctgcctaaattcggtgaaacaaattcctcggtaaaaagccccatggcccctaagaaaaagcggaaggtgcctaagagaaaggtgtccagcgccgagggcgctgccaaggaagagcctaaacggagaagcgccagactgagcgccaagccccccgccaaggtggaagccaagcctaagaaggccgccgctaaggacaagagcagcgataagaaagtccagaccaagggcaagcggggcgccaaaggcaaacaggccgaggtggccaaccaggagacaaaggaagatctgcctgctgagaacggcgaaaccaagaccgaggaatctccagcttctgacgaggccggagagaaggaggccaaaagcgacagcggctctgagacacctggaacaagcgagagcgccaccccggaatccaatatcagcggctctagctgcggcagccccaacagcgccgacaccagcagcgacttcaaggacctgtggaccaagctgaaggaatgccacgaccgggaagtgcagggactccaggtgaaggtcaccaaactcaagcaagaaagaatcctggacgcccagagactggaagaattcttcaccaagaaccagcagctgagagagcagcagaaagtgctgcacgagacaatcaaggttctggaagatagactgcgggccggcctgtgcgacagatgcgccgtgaccgaggaacacatgcgcaaaaagcagcaggagttcgagaacattagacagcaaaatctgaaattgatcacagagctgatgaacgagagaaacacactgcaggaggagaacaagaagctgagcgagcagctgcaacagaagatcgagaatgatcagcaacaccaggccgctgagctggaatgtgaagaggacgtgatccccgacagcccaatcacagctttcagcttttctggcgtgaacagactgaggcggaaggaaaacccccacgtgcggtacatcgagcagacccataccaagctggaacacagcgtgtgtgccaacgagatgagaaaggtgtccaagtcctccacccatccccagcacaaccctaacgaaaatgagatcctggtggctgatacctacgaccagtctcagagccctatggccaaggcccacggcaccagctcttatacccctgataagagctccttcaacctggccaccgtggtggccgagacactgggcctgggcgtgcaggaggaaagcgagacacagggcccaatgagccctctgggagatgagctgtaccactgcctggaaggcaaccacaagaaacagccttttgagtccggctccgagactcctggaacaagcgagagcgctacacctgagggcagctatgaacaacttgcaccacaaccgtgtgtgggagaaactttacattctagcctcccacgagacagtgaactgtttgtgcctgaagaggggagcagcgagaaggagagcgaggacgcgccaaaaacatctcctccgacgcctgggaaacatggtttggaacagactggggaggaaaaagtgatggtgactgttcctgacaaaaatccaccttgtccttgctgtggtacccgggtaaactctgtgttgaatctgattgaacatctgaaagtgtcacacgggaaaaggggggtttgttttcggtgtgcaaaatgtggaaaggaaaatagtaactatcacagtgttgtttgtcattttaagaaatgcaggggtccagagacggagaaagccccagctggggagtggatttgtgaggtatgcaacagagattttacaaccaaaattggcctgggacaacacaagagattggcacacccagcagtgagaaatcaggaaaggatcgttgcttcccaaccgaaagaaacatcaaatagaggtgctcacaaaaggtgctggacaaaggaggaggaagaattactaataagactggaggctcagttcgagggaaacaaaaatattaataagcttattgcagaacacataaccaccaaaacagctaagcagatcagtgacaaaaggcgattgctgtccagaaagccagcagaggagccacgtgaggagcctggaacgtgtcatcacaccaggagagcagctgcgagcctgagaacggagcctgagatgagtcatcacgcccaggcagaggacagagataatggacctgggagacgccctctgccaggcagggcagctgccggagggagaacaatggacgagataagacgccaccctgataagggcaacggacagcagagacccaccaagcaaaaatcagaagaacagctgcaggcttactataaaaagacactagaggaacgactttcagctggggcacttaacaccttcccccgagcattcaagcaggtaatggaaggccgggatataaagctagtaatcaatcagacagcgcaggactgcttcggatgcctggaatccataagccaaataagaacggcaacccgagataaaaaggacacggtgacccgggagaaacacccaaagaaaccttttcagaagtggatgaagaagagagcaatcaaaaaaggtaattatcttcggttccagcgtttattttatcttgatagagggaaactggctaaaatcattttagatgatattgaatgcttgtcttgtgacataccactcagtgaaatttattcggtttttaaaacaagatgggaaacaactggtagctttaaaagccttggggactttaaaacttacgggaaggctgacaacactgccttcagagaattaattacggctaaagaaattgagaaaaatgtgcaggaaatgagcaaaggctcggctcccggtccagacgggattactcttggggacgtcgtaaagatggatcccgagttttcccggaccatggagattttcaatttatggttaacaactggtaaaatcccggacatggtgagggggtgcagaaccgttttgattccaaaatcatcaaagccggatcgtttgaaagacattaataactggagacctatcacgatcggttccatcttgctgagactgttctccaggattgtaacagctaggctgagcaaagcgtgccccctgaacccaaggcaaagaggctttatcagagcggcgggatgctctgaaaacttaaaactcctgcaaactataatttggtcggccaaaagagaacacagaccactgggtgttgtattcgtggacatcgccaaggcttttgacaccgtaagccaccagcacatcattcatgctttgcagcaaagagaggtggatccccacatcgtcggtctggtgagcaatatgtacgagaacatcagtacgtatatcaccacaaagaggaacacacacacagacaaaatccagatccgggttggagtaaagcagggtgacccgatgtcgccccttttatttaacctggcaatggaccctctattatgcaagctggaagagagtggcaaaggataccaccgaggacagagcagcatcacagcgatggcatttgcagacgatctggttttgctgagcgactcctgggaaaatatgaatacaaatattagcatactggagaccttctgcaatctgaccggactcaaaacacaggggcaaaagtgccacggcttttacatcaagccgacaaaggactcttacaccatcaatgactgcgctgcctggactatcaacggcacacccctgaacatgatcgaccccggcgaatctgagaaatacctcggcctgcagtttgacccgtggattggaatagcaaggtccggtctctccacaaaactagatttttggcttcagcggatcgatcaagcaccacttaaacctctgcagaaaactgatattctcaaaacatacaccatccctcggctgatctacatagctgaccactcagaagtgaaaagcgcactactcgaaacccttgaccagaagatccggacagcggtcaaggaatggcttcacctacctccgtgcacctgcgatgccatcctgtactcgagcacgagagacggcggtttgggcatcaccaaattggcaggactgatccccagcgtgcaggcccgtagactgcatcggatcgcacagtcatctgacgatacgatgaaatgcttcatggaaaaagagaaaatggaacagctgcataagaaattgtggattcaagctggaggggacagagagaacataccctcgatttgggaagcaccaccgtcgagtgaaccaccaaacaacgtgagcacaaattcggaatgggaagcaccgacccagaaagataaatttccaaagccttgcaattggaggaaaaacgaattcaaaaaatggaccaaattggcatcccaaggccgcggaattgtaaattttgaaagagacaaaattagtaaccattggatccaatactacagacgcatacctcacaggaaactcctcactgcactacaactcagggccaacgtttaccccacgagagaatttctagccaggggtagacaagaccaatacatcaaggcgtgtaggcactgcgatgcggacaacgaatcctgcgcccacatcatcggcaactgcccagtgacacaggacgcccgaatcaagaggcacaattacatctgcgaactgcttctcgaggaggcgaagaagaaggactgggtagtgttcaaggaaccgcacataagggattccaacaaggaactgtacaaacctgacctgatatttgtgaaggatggccgtgcacttgtcgtggatgtgacagtacggtatgaagcagccaaatcatcgctggaggaagccgctgcagagaaagtgagaaagtacaaacacctggaaacggaagtaagacatctcacgaatgcaaaggacgttacttttgtgggctttcccctaggagcgcgggggaaatggcaccaagataactttaaacttttgactgagcttggcctctccaaatcgaggcaagtgaaaatggcagagactttttccacagtagcgctcttttcatctgtggacattgtacatatgtttgccagtagggccagaaaatctatggttatgaggaagaagaggaggcagaggaggaggtgataataggctgccttctgcggggcttgccttctggccatgcccttcttctctcccttgcacctgtacctcttggtctttgaataaagcctgagtaggaaggaccggtagacatgataagatacattgatgagtttggacaaaccacaactagaatgcagtgaaaaaaatgctttatttgtgaaatttgtgatgctattgctttatttgtaaccattataagctgcaataaacaagttaacaacaacaaaaaaaaaaaaaaaaaaaaaaaaaaaaaaacgttgactaaaaaaaaaaaaaaaaaaaaaaaaaaaaaaaaaaaaaaaaaaaaaaaaaaaaaaaaaaaaaaaaaaaaaa

SEQ ID NO: 11711 - DNA, 5075 bp, synthetic construct
  source 1..5075: mol_type = other DNA
ggtctagttacaactgggcatcgctgcagagatcgcacctcctcgtggtcccgctggtagcccttcgaagggtgactaagtcgatctctgccccaggtacggagccgttgggactcaccagtccaacgtaactcctgcctaaattcggtgaaacaaattcctcggtaaaaagccccatgcctaagagaaaggtgtccagcgccgagggcgctgccaaggaagagcctaaacggagaagcgccagactgagcgccaagccccccgccaaggtggaagccaagcctaagaaggccgccgctaaggacaagagcagcgataagaaagtccagaccaagggcaagcggggcgccaaaggcaaacaggccgaggtggccaaccaggagacaaaggaagatctgcctgctgagaacggcgaaaccaagaccgaggaatctccagcttctgacgaggccggagagaaggaggccaaaagcgacagcggctctgagacacctggaacaagcgagagcgccaccccggaatccgcttcttgcccgaaacctggccccccggtttcagcaggggcaatgagtttggaaagtggactgaccacccactccgttctcgccatcgaacgtggtcccaattcgttggcaaattccggatcagactttgggggggggggtctggggctaccgttacgcctattgagggtatcggtcggcactcagacctcccgctccgactgggtagacctggtgtcctggagccacccaggacccacgtctaagtcccagcaggttgacctggtgtctttatttcctaaacaccgggttgacctgttatccaaaaacgaccaggtagacctggtggctcaatttttaccatctaaatttccccccaatttggcagaaaatgatttggctttgctggtgaacttagagttctacagatcggatttgcatgtgtatgagtgtgttcattttgctgcacattgggagggattaagtggtttgcctgaggtgtatgaacaacttgcaccacaaccgtgtgtgggagaaactttacattctagcctcccacgagacagtgaactgtttgtgcctgaagaggggagcagcgagaaggagagcgaggacgcgccaaaaacatctcctccgacgcctgggaaacatggtttggaacagactggggaggaaaaagtgatggtgactgttcctgacaaaaatccaccttgtccttgctgtggtacccgggtaaactctgtgttgaatctgattgaacatctgaaagtgtcacacgggaaaaggggggtttgttttcggtgtgcaaaatgtggaaaggaaaatagtaactatcacagtgttgtttgtcattttaagaaatgcaggggtccagagacggagaaagccccagctggggagtggatttgtgaggtatgcaacagagattttacaaccaaaattggcctgggacaacacaagagattggcacacccagcagtgagaaatcaggaaaggatcgttgcttcccaaccgaaagaaacatcaaatagaggtgctcacaaaaggtgctggacaaaggaggaggaagaattactaataagactggaggctcagttcgagggaaacaaaaatattaataagcttattgcagaacacataaccaccaaaacagctaagcagatcagtgacaaaaggcgattgctgtccagaaagccagcagaggagccacgtgaggagcctggaacgtgtcatcacaccaggagagcagctgcgagcctgagaacggagcctgagatgagtcatcacgcccaggcagaggacagagataatggacctgggagacgccctctgccaggcagggcagctgccggagggagaacaatggacgagataagacgccaccctgataagggcaacggacagcagagacccaccaagcaaaaatcagaagaacagctgcaggcttactataaaaagacactagaggaacgactttcagctggggcacttaacaccttcccccgagcattcaagcaggtaatggaaggccgggatataaagctagtaatcaatcagacagcgcaggactgcttcggatgcctggaatccataagccaaataagaacggcaacccgagataaaaaggacacggtgacccgggagaaacacccaaagaaaccttttcagaagtggatgaagaagagagcaatcaaaaaaggtaattatcttcggttccagcgtttattttatcttgatagagggaaactggctaaaatcattttagatgatattgaatgcttgtcttgtgacataccactcagtgaaatttattcggtttttaaaacaagatgggaaacaactggtagctttaaaagccttggggactttaaaacttacgggaaggctgacaacactgccttcagagaattaattacggctaaagaaattgagaaaaatgtgcaggaaatgagcaaaggctcggctcccggtccagacgggattactcttggggacgtcgtaaagatggatcccgagttttcccggaccatggagattttcaatttatggttaacaactggtaaaatcccggacatggtgagggggtgcagaaccgttttgattccaaaatcatcagacccggatcgtttgaaagacattaataactggagacctatcacgatcggttccatcttgctgagactgttctccaggattgtaacagctaggctgagcaaagcgtgccccctgaacccaaggcaaagaggctttatcagagcggcgggatgctctgaaaacttaaaactcctgcaaactataatttggtcggccaaaagagaacacagaccactgggtgttgtattcgtggacatcgccaaggcttttgacaccgtaagccaccagcacatcattcatgctttgcagcaaagagaggtggatccccacatcgtcggtctggtgagcaatatgtacgagaacatcagtacgtatatcaccacaaagaggaacacacacacagacaaaatccagatccgggttggagtaaagcagggtgacccgatgtcgccccttttatttaacctggcaatggaccctctattatgcaagctggaagagagtggcaaaggataccaccgaggacagagcagcatcacagcgatggcatttgcagacgatctggttttgctgagcgactcctgggaaaatatgaatacaaatattagcatactggagaccttctgcaatctgaccggactcaaaacacaggggcaaaagtgccacggcttttacatcaagccgacaaaggactcttacaccatcaatgactgcgctgcctggactatcaacggcacacccctgaacatgatcgaccccggcgaatctgagaaatacctcggcctgcagtttgacccgtggattggaatagcaaggtccggtctctccacaaaactagatttttggcttcagcggatcgatcaagcaccacttaaacctctgcagaaaactgatattctcaaaacatacaccatccctcggctgatctacatagctgaccactcagaagtgaaaagcgcactactcgaaacccttgaccagaagatccggacagcggtcaaggaatggcttcacctacctccgtgcacctgcgatgccatcctgtactcgagcacgagagacggcggtttgggcatcaccaaattggcaggactgatccccagcgtgcaggcccgtagactgcatcggatcgcacagtcatctgacgatacgatgaaatgcttcatggaaaaagagaaaatggaacagctgcataagaaattgtggattcaagctggaggggacagagagaacataccctcgatttgggaagcaccaccgtcgagtgaaccaccaaacaacgtgagcacaaattcggaatgggaagcaccgacccagaaagataaatttccaaagccttgcaattggaggaaaaacgaattcaaaaaatggaccaaattggcatcccaaggccgcggaattgtaaattttgaaagagacaaaattagtaaccattggatccaatactacagacgcatacctcacaggaaactcctcactgcactacaactcagggccaacgtttaccccacgagagaatttctagccaggggtagacaagaccaatacatcaaggcgtgtaggcactgcgatgcggacaacgaatcctgcgcccacatcatcggcaactgcccagtgacacaggacgcccgaatcaagaggcacaattacatctgcgaactgcttctcgaggaggcgaagaagaaggactgggtagtgttcaaggaaccgcacataagggattccaacaaggaactgtacaaacctgacctgatatttgtgaaggatggccgtgcacttgtcgtggatgtgacagtacggtatgaagcagccaaatcatcgctggaggaagccgctgcagagaaagtgagaaagtacaaacacctggaaacggaagtaagacatctcacgaatgcaaaggacgttacttttgtgggctttcccctaggagcgcgggggaaatggcaccaagataactttaaacttttgactgagcttggcctctccaaatcgaggcaagtgaaaatggcagagactttttccacagtagcgctcttttcatctgtggacattgtacatatgtttgccagtagggccagaaaatctatggttatgaggaagaagaggaggcagaggaggaggtgataataggctgccttctgcggggcttgccttctggccatgcccttcttctctcccttgcacctgtacctcttggtctttgaataaagcctgagtaggaaggaccggtagacatgataagatacattgatgagtttggacaaaccacaactagaatgcagtgaaaaaaatgctttatttgtgaaatttgtgatgctattgctttatttgtaaccattataagctgcaataaacaagttaacaacaacaaaaaaaaaaaaaaaaaaaaaaaaaaaaaaacgttgactaaaaaaaaaaaaaaaaaaaaaaaaaaaaaaaaaaaaaaaaaaaaaaaaaaaaaaaaaaaaaaaaaaaaaa

SEQ ID NO: 11712 - DNA, 4730 bp, synthetic construct
  source 1..4730: mol_type = other DNA
ggtctagttacaactgggcatcgctgcagagatcgcacctcctcgtggtcccgctggtagcccttcgaagggtgactaagtcgatctctgccccaggtacggagccgttgggactcaccagtccaacgtaactcctgcctaaattcggtgaaacaaattcctcggtaaaaagccccatggcttcttgcccgaaacctggccccccggtttcagcaggggcaatgagtttggaaagtggactgaccacccactccgttctcgccatcgaacgtggtcccaattcgttggcaaattccggatcagactttgggggggggggtctggggctaccgttacgcctattgagggtatcggtcggcactcagacctcccgctccgactgggtagacctggtgtcctggagccacccaggacccacgtctaagtcccagcaggttgacctggtgtctttatttcctaaacaccgggttgacctgttatccaaaaacgaccaggtagacctggtggctcaatttttaccatctaaatttccccccaatttggcagaaaatgatttggctttgctggtgaacttagagttctacagatcggatttgcatgtgtatgagtgtgttcataaggctgcacattgggagggattaagtggtttgcctgaggtgtatgaacaacttgcaccacaaccgtgtgtgggagaaactttacattctagcctcccacgagacagtgaactgtttgtgcctgaagaggggagcagcgagaaggagagcgaggacgcgccaaaaacatctcctccgacgcctgggaaacatggtttggaacagactggggaggaaaaagtgatggtgactgttcctgacaaaaatccaccttgtccttgctgtggtacccgggtaaactctgtgttgaatctgattgaacatctgaaagtgtcacacgggaaaaggggggtttgttttcggtgtgcaaaatgtggaaaggaaaatagtaactatcacagtgttgtttgtcattttaagaaatgcaggggtccagagacggagaaagccccagctggggagtggatttgtgaggtatgcaacagagattttacaaccaaaattggcctgggacaacacaagagattggcacacccagcagtgagaaatcaggaaaggatcgttgcttcccaaccgaaagaaacatcaaatagaggtgctcacaaaaggtgctggacaaaggaggaggaagaattactaataagactggaggctcagttcgagggaaacaaaaatattaataagcttattgcagaacacataaccaccaaaacagctaagcagatcagtgacaaaaggcgattgctgtccagaaagccagcagaggagccacgtgaggagcctggaacgtgtcatcacaccaggagagcagctgcgagcctgagaacggagcctgagatgagtcatcacgcccaggcagaggacagagataatggacctgggagacgccctctgccaggcagggcagctgccggagggagaacaatggacgagataagacgccaccctgataagggcaacggacagcagagacccaccaagcaaaaatcagaagaacagctgcaggcttactataaaaagacactagaggaacgactttcagctggggcacttaacaccttcccccgagcattcaagcaggtaatggaaggccgggatataaagctagtaatcaatcagacagcgcaggactgcttcggatgcctggaatccataagccaaataagaacggcaacccgagataaaaaggacacggtgacccgggagaaacacccaaagaaaccttttcagaagtggatgaagaagagagcaatcaaaaaaggtaattatcttcggttccagcgtttattttatcttgatagagggaaactggctaaaatcattttagatgatattgaatgcttgtcttgtgacataccactcagtgaaatttattcggtttttaaaacaagatgggaaacaactggtagctttaaaagccttggggactttaaaacttacgggaaggctgacaacactgccttcagagaattaattacggctaaagaaattgagaaaaatgtgcaggaaatgagcaaaggctcggctcccggtccagacgggattactcttggggacgtcgtaaagatggatcccgagttttcccggaccatggagattttcaatttatggttaacaactggtaaaatcccggacatggtgagggggtgcagaaccgttttgattccaaaatcatcaaagccggatcgtttgaaagacattaataactggagacctatcacgatcggttccatcttgctgagactgttctccaggattgtaacagctaggctgagcaaagcgtgccccctgaacccaaggcaaagaggctttatcagagcggcgggatgctctgaaaacttaaaactcctgcaaactataatttggtcggccaaaagagaacacagaccactgggtgttgtattcgtggacatcgccaaggcttttgacaccgtaagccaccagcacatcattcatgctttgcagcaaagagaggtggatccccacatcgtcggtctggtgagcaatatgtacgagaacatcagtacgtatatcaccacaaagaggaacacacacacagacaaaatccagatccgggttggagtaaagcagggtgacccgatgtcgccccttttatttaacctggcaatggaccctctattatgcaagctggaagagagtggcaaaggataccaccgaggacagagcagcatcacagcgatggcatttgcagacgatctggttttgctgagcgactcctgggaaaatatgaatacaaatattagcatactggagaccttctgcaatctgaccggactcaaaacacaggggcaaaagtgccacggcttttacatcaagccgacaaaggactcttacaccatcaatgactgcgctgcctggactatcaacggcacacccctgaacatgatcgaccccggcgaatctgagaaatacctcggcctgcagtttgacccgtggattggaatagcaaggtccggtctctccacaaaactagatttttggcttcagcggatcgatcaagcaccacttaaacctctgcagaaaactgatattctcaaaacatacaccatccctcggctgatctacatagctgaccactcagaagtgaaaagcgcactactcgaaacccttgaccagaagatccggacagcggtcaaggaatggcttcacctacctccgtgcacctgcgatgccatcctgtactcgagcacgagagacggcggtttgggcatcaccaaattggcaggactgatccccagcgtgcaggcccgtagactgcatcggatcgcacagtcatctgacgatacgatgaaatgcttcatggaaaaagagaaaatggaacagctgcataagaaattgtggattcaagctggaggggacagagagaacataccctcgatttgggaagcaccaccgtcgagtgaaccaccaaacaacgtgagcacaaattcggaatgggaagcaccgacccagaaagataaatttccaaagccttgcaattggaggaaaaacgaattcaaaaaatggaccaaattggcatcccaaggccgcggaattgtaaattttgaaagagacaaaattagtaaccattggatccaatactacagacgcatacctcacaggaaactcctcactgcactacaactcagggccaacgtttaccccacgagagaatttctagccaggggtagacaagaccaatacatcaaggcgtgtaggcactgcgatgcggacaacgaatcctgcgcccacatcatcggcaactgcccagtgacacaggacgcccgaatcaagaggcacaattacatctgcgaactgcttctcgaggaggcgaagaagaaggactgggtagtgttcaaggaaccgcacataagggattccaacaaggaactgtacaaacctgacctgatatttgtgaaggatgcccgtgcacttgtcgtggatgtgacagtacggtatgaagcagccaaatcatcgctggaggaagccgctgcagagaaagtgagaaagtacaaacacctggaaacggaagtaagacatctcacgaatgcaaaggacgttacttttgtgggctttcccctaggagcgcgggggaaatggcaccaagataactttaaacttttgactgagcttggcctctccaaatcgaggcaagtgaaaatggcagagactttttccacagtagcgctcttttcatctgtggacattgtacatatgtttgccagtagggccagaaaatctatggttatgaggaagaagaggaggcagaggaggaggtgataataggctgccttctgcggggcttgccttctggccatgcccttcttctctcccttgcacctgtacctcttggtctttgaataaagcctgagtaggaaggaccggtagacatgataagatacattgatgagtttggacaaaccacaactagaatgcagtgaaaaaaatgctttatttgtgaaatttgtgatgctattgctttatttgtaaccattataagctgcaataaacaagttaacaacaacaaaaaaaaaaaaaaaaaaaaaaaaaaaaaaacgttgactaaaaaaaaaaaaaaaaaaaaaaaaaaaaaaaaaaaaaaaaaaaaaaaaaaaaaaaaaaaaaaaaaaaaaa

SEQ ID NO: 11713 - DNA, 4439 bp, synthetic construct; identical to SEQ ID NO: 11293
  source 1..4439: mol_type = other DNA

SEQ ID NO: 11714 - DNA, 4439 bp, synthetic construct
  source 1..4439: mol_type = other DNA
gaaataagagagaaaagaagagtaagaagaaatataagagaattcgccaccatggcttcttgcccgaaacctggccccccggtttcagcaggggcaatgagtttggaaagtggactgaccacccactccgttctcgccatcgaacgtggtcccaattcgttggcaaattccggatcagactttgggggggggggtctggggctaccgttacgcctattgagggtatcggtcggcactcagacctcccgctccgactgggtagacctggtgtcctggagccacccaggacccacgtctaagtcccagcaggttgacctggtgtctttatttcctaaacaccgggttgacctgttatccaaaaacgaccaggtagacctggtggctcaatttttaccatctaaatttccccccaatttggcagaaaatgatttggctttgctggtgaacttagagttctacagatcggatttgcatgtgtatgagtgtgttcataaggctgcacattgggagggattaagtggtttgcctgaggtgtatgaacaacttgcaccacaaccgtgtgtgggagaaactttacattctagcctcccacgagacagtgaactgtttgtgcctgaagaggggagcagcgagaaggagagcgaggacgcgccaaaaacatctcctccgacgcctgggaaacatggtttggaacagactggggaggaaaaagtgatggtgactgttcctgacaaaaatccaccttgtccttgctgtggtacccgggtaaactctgtgttgaatctgattgaacatctgaaagtgtcacacgggaaaaggggggtttgttttcggtgtgcaaaatgtggaaaggaaaatagtaactatcacagtgttgtttgtcattttaagaaatgcaggggtccagagacggagaaagccccagctggggagtggatttgtgaggtatgcaacagagattttacaaccaaaattggcctgggacaacacaagagattggcacacccagcagtgagaaatcaggaaaggatcgttgcttcccaaccgaaagaaacatcaaatagaggtgctcacaaaaggtgctggacaaaggaggaggaagaattactaataagactggaggctcagttcgagggaaacaaaaatattaataagcttattgcagaacacataaccaccaaaacagctaagcagatcagtgacaaaaggcgattgctgtccagaaagccagcagaggagccacgtatggagcctggaacgtgtcatcacaccaggagagcagctgcgagcctgagaacggagcctgagatgagtcatcacgcccaggcagaggacagagataatggacctgggagacgccctctgccaggcagggcagctgccggagggagaacaatggacgagataagacgccaccctgataagggcaacggacagcagagacccaccaagcaaaaatcagaagaacagctgcaggcttactataaaaagacactagaggaacgactttcagctggggcacttaacaccttcccccgagcattcaagcaggtaatggaaggccgggatataaagctagtaatcaatcagacagcgcaggactgcttcggatgcctggaatccataagccaaataagaacggcaacccgagataaaaaggacacggtgacccgggagaaacacccaaagaaaccttttcagaagtggatgaagaagagagcaatcaaaaaaggtaattatcttcggttccagcgtttattttatcttgatagagggaaactggctaaaatcattttagatgatattgaatgcttgtcttgtgacataccactcagtgaaatttattcggtttttaaaacaagatgggaaacaactggtagctttaaaagccttggggactttaaaacttacgggaaggctgacaacactgccttcagagaattaattacggctaaagaaattgagaaaaatgtgcaggaaatgagcaaaggctcggctcccggtccagacgggattactcttggggacgtcgtaaagatggatcccgagttttcccggaccatggagattttcaatttatggttaacaactggtaaaatcccggacatggtgagggggtgcagaaccgttttgattccaaaatcatcagacccggatcgtttgaaagacattaataactggagacctatcacgatcggttccatcttgctgagactgttctccaggattgtaacagctaggctgagcaaagcgtgccccctgaacccaaggcaaagaggctttatcagagcggcgggatgctctgaaaacttaaaactcctgcaaactataatttggtcggccaaaagagaacacagaccactgggtgttgtattcgtggacatcgccaaggcttttgacaccgtaagccaccagcacatcattcatgctttgcagcaaagagaggtggatccccacatcgtcggtctggtgagcaatatgtacgagaacatcagtacgtatatcaccacaaagaggaacacacacacagacaaaatccagatccgggttggagtaaagcagggtgacccgatgtcgccccttttatttaacctggcaatggaccctctattatgcaagctggaagagagtggcaaaggataccaccgaggacagagcagcatcacagcgatggcatttgcagacgatctggttttgctgagcgactcctgggaaaatatgaatacaaatattagcatactggagaccttctgcaatctgaccggactcaaaacacaggggcaaaagtgccacggcttttacatcaagccgacaaagaagtcttacaccatcaatgactgcgctgcctggactatcaacggcacacccctgaacatgatcgaccccggcgaatctgagaaatacctcggcctgcagtttgacccgtggattggaatagcaaggtccggtctctccacaaaactagatttttggcttcagcggatcgatcaagcaccacttaaacctctgcagaaaactgatattctcaaaacatacaccatccctcggctgatctacatagctgaccactcagaagtgaaaagcgcactactcgaaacccttgaccagaagatccggacagcggtcaaggaatggcttcacctacctccgtgcacctgcgatgccatcctgtactcgagcacgagagacggcggtttgggcatcaccaaattggcaggactgatccccagcgtgcaggcccgtagactgcatcggatcgcacagtcatctgacgatacgatgaaatgcttcatggaaaaagagaaaatggaacagctgcataagaaattgtggattcaagctggaggggacagagagaacataccctcgatttgggaagcaccaccgtcgagtgaaccaccaaacaacgtgagcacaaattcggaatgggaagcaccgacccagaaagataaatttccaaagccttgcaattggaggaaaaacgaattcaaaaaatggaccaaattggcatcccaaggccgcggaattgtaaattttgaaagagacaaaattagtaaccattggatccaatactacagacgcatacctcacaggaaactcctcactgcactacaactcagggccaacgtttaccccacgagagaatttctagccaggggtagacaagaccaatacatcaaggcgtgtaggcactgcgatgcggacaacgaatcctgcgcccacatcatcggcaactgcccagtgacacaggacgcccgaatcaagaggcacaataagatctgcgaactgcttctcgaggaggcgaagaagaaggactgggtagtgttcaaggaaccgcacataagggattccaacaaggaactgtacaaacctgacctgatatttgtgaaggatgggcgtgcacttgtcgtggatgtgacagtacggtatgaagcagccaaatcatcgctggaggaagccgctgcagagaaagtgagaaagtacaaacacctggaaacggaagtaagacatctcacgaatgcaaaggacgttacttttgtgggctttcccctaggagcgcgggggaaatggcaccaagataactttaaacttttgactgagcttggcctctccaaatcgaggcaagtgaaaatggcagagactttttccacagtagcgctcttttcatctgtggacattgtacatatgtttgccagtagggccagaaaatctatggttatgtgataataggctgccttctgcggggcttgccttctggccatgcccttcttctctcccttgcacctgtacctcttggtctttgaataaagcctgagtaggaaggaccggtaaaaaaaaaaaaaaaaaaaaaaaaaaaaaaacgttgactaaaaaaaaaaaaaaaaaaaaaaaaaaaaaaaaaaaaaaaaaaaaaaaaaaaaaaaaaaaaaaaaaaaaaa

SEQ ID NO: 11715 - DNA, 4235 bp, synthetic construct
  source 1..4235: mol_type = other DNA
gaaataagagagaaaagaagagtaagaagaaatataagagaattcgccaccatgcctaagagaaaggtgtccagcgccgagggcgctgccaaggaagagcctaaacggagaagcgccagactgagcgccaagccccccgccaaggtggaagccaagcctaagaaggccgccgctaaggacaagagcagcgataagaaagtccagaccaagggcaagcggggcgccaaaggcaaacaggccgaggtggccaaccaggagacaaaggaagatctgcctgctgagaacggcgaaaccaagaccgaggaatctccagcttctgacgaggccggagagaaggaggccaaaagcgacagcggctctgagacacctggaacaagcgagagcgccaccccggaatccctgtttgtgcctgaagaggggagcagcgagaaggagagcgaggacgcgccaaaaacatctcctccgacgcctgggaaacatggtttggaacagactggggaggaaaaagtgatggtgactgttcctgacaaaaatccaccttgtccttgctgtggtacccgggtaaactctgtgttgaatctgattgaacatctgaaagtgtcacacgggaaaaggggggtttgttttcggtgtgcaaaatgtggaaaggaaaatagtaactatcacagtgttgtttgtcattttaagaaatgcaggggtccagagacggagaaagccccagctggggagtggatttgtgaggtatgcaacagagattttacaaccaaaattggcctgggacaacacaagagattggcacacccagcagtgagaaatcaggaaaggatcgttgcttcccaaccgaaagaaacatcaaatagaggtgctcacaaaaggtgctggacaaaggaggaggaagaattactaataagactggaggctcagttcgagggaaacaaaaatattaataagcttattgcagaacacataaccaccaaaacagctaagcagatcagtgacaaaaggcgattgctgtccagaaagccagcagaggagccacgtatggagcctggaacgtgtcatcacaccaggagagcagctgcgagcctgagaacggagcctgagatgagtcatcacgcccaggcagaggacagagataatggacctgggagacgccctctgccaggcagggcagctgccggagggagaacaatggacgagataagacgccaccctgataagggcaacggacagcagagacccaccaagcaaaaatcagaagaacagctgcaggcttactataaaaagacactagaggaacgactttcagctggggcacttaacaccttcccccgagcattcaagcaggtaatggaaggccgggatataaagctagtaatcaatcagacagcgcaggactgcttcggatgcctggaatccataagccaaataagaacggcaacccgagataaaaaggacacggtgacccggaagaaacacccaaagaaaccttttcagaagtggatgaagaagagagcaatcaaaaaaggtaattatcttcggttccagcgtttattttatcttgatagagggaaactggctagaatcattttagatgatattgaatgcttgtcttgtgacataccactcagtgaaatttattcggtttttaaaacaagatgggaaacaactggtagctttaaaagccttggggactttaaaacttacgggaaggctgacaacactgccttcagagaattaattacggctaaagaaattgagaaaaatgtgcaggaaatgagcaaaggctcggctcccggtccagacgggattactcttggggacgtcgtaaagatggatcccgagttttcccggaccatggagattttcaatttatggttaacaactggtaaaatcccggacatggtgagggggtgcagaaccgttttgattccaaaatcatcaaagccggatcgtttgaaagacattaataactggagacctatcacgatcggttccatcttgctgagactgttctccaggattgtaacagctaggctgagcaaagcgtgccccctgaacccaaggcaaagaggctttatcagagcggcgggatgctctgaaaacttaaaactcctgcaaactataatttggtcggccaaaagagaacacagaccactgggtgttgtattcgtggacatcgccaaggcttttgacaccgtaagccaccagcacatcattcatgctttgcagcaaagagaggtggatccccacatcgtcggtctggtgagcaatatgtacgagaacatcagtacgtatatcaccacaaagaggaacacacacacagacaaaatccagatccgggttggagtaaagcagggtgacccgatgtcgccccttttatttaacctggcaatggaccctctattatgcaagctggaagagagtggcaaaggataccaccgaggacagagcagcatcacagcgatggcatttgcagacgatctggttttgctgagcgactcctgggaaaatatgaatacaaatattagcatactggagaccttctgcaatctgaccggactcaaaacacaggggcaaaagtgccacggcttttacatcaagccgacaaagaagtcttacaccatcaatgactgcgctgcctggactatcaacggcacacccctgaacatgatcgaccccggcgaatctgagaaatacctcggcctgcagtttgacccgtggattggaatagcaaggtccggtctctccacaaaactagatttttggcttcagcggatcgatcaagcaccacttaaacctctgcagaaaactgatattctcaaaacatacaccatccctcggctgatctacatagctgaccactcagaagtgaaaagcgcactactcgaaacccttgaccagaagatccggacagcggtcaaggaatggcttcacctacctccgtgcacctgcgatgccatcctgtactcgagcacgagagacggcggtttgggcatcaccaaattggcaggactgatccccagcgtgcaggcccgtagactgcatcggatcgcacagtcatctgacgatacgatgaaatgcttcatggaaaaagagaaaatggaacagctgcataagaaattgtggattcaagctggaggggacagagagaacataccctcgatttgggaagcaccaccgtcgagtgaaccaccaaacaacgtgagcacaaattcggaatgggaagcaccgacccagaaagataaatttccaaagccttgcaattggaggaaaaacgaattcaaaaaatggaccaaattggcatcccaaggccgcggaattgtaaattttgaaagagacaaaattagtaaccattggatccaatactacagacgcatacctcacaggaaactcctcactgcactacaactcagggccaacgtttaccccacgagagaatttctagccaggggtagacaagaccaatacatcaaggcgtgtaggcactgcgatgcggacaacgaatcctgcgcccacatcatcggcaactgcccagtgacacaggacgcccgaatcaagaggcacaattacatctgcgaactgcttctcgaggaggcgaagaagaaggactgggtagtgttcaaggaaccgcacataagggattccaacaaggaactgtacaaacctgacctgatatttgtgaaggatgggcgtgcacttgtcgtggatgtgacagtacggtatgaagcagccaaatcatcgctggaggaagccgctgcagagaaagtgagaaagtacaaacacctggaaacggaagtaagacatctcacgaatgcaaaggacgttacttttgtgggctttcccctaggagcgcgggggaaatggcaccaagataactttaaacttttgactgagcttggcctctccaaatcgaggcaagtgaaaatggcagagactttttccacagtagcgctcttttcatctgtggacattgtacatatgtttgccagtagggccagaaaatctatggttatgtgataataggctgccttctgcggggcttgccttctggccatgcccttcttctctcccttgcacctgtacctcttggtctttgaataaagcctgagtaggaaggaccggtaaaaaaaaaaaaaaaaaaaaaaaaaaaaaaacgttgactaaaaaaaaaaaaaaaaaaaaaaaaaaaaaaaaaaaaaaaaaaaaaaaaaaaaaaaaaaaaaaaaaaaaaa

SEQ ID NO: 11716 - DNA, 4995 bp, synthetic construct
  source 1..4995: mol_type = other DNA
ggggggacacggaaagagcctccccgaagattgagtgaattcagtcgggcgtcccctgggcaacgtttcttgtaagcggccgatctttccaccccaaaagcattggatgaatggacgagtaccagcggagcctgagccggcctctgctgacaatcatgtctatcaacatcgagggcctgtcgctggccaaggaagagctgctggccaagatgagcgaggatatcagctgtgacattctgtgtatccaggaaacacaccgcgacatcaccatgcggcggcctaagatcctaggcatgcagctggcagttgagagaccccaccggcagtacggctctgctatcttcgtgcggagcggagtggctatcagcgccaccagcctgacagaggtgaacaatatcgagatcctgtctgtggaattagacagctgcacagtgtccagcctgtacaagcctccaggcgccgacttttacttcacacctcctacaagctgccacaaccacgaggctcatttcgtggtgggcgacttcaacagccacagctgtgtgtggggctacgacgaggatgacagaaacggcgaagccgtgctgacctgggccgataattctagaatgagcctgctccatgatagcaagctgcccccttcttttaacagcggcagatggaaacggggctacaaccctgacctgatcttcgtgaaggaaagcatcagccaccagtgcaccaagcgggtgctgaaccctatcccgaatacccagcacagaccaatctgctgcgtggcttatgccgctgtgcgtcccaagtccgtgccattcagacggagatacaacttcaacaaggccaattggaccaagttcacggaaaccctggaagctgctatatccgacatcgagcctagcatcgagaactacgacctcttcgtggaggccgtgaagagaagcagcagactgtctatccctcggggctgcaggacctcatatctgcctggcctgaacgaagagagcctgaaccagctgcaggagtacctgcgcctgttccaagagaacccatacagcgatggcaccatcgccgccggccagaagctgtccaccgccctggctaacgccaaaaaggatagatggattgagctgcttgagaacctggatatgagcaagagcagcagaaaggcctggcagctgctgagacggctggacagcgaccccctggtgaaccccggacacgccaacgtgacacccgatcagattgcccaccagctgatccagaatggcaagaccaattgcagcagaatcaagatgaagataaacagagtgcccgagctggagacccaccagctctctagtcctctgaacctgaaggaactgagagaggccatcaagcggtgcaagaccggcaaggcccctggactggacgatctgatgatggaacagatcaagcacctgggacctaaagctgagaactggctgctgaaattttacaaccagtgcctggcacataaacagatccctagagcctggcggaaaaccaagatcatcgccatcctgaagcctggtaaggacgccagcaacgcccggaactaccggcccatctccctcctgtgccacctgtacaaggtctatgagcgaatgctgctgaacagactgggccctgtgatcgaacctaaacttattgcccagcaggccggatttagaccaggaaagaactgcaccggccagatcctgcacctgaccgaacacatcgaggaaggatacgagaagggctgcatcaccggcacagtgttcgtcgacctgacagctgcctacgacaccgtgcagcaccggaagatgctgcacaaggtataccacatcacaagagacttcgacttcaccaagacggtgcagaccctcctcgagaatagaagcttttacgtggaattccagggacagaagtcacggtggagaaggcagaaaaacggattgcctcagggcagcgtgctggcccctaccctgtttaacatctttacaaacgaccagccccagcctccactgaccaagtccttcatctacgccgacgatctgggcctgaccacccaagccaaggacttcgagacagtggaaaagcagctgacaaacgccctgaaagacctgagcagctactacaaggaaaatcacctgaaaccgaaccctgccaaaacccaggtgtgcgccttccacctgagaaacagagaggccaaccggaagctgaaggtgacctgggagggccaggagcttgagcactgcttccaccctaaatacctgggcgtcacactggaccggacactgacctacagaaaacactgcatgaacaccaaacacaaggtggccgccagaaacaacatcctgagaaagctaactggcagcgcttggggcgctgatccccaagtgatcagaacctctgccctggccctgagcttcagcacagccgaatatgcctgccctgtttggcacaagtctgctcacgccaagcaagtggacatcgccctgaatgaaacatgcagaatcatcacgggatgtctgaagcccacccctgttgataagctgtacaagttggctggcatcgccccgccagacgtgcggcgggaggtcgccgccaatggcgagagaaagaaggtggagcactgtgagtcccaccctctccacgactaccaccccccccctacaagactgaagtctagaaagggcttcatgagaaccaccacccctctggatgtgcctccagccacagccagagtgtctctgtgggctgccaagcccggcaacagcaactggatggcccctcaagagggcctgccccctggcgccaatcaagagtgggccacctggaagagcctgaacagactgaggtccggcgtgggccggtctaaggacaatctggccagatggcactacctggaagaaagcagcaccctgtgcgactgcggcgctgaacagaccacccagcatatgtacgcctgtcctcagtgtcccgcttcttgtacagaggaagagctgttcaaggccacagataacgccgtggccgtggccagattctggagcaagaccatctaatcgacggatcgatccgaacaaacgacccaacacccgtgcgttttattctgtctttttattgccgatcccctcagaagaactcgtcaagaaggcgatagaaggcgatgcgctgcgaatcgggagcggcgataccgtaaagcacgaggaagcggtcagcccattcgccgccaagctcttcagcaatatcacgggtagccaacgctatgtcctgatagcggtcggccgcttacttgtacagctcgtccatgccgagagtgatcccggcggcggtcacgaactccagcaggaccatgtgatcgcgcttctcgttggggtctttgctcagggcggactgggtgctcaggtagtggttgtcgggcagcagcacggggccgtcgccgatgggggtgttctgctggtagtggtcggcgagctgcacgctgccgtcctcgatgttgtggcggatcttgaagttcaccttgatgccgttcttctgcttgtcggccatgatatagacgttgtggctgttgtagttgtactccagcttgtgccccaggatgttgccgtcctccttgaagtcgatgcccttcagctcgatgcggttcaccagggtgtcgccctcgaacttcacctcggcgcgggtcttgtagttgccgtcgtccttgaagaagatggtgcgctcctggacgtagccttcgggcatggcggacttgaagaagtcgtgctgcttcatgtggtcggggtagcggctgaagcactgcacgccgtaggtcagggtggtcacgagggtgggccagggcacgggcagcttgccggtggtgcagatgaacttcagggtcagcttgccgtaggtggcatcgccctcgccctcgccggacacgctgaacttgtggccgtttacgtcgccgtccagctcgaccaggatgggcaccaccccggtgaacagctcctcgcccttgctcaccatggtggcgaattcgaagcttgagctcgagatctgagtccggtagcgctagcggatctgacggttcactaaaccagctctgcttatatagacctcccaccgtacacgcctaccgcccatttgcgtcaatggggcggagttgttacgacattttggaaagtcccgttgattttggtgccaaaacaaactcccattgacgtcaatggggtggagacttggaaatccccgtgagtcaaaccgctatccacgcccattgatgtactgccaaaaccgcatcaccatggtaatagcgatgactaatacgtagatgtactgccaagtaggaaagtcccataaggtcatgtactgggcataatgccaggcgggccatttaccgtcattgacgtcaatagggggcgtacttggcatatgatacacttgatgtactgccaagtgggcagtttaccgtaaatactccacccattgacgtcaatggaaagtccctattggcgttactatgggaacatacgtcattattgacgtcaatgggcgggggtcgttgggcggtcagccaggcgggccatttaccgtaagttatgtaacgcggaactccatatatgggctatgaactaatgaccccgtaattgattactattaaattcctgcagtagttgcttgtgatttcttttcttttttattttatttccattatttgaaatgtatttgttgtagcaatgcttttgacacgaaataaataaaaccggtagacatgataagatacattgatgagtttggacaaaccacaactagaatgcagtgaaaaaaatgctttatttgtgaaatttgtgatgctattgctttatttgtaaccattataagctgcaataaacaagttaacaacaacaaaaaaaaaaaaaaaaaaaaaaaaaaaaaaaacgttgactaaaaaaaaaaaaaaaaaaaaaaaaaaaaaaaaaaaaaaaaaaaaaaaaaaaaaaaaaaaaaaaaaaaaaa

SEQ ID NO: 11717-11724 - skipped (8 entries)

SEQ ID NO: 11725 - DNA, 4439 bp, synthetic construct
  source 1..4439: mol_type = other DNA
gaaataagagagaaaagaagagtaagaagaaatataagagaattcgccaccatggcttcttgcccgaaacctggccccccggtttcagcaggggcaatgagtttggaaagtggactgaccacccactccgttctcgccatcgaacgtggtcccaattcgttggcaaattccggatcagactttgggggggggggtctggggctaccgttacgcctattgagggtatcggtcggcactcagacctcccgctccgactgggtagacctggtgtcctggagccacccaggacccacgtctaagtcccagcaggttgacctggtgtctttatttcctaaacaccgggttgacctgttatccaaaaacgaccaggtagacctggtggctcaatttttaccatctaaatttccccccaatttggcagaaaatgatttggctttgctggtgaacttagagttctacagatcggatttgcatgtgtatgagtgtgttcataaggctgcacattgggagggattaagtggtttgcctgaggtgtatgaacaacttgcaccacaaccgtgtgtgggagaaactttacattctagcctcccacgagacagtgaactgtttgtgcctgaagaggggagcagcgagaaggagagcgaggacgcgccaaaaacatctcctccgacgcctgggaaacatggtttggaacagactggggaggaaaaagtgatggtgactgttcctgacaaaaatccaccttgtccttgctgtggtacccgggtaaactctgtgttgaatctgattgaacatctgaaagtgtcacacgggaaaaggggggtttgttttcggtgtgcaaaatgtggaaaggaaaatagtaactatcacagtgttgtttgtcattttaagaaatgcaggggtccagagacggagaaagccccagctggggagtggatttgtgaggtatgcaacagagattttacaaccaaaattggcctgggacaacacaagagattggcacacccagcagtgagaaatcaggaaaggatcgttgcttcccaaccgaaagaaacatcaaatagaggtgctcacaaaaggtgctggacaaaggaggaggaagaattactaataagactggaggctcagttcgagggaaacaaaaatattaataagcttattgcagaacacataaccaccaaaacagctaagcagatcagtgacaaaaggcgattgctgtccagaaagccagcagaggagccacgtgaggagcctggaacgtgtcatcacaccaggagagcagctgcgagcctgagaacggagcctgagatgagtcatcacgcccaggcagaggacagagataatggacctgggagacgccctctgccaggcagggcagctgccggagggagaacaatggacgagataagacgccaccctgataagggcaacggacagcagagacccaccaagcaaaaatcagaagaacagctgcaggcttactataaaaagacactagaggaacgactttcagctggggcacttaacaccttcccccgagcattcaagcaggtaatggaaggccgggatataaagctagtaatcaatcagacagcgcaggactgcttcggatgcctggaatccataagccaaataagaacggcaacccgagataaaaaggacacggtgacccgggagaaacacccaaagaaaccttttcagaagtggatgaagaagagagcaatcaaaaaaggtaattatcttcggttccagcgtttattttatcttgatagagggaaactggctaaaatcattttagatgatattgaatgcttgtcttgtgacataccactcagtgaaatttattcggtttttaaaacaagatgggaaacaactggtagctttaaaagccttggggactttaaaacttacgggaaggctgacaacactgccttcagagaattaattacggctaaagaaattgagaaaaatgtgcaggaaatgagcaaaggctcggctcccggtccagacgggattactcttggggacgtcaagaagatggatcccgagttttcccggaccatggagattttcaatttatggttaacaactggtaaaatcccggacatggtgagggggtgcagaaccgttttgattccaaaatcatcaaagccggatcgtttgaaagacattaataactggagacctatcacgatcggttccatcttgctgagactgttctccaggattgtaacagctaggctgagcaaagcgtgccccctgaacccaaggcaaagaggctttatcagagcggcgggatgctctgaaaacttaaaactcctgcaaactataatttggtcggccaaaagagaacacagaccactgggtgttgtattcgtggacatcgccaaggcttttgacaccgtaagccaccagcacatcattcatgctttgcagcaaagagaggtggatccccacatcgtcggtctggtgagcaatatgtacgagaacatcagtacgtatatcaccacaaagaggaacacacacacagacaaaatccagatccgggttggagtaaagcagggtgacccgatgtcgccccttttatttaacctggcaatggaccctctattatgcaagctggaagagagtggcaaaggataccaccgaggacagagcagcatcacagcgatggcatttgcagacgatctggttttgctgagcgactcctgggaaaatatgaatacaaatattagcatactggagaccttctgcaatctgaccggactcaaaacacaggggcaaaagtgccacggcttttacatcaagccgacaaaggactcttacaccatcaatgactgcgctgcctggactatcaacggcacacccctgaacatgatcgaccccggcgaatctgagaaatacctcggcctgcagtttgacccgtggattggaatagcaaggtccggtctctccacaaaactagatttttggcttcagcggatcgatcaagcaccacttaaacctctgcagaaaactgatattctcaaaacatacaccatccctcggctgatctacatagctgaccactcagaagtgaaaagcgcactactcgaaacccttgaccagaagatccggacagcggtcaaggaatggcttcacctacctccgtgcacctgcgatgccatcctgtactcgagcacgagagacggcggtttgggcatcaccaaattggcaggactgatccccagcgtgcaggcccgtagactgcatcggatcgcacagtcatctgacgatacgatgaaatgcttcatggaaaaagagaaaatggaacagctgcataagaaattgtggattcaagctggaggggacagagagaacataccctcgatttgggaagcaccaccgtcgagtgaaccaccaaacaacgtgagcacaaattcggaatgggaagcaccgacccagaaagataaatttccaaagccttgcaattggaggaaaaacgaattcaaaaaatggaccaaattggcatcccaaggccgcggaattgtaaattttgaaagagacaaaattagtaaccattggatccaatactacagacgcatacctcacaggaaactcctcactgcactacaactcagggccaacgtttaccccacgagagaatttctagccaggggtagacaagaccaatacatcaaggcgtgtaggcactgcgatgcggacaacgaatcctgcgcccacatcatcggcaactgcccagtgacacaggacgcccgaatcaagaggcacaattacatctgcgaactgcttctcgaggaggcgaagaagaaggactgggtagtgttcaaggaaccgcacataagggattccaacaaggaactgtacaaacctgacctgatatttgtgaaggatgggcgtgcacttgtcgtggatgtgacagtacggtatgaagcagccaaatcatcgctggaggaagccgctgcagagaaagtgagaaagtacaaacacctggaaacggaagtaagacatctcacgaatgcaaaggacgttacttttgtgggctttcccctaggagcgcgggggaaatggcaccaagataactttaaacttttgactgagcttggcctctccaaatcgaggcaagtgaaaatggcagagactttttccacagtagcgctcttttcatctgtggacattgtacatatgtttgccagtagggccagaaaatctatggttatgtgataataggctgccttctgcggggcttgccttctggccatgcccttcttctctcccttgcacctgtacctcttggtctttgaataaagcctgagtaggaaggaccggtaaaaaaaaaaaaaaaaaaaaaaaaaaaaaaacgttgactaaaaaaaaaaaaaaaaaaaaaaaaaaaaaaaaaaaaaaaaaaaaaaaaaaaaaaaaaaaaaaaaaaaaaa

SEQ ID NO: 11726 - DNA, 4439 bp, synthetic construct
  source 1..4439: mol_type = other DNA
gaaataagagagaaaagaagagtaagaagaaatataagagaattcgccaccatggcttcttgcccgaaacctggccccccggtttcagcaggggcaatgagtttggaaagtggactgaccacccactccgttctcgccatcgaacgtggtcccaattcgttggcaaattccggatcagactttgggggggggggtctggggctaccgttacgcctattgagggtatcggtcggcactcagacctcccgctccgactgggtagacctggtgtcctggagccacccaggacccacgtctaagtcccagcaggttgacctggtgtctttatttcctaaacaccgggttgacctgttatccaaaaacgaccaggtagacctggtggctcaatttttaccatctaaatttccccccaatttggcagaaaatgatttggctttgctggtgaacttagagttctacagatcggatttgcatgtgtatgagtgtgttcataaggctgcacattgggagggattaagtggtttgcctgaggtgtatgaacaacttgcaccacaaccgtgtgtgggagaaactttacattctagcctcccacgagacagtgaactgtttgtgcctgaagaggggagcagcgagaaggagagcgaggacgcgccaaaaacatctcctccgacgcctgggaaacatggtttggaacagactggggaggaaaaagtgatggtgactgttcctgacaaaaatccaccttgtccttgctgtggtacccgggtaaactctgtgttgaatctgattgaacatctgaaagtgtcacacgggaaaaggggggtttgttttcggtgtgcaaaatgtggaaaggaaaatagtaactatcacagtgttgtttgtcattttaagaaatgcaggggtccagagacggagaaagccccagctggggagtggatttgtgaggtatgcaacagagattttacaaccaaaattggcctgggacaacacaagagattggcacacccagcagtgagaaatcaggaaaggatcgttgcttcccaaccgaaagaaacatcaaatagaggtgctcacaaaaggtgctggacaaaggaggaggaagaattactaataagactggaggctcagttcgagggaaacaaaaatattaataagcttattgcagaacacataaccaccaaaacagctaagcagatcagtgacaaaaggcgattgctgtccagaaagccagcagaggagccacgtgaggagcctggaacgtgtcatcacaccaggagagcagctgcgagcctgagaacggagcctgagatgagtcatcacgcccaggcagaggacagagataatggacctgggagacgccctctgccaggcagggcagctgccggagggagaacaatggacgagataagacgccaccctgataagggcaacggacagcagagacccaccaagcaaaaatcagaagaacagctgcaggcttactataaaaagacactagaggaacgactttcagctggggcacttaacaccttcccccgagcattcaagcaggtaatggaaggccgggatataaagctagtaatcaatcagacagcgcaggactacttcggatgcctggaatccataagccaaataagaacggcaacccgagataaaaaggacacggtgacccgggagaaacacccaaagaaaccttttcagaagtggatgaagaagagagcaatcaaaaaaggtaattatcttcggttccagcgtttattttatcttgatagagggaaactggctaaaatcattttagatgatattgaatgcttgtcttgtgacataccactcagtgaaatttattcggtttttaaaacaagatgggaaacaactggtagctttaaaagccttggggactttaaaacttacgggaaggctgacaacactgccttcagagaattaattacggctaaagaaattgagaaaaatgtgcaggaaatgagcaaaggctcggctcccggtccagacgggattactcttggggacgtcgtaaagatggatcccgagttttcccggaccatggagattttcaatttatggttaacaactggtaaaatcccggacatggtgagggggtgcagaaccgttttgattccaaaatcatcaaagccggatcgtttgaaagacattaataactggagacctatcacgatcggttccatcttgctgagactgttctccaggattgtaacagctaggctgagcaaagcgtgccccctgaacccaaggcaaagaggctttatcagagcggcgggatgctctgaaaacttaaaactcctgcaaactataatttggtcggccaaaagagaacacagaccactgggtgttgtattcgtggacatcgccaaggcttttgacaccgtaagccaccagcacatcattcatgctttgcagcaaagagaggtggatccccacatcgtcggtctggtgagcaatatgtacgagaacatcagtacgtatatcaccacaaagaggaacacacacacagacaaaatccagatccgggttggagtaaagcagggtgacccgatgtcgccccttttatttaacctggcaatggaccctctattatgcaagctggaagagagtggcaaaggataccaccgaggacagagcagcatcacagcgatggcatttgcagacgatctggttttgctgagcgactcctgggaaaatatgaatacaaatattagcatactggagaccttctgcaatctgaccggactcaaaacacaggggcaaaagtgccacggcttttacatcaagccgacaaaggactcttacaccatcaatgactgcgctgcctggactatcaacggcacacccctgaacatgatcgaccccggcgaatctgagaaatacctcggcctgcagtttgacccgtggattggaatagcaaggtccggtctctccacaaaactagatttttggcttcagcggatcgatcaagcaccacttaaacctctgcagaaaactgatattctcaaaacatacaccatccctcggctgatctacatagctgaccactcagaagtgaaaagcgcactactcgaaacccttgaccagaagatccggacagcggtcaaggaatggcttcacctacctccgtgcacctgcgatgccatcctgtactcgagcacgagagacggcggtttgggcatcaccaaattggcaggactgatccccagcgtgcaggcccgtagactgcatcggatcgcacagtcatctgacgatacgatgaaatgcttcatggaaaaagagaaaatggaacagctgcataagaaattgtggattcaagctggaggggacagagagaacataccctcgatttgggaagcaccaccgtcgagtgaaccaccaaacaacgtgagcacaaattcggaatgggaagcaccgacccagaaagataaatttccaaagccttgcaattggaggaaaaacgaattcaaaaaatggaccaaattggcatcccaaggccgcggaattgtaaattttgaaagagacaaaattagtaaccattggatccaatactacagacgcatacctcacaggaaactcctcactgcactacaactcagggccaacgtttaccccacgagagaatttctagccaggggtagacaagaccaatacatcaaggcgtgtaggcactgcgatgcggacaacgaatcctgcgcccacatcatcggcaactgcccagtgacacaggacgcccgaatcaagaggcacaattacatctgcgaactgcttctcgaggaggcgaagaagaaggactgggtagtgttcaaggaaccgcacataagggattccaacaaggaactgtacaaacctgacctgatatttgtgaaggatgggcgtgcacttgtcgtggatgtgacagtacggtatgaagcagccaaatcatcgctggaggaagccgctgcagagaaagtgagaaagtacaaacacctggaaacggaagtaagacatctcacgaatgcaaaggacgttacttttgtgggctttcccctaggagcgcgggggaaatggcaccaagataactttaaacttttgactgagcttggcctctccaaatcgaggcaagtgaaaatggcagagactttttccacagtagcgctcttttcatctgtggacattgtacatatgtttgccagtagggccagaaaatctatggttatgtgataataggctgccttctgcggggcttgccttctggccatgcccttcttctctcccttgcacctgtacctcttggtctttgaataaagcctgagtaggaaggaccggtaaaaaaaaaaaaaaaaaaaaaaaaaaaaaaacgttgactaaaaaaaaaaaaaaaaaaaaaaaaaaaaaaaaaaaaaaaaaaaaaaaaaaaaaaaaaaaaaaaaaaaaaa

SEQ ID NO: 11727 - DNA, 4439 bp, synthetic construct
  source 1..4439: mol_type = other DNA
gaaataagagagaaaagaagagtaagaagaaatataagagaattcgccaccatggcttcttgcccgaaacctggccccccggtttcagcaggggcaatgagtttggaaagtggactgaccacccactccgttctcgccatcgaacgtggtcccaattcgttggcaaattccggatcagactttgggggggggggtctggggctaccgttacgcctattgagggtatcggtcggcactcagacctcccgctccgactgggtagacctggtgtcctggagccacccaggacccacgtctaagtcccagcaggttgacctggtgtctttatttcctaaacaccgggttgacctgttatccaaaaacgaccaggtagacctggtggctcaatttttaccatctaaatttccccccaatttggcagaaaatgatttggctttgctggtgaacttagagttctacagatcggatttgcatgtgtatgagtgtgttcataaggctgcacattgggagggattaagtggtttgcctgaggtgtatgaacaacttgcaccacaaccgtgtgtgggagaaactttacattctagcctcccacgagacagtgaactgtttgtgcctgaagaggggagcagcgagaaggagagcgaggacgcgccaaaaacatctcctccgacgcctgggaaacatggtttggaacagactggggaggaaaaagtgatggtgactgttcctgacaaaaatccaccttgtccttgctgtggtacccgggtaaactctgtgttgaatctgattgaacatctgaaagtgtcacacgggaaaaggggggtttgttttcggtgtgcaaaatgtggaaaggaaaatagtaactatcacagtgttgtttgtcattttaagaaatgcaggggtccagagacggagaaagccccagctggggagtggatttgtgaggtatgcaacagagattttacaaccaaaattggcctgggacaacacaagagattggcacacccagcagtgagaaatcaggaaaggatcgttgcttcccaaccgaaagaaacatcaaatagaggtgctcacaaaaggtgctggacaaaggaggaggaagaattactaataagactggaggctcagttcgagggaaacaaaaatattaataagcttattgcagaacacataaccaccaaaacagctaagcagatcagtgacaaaaggcgattgctgtccagaaagccagcagaggagccacgtgaggagcctggaacgtgtcatcacaccaggagagcagctgcgagcctgagaacggagcctgagatgagtcatcacgcccaggcagaggacagagataatggacctgggagacgccctctgccaggcagggcagctgccggagggagaacaatggacgagataagacgccaccctgataagggcaacggacagcagagacccaccaagcaaaaatcagaagaacagctgcaggcttactataaaaagacactagaggaacgactttcagctggggcacttaacaccttcccccgagcattcaagcaggtaatggaaggccgggatataaagctagtaatcaatcagacagcgcaggactgcttcggatgcctggaatccataagccaaataagaacggcaacccgagataaaaaggacacggtgacccgggagaaacacccaaagaaaccttttcagaagtggatgaagaagagagcaatcaaaaaaggtaattatcttcggttccagcgtttattttatcttgatagagggaaactggctaaaatcattttagatgatattgaatgcttgtcttgtgacataccactcagtgaaatttattcggtttttaaaacaagatgggaaacaactggtagctttaaaagccttggggactttaaaacttacgggaaggctgacaacactgccttcagagaattaattacggctaaagaaattgagaaaaatgtgcaggaaatgagcaaaggctcggctcccggtccagacgggattactcttggggacgtcgtaaagatggatcccgagttttcccggaccatggagattttcaatttatggttaacaactggtaaaatcccggacatggtgagggggtgcagaaccgttttgattccaaaatcatcagacccggatcgtttgaaagacattaataactggagacctatcacgatcggttccatcttgctgagactgttctccaggattgtaacagctaggctgagcaaagcgtgccccctgaacccaaggcaaagaggctttatcagagcggcgggatgctctgaaaacttaaaactcctgcaaactataatttggtcggccaaaagagaacacagaccactgggtgttgtattcgtggacatcgccaaggcttttgacaccgtaagccaccagcacatcattcatgctttgcagcaaagagaggtggatccccacatcgtcggtctggtgagcaatatgtacgagaacatcagtacgtatatcaccacaaagaggaacacacacacagacaaaatccagatccgggttggagtaaagcagggtgacccgatgtcgccccttttatttaacctggcaatggaccctctattatgcaagctggaagagagtggcaaaggataccaccgaggacagagcagcatcacagcgatggcatttgcagacgatctggttttgctgagcgactcctgggaaaatatgaatacaaatattagcatactggagaccttctgcaatctgaccggactcaaaacacaggggcaaaagtgccacggcttttacatcaagccgacaaaggactcttacaccatcaatgactgcgctgcctggactatcaacggcacacccctgaacatgatcgaccccggcgaatctgagaaatacctcggcctgcagtttgacccgtggattggaatagcaaggtccggtctctccacaaaactagatttttggcttcagcggatcgatcaagcaccacttaaacctctgcagaaaactgatattctcaaaacatacaccatccctcggctgatctacatagctgaccactcagaagtgaaaagcgcactactcgaaacccttgaccagaagatccggacagcggtcaaggaatggcttcacctacctccgtgcacctgcgatgccatcctgtactcgagcacgagagacggcggtttgggcatcaccaaattggcaggactgatccccagcgtgcaggcccgtagactgcatcggatcgcacagtcatctgacgatacgatgaaatgcttcatggaaaaagagaaaatggaacagctgcataagaaattgtggattcaagctggaggggacagagagaacataccctcgatttgggaagcaccaccgtcgagtgaaccaccaaacaacgtgagcacaaattcggaatgggaagcaccgacccagaaagataaatttccaaagccttgcaattggaggaaaaacgaattcaaaaaatggaccaaattggcatcccaaggccgcggaattgtaaattttgaaagagacaaaattagtaaccattggatccaatactacagacgcatacctcacaggaaactcctcactgcactacaactcagggccaacgtttaccccacgagagaatttctagccaggggtagacaagaccaatacatcaaggcgtgtaggcactgcgatgcggacaacgaatcctgcgcccacatcatcggcaactgcccagtgacacaggacgcccgaatcaagaggcacaattacatctgcgaactgcttctcgaggaggcgaagaagaaggactgggtagtgttcaaggaaccgcacataagggattccaacaaggaactgtacaaacctgacctgatatttgtgaaggatgggcgtgcacttgtcgtggatgtgacagtacggtatgaagcagccaaatcatcgctggaggaagccgctgcagagaaagtgagaaagtacaaacacctggaaacggaagtaagacatctcacgaatgcaaaggacgttacttttgtgggctttcccctaggagcgcgggggaaatggcaccaagataactttaaacttttgactgagcttggcctctccaaatcgaggcaagtgaaaatggcagagactttttccacagtagcgctcttttcatctgtggacattgtacatatgtttgccagtagggccagaaaatctatggttatgtgataataggctgccttctgcggggcttgccttctggccatgcccttcttctctcccttgcacctgtacctcttggtctttgaataaagcctgagtaggaaggaccggtaaaaaaaaaaaaaaaaaaaaaaaaaaaaaaacgttgactaaaaaaaaaaaaaaaaaaaaaaaaaaaaaaaaaaaaaaaaaaaaaaaaaaaaaaaaaaaaaaaaaaaaaa

SEQ ID NO: 11728 - DNA, 4439 bp, synthetic construct
  source 1..4439: mol_type = other DNA
gaaataagagagaaaagaagagtaagaagaaatataagagaattcgccaccatggcttcttgcccgaaacctggccccccggtttcagcaggggcaatgagtttggaaagtggactgaccacccactccgttctcgccatcgaacgtggtcccaattcgttggcaaattccggatcagactttgggggggggggtctggggctaccgttacgcctattgagggtatcggtcggcactcagacctcccgctccgactgggtagacctggtgtcctggagccacccaggacccacgtctaagtcccagcaggttgacctggtgtctttatttcctaaacaccgggttgacctgttatccaaaaacgaccaggtagacctggtggctcaatttttaccatctaaatttccccccaatttggcagaaaatgatttggctttgctggtgaacttagagttctacagatcggatttgcatgtgtatgagtgtgttcataaggctgcacattgggagggattaagtggtttgcctgaggtgtatgaacaacttgcaccacaaccgtgtgtgggagaaactttacattctagcctcccacgagacagtgaactgtttgtgcctgaagaggggagcagcgagaaggagagcgaggacgcgccaaaaacatctcctccgacgcctgggaaacatggtttggaacagactggggaggaaaaagtgatggtgactgttcctgacaaaaatccaccttgtccttgctgtggtacccgggtaaactctgtgttgaatctgattgaacatctgaaagtgtcacacgggaaaaggggggtttgttttcggtgtgcaaaatgtggaaaggaaaatagtaactatcacagtgttgtttgtcattttaagaaatgcaggggtccagagacggagaaagccccagctggggagtggatttgtgaggtatgcaacagagattttacaaccaaaattggcctgggacaacacaagagattggcacacccagcagtgagaaatcaggaaaggatcgttgcttcccaaccgaaagaaacatcaaatagaggtgctcacaaaaggtgctggacaaaggaggaggaagaattactaataagactggaggctcagttcgagggaaacaaaaatattaataagcttattgcagaacacataaccaccaaaacagctaagcagatcagtgacaaaaggcgattgctgtccagaaagccagcagaggagccacgtgaggagcctggaacgtgtcatcacaccaggagagcagctgcgagcctgagaacggagcctgagatgagtcatcacgcccaggcagaggacagagataatggacctgggagacgccctctgccaggcagggcagctgccggagggagaacaatggacgagataagacgccaccctgataagggcaacggacagcagagacccaccaagcaaaaatcagaagaacagctgcaggcttactataaaaagacactagaggaacgactttcagctggggcacttaacaccttcccccgagcattcaagcaggtaatggaaggccgggatataaagctagtaatcaatcagacagcgcaggactgcttcggatgcctggaatccataagccaaataagaacggcaacccgagataaaaaggacacggtgacccgggagaaacacccaaagaaaccttttcagaagtggatgaagaagagagcaatcaaaaaaggtaattatcttcggttccagcgtttattttatcttgatagagggaaactggctaaaatcattttagatgatattgaatgcttgtcttgtgacataccactcagtgaaatttattcggtttttaaaacaagatgggaaacaactggtagctttaaaagccttggggactttaaaacttacgggaaggctgacaacactgccttcagagaattaattacggctaaagaaattgagaaaaatgtgcaggaaatgagcaaaggctcggctcccggtccagacgggattactcttggggacgtcgtaaagatggatcccgagggctcccggaccatggagattttcaatttatggttaacaactggtaaaatcccggacatggtgagggggtgcagaaccgttttgattccaaaatcatcaaagccggatcgtttgaaagacattaataactggagacctatcacgatcggttccatcttgctgagactgttctccaggattgtaacagctaggctgagcaaagcgtgccccctgaacccaaggcaaagaggctttatcagagcggcgggatgctctgaaaacttaaaactcctgcaaactataatttggtcggccaaaagagaacacagaccactgggtgttgtattcgtggacatcgccaaggcttttgacaccgtaagccaccagcacatcattcatgctttgcagcaaagagaggtggatccccacatcgtcggtctggtgagcaatatgtacgagaacatcagtacgtatatcaccacaaagaggaacacacacacagacaaaatccagatccgggttggagtaaagcagggtgacccgatgtcgccccttttatttaacctggcaatggaccctctattatgcaagctggaagagagtggcaaaggataccaccgaggacagagcagcatcacagcgatggcatttgcagacgatctggttttgctgagcgactcctgggaaaatatgaatacaaatattagcatactggagaccttctgcaatctgaccggactcaaaacacaggggcaaaagtgccacggcttttacatcaagccgacaaaggactcttacaccatcaatgactgcgctgcctggactatcaacggcacacccctgaacatgatcgaccccggcgaatctgagaaatacctcggcctgcagtttgacccgtggattggaatagcaaggtccggtctctccacaaaactagatttttggcttcagcggatcgatcaagcaccacttaaacctctgcagaaaactgatattctcaaaacatacaccatccctcggctgatctacatagctgaccactcagaagtgaaaagcgcactactcgaaacccttgaccagaagatccggacagcggtcaaggaatggcttcacctacctccgtgcacctgcgatgccatcctgtactcgagcacgagagacggcggtttgggcatcaccaaattggcaggactgatccccagcgtgcaggcccgtagactgcatcggatcgcacagtcatctgacgatacgatgaaatgcttcatggaaaaagagaaaatggaacagctgcataagaaattgtggattcaagctggaggggacagagagaacataccctcgatttgggaagcaccaccgtcgagtgaaccaccaaacaacgtgagcacaaattcggaatgggaagcaccgacccagaaagataaatttccaaagccttgcaattggaggaaaaacgaattcaaaaaatggaccaaattggcatcccaaggccgcggaattgtaaattttgaaagagacaaaattagtaaccattggatccaatactacagacgcatacctcacaggaaactcctcactgcactacaactcagggccaacgtttaccccacgagagaatttctagccaggggtagacaagaccaatacatcaaggcgtgtaggcactgcgatgcggacaacgaatcctgcgcccacatcatcggcaactgcccagtgacacaggacgcccgaatcaagaggcacaattacatctgcgaactgcttctcgaggaggcgaagaagaaggactgggtagtgttcaaggaaccgcacataagggattccaacaaggaactgtacaaacctgacctgatatttgtgaaggatgggcgtgcacttgtcgtggatgtgacagtacggtatgaagcagccaaatcatcgctggaggaagccgctgcagagaaagtgagaaagtacaaacacctggaaacggaagtaagacatctcacgaatgcaaaggacgttacttttgtgggctttcccctaggagcgcgggggaaatggcaccaagataactttaaacttttgactgagcttggcctctccaaatcgaggcaagtgaaaatggcagagactttttccacagtagcgctcttttcatctgtggacattgtacatatgtttgccagtagggccagaaaatctatggttatgtgataataggctgccttctgcggggcttgccttctggccatgcccttcttctctcccttgcacctgtacctcttggtctttgaataaagcctgagtaggaaggaccggtaaaaaaaaaaaaaaaaaaaaaaaaaaaaaaacgttgactaaaaaaaaaaaaaaaaaaaaaaaaaaaaaaaaaaaaaaaaaaaaaaaaaaaaaaaaaaaaaaaaaaaaaa

SEQ ID NO: 11729 - DNA, 4439 bp, synthetic construct
  source 1..4439: mol_type = other DNA
gaaataagagagaaaagaagagtaagaagaaatataagagaattcgccaccatggcttcttgcccgaaacctggccccccggtttcagcaggggcaatgagtttggaaagtggactgaccacccactccgttctcgccatcgaacgtggtcccaattcgttggcaaattccggatcagactttgggggggggggtctggggctaccgttacgcctattgagggtatcggtcggcactcagacctcccgctccgactgggtagacctggtgtcctggagccacccaggacccacgtctaagtcccagcaggttgacctggtgtctttatttcctaaacaccgggttgacctgttatccaaaaacgaccaggtagacctggtggctcaatttttaccatctaaatttccccccaatttggcagaaaatgatttggctttgctggtgaacttagagttctacagatcggatttgcatgtgtatgagggcgttcataaggctgcacattgggagggattaagtggtttgcctgaggtgtatgaacaacttgcaccacaaccgtgtgtgggagaaactttacattctagcctcccacgagacagtgaactgtttgtgcctgaagaggggagcagcgagaaggagagcgaggacgcgccaaaaacatctcctccgacgcctgggaaacatggtttggaacagactggggaggaaaaagtgatggtgactgttcctgacaaaaatccaccttgtccttgctgtggtacccgggtaaactctgtgttgaatctgattgaacatctgaaagtgtcacacgggaaaaggggggtttgttttcggtgtgcaaaatgtggaaaggaaaatagtaactatcacagtgttgtttgtcattttaagaaatgcaggggtccagagacggagaaagccccagctggggagtggatttgtgaggtatgcaacagagattttacaaccaaaattggcctgggacaacacaagagattggcacacccagcagtgagaaatcaggaaaggatcgttgcttcccaaccgaaagaaacatcaaatagaggtgctcacaaaaggtgctggacaaaggaggaggaagaattactaataagactggaggctcagttcgagggaaacaaaaatattaataagcttattgcagaacacataaccaccaaaacagctaagcagatcagtgacaaaaggcgattgctgtccagaaagccagcagaggagccacgtgaggagcctggaacgtgtcatcacaccaggagagcagctgcgagcctgagaacggagcctgagatgagtcatcacgcccaggcagaggacagagataatggacctgggagacgccctctgccaggcagggcagctgccggagggagaacaatggacgagataagacgccaccctgataagggcaacggacagcagagacccaccaagcaaaaatcagaagaacagctgcaggcttactataaaaagacactagaggaacgactttcagctggggcacttaacaccttcccccgagcattcaagcaggtaatggaaggccgggatataaagctagtaatcaatcagacagcgcaggactgcttcggatgcctggaatccataagccaaataagaacggcaacccgagataaaaaggacacggtgacccgggagaaacacccaaagaaaccttttcagaagtggatgaagaagagagcaatcaaaaaaggtaattatcttcggttccagcgtttattttatcttgatagagggaaactggctaaaatcattttagatgatattgaatgcttgtcttgtgacataccactcagtgaaatttattcggtttttaaaacaagatgggaaacaactggtagctttaaaagccttggggactttaaaacttacgggaaggctgacaacactgccttcagagaattaattacggctaaagaaattgagaaaaatgtgcaggaaatgagcaaaggctcggctcccggtccagacgggattactcttggggacgtcgtaaagatggatcccgagttttcccggaccatggagattttcaatttatggttaacaactggtaaaatcccggacatggtgagggggtgcagaaccgttttgattccaaaatcatcaaagccggatcgtttgaaagacattaataactggagacctatcacgatcggttccatcttgctgagactgttctccaggattgtaacagctaggctgagcaaagcgtgccccctgaacccaaggcaaagaggctttatcagagcggcgggatgctctgaaaacttaaaactcctgcaaactataatttggtcggccaaaagagaacacagaccactgggtgttgtattcgtggacatcgccaaggcttttgacaccgtaagccaccagcacatcattcatgctttgcagcaaagagaggtggatccccacatcgtcggtctggtgagcaatatgtacgagaacatcagtacgtatatcaccacaaagaggaacacacacacagacaaaatccagatccgggttggagtaaagcagggtgacccgatgtcgccccttttatttaacctggcaatggaccctctattatgcaagctggaagagagtggcaaaggataccaccgaggacagagcagcatcacagcgatggcatttgcagacgatctggttttgctgagcgactcctgggaaaatatgaatacaaatattagcatactggagaccttctgcaatctgaccggactcaaaacacaggggcaaaagtgccacggcttttacatcaagccgacaaaggactcttacaccatcaatgactgcgctgcctggactatcaacggcacacccctgaacatgatcgaccccggcgaatctgagaaatacctcggcctgcagtttgacccgtggattggaatagcaaggtccggtctctccacaaaactagatttttggcttcagcggatcgatcaagcaccacttaaacctctgcagaaaactgatattctcaaaacatacaccatccctcggctgatctacatagctgaccactcagaagtgaaaagcgcactactcgaaacccttgaccagaagatccggacagcggtcaaggaatggcttcacctacctccgtgcacctgcgatgccatcctgtactcgagcacgagagacggcggtttgggcatcaccaaattggcaggactgatccccagcgtgcaggcccgtagactgcatcggatcgcacagtcatctgacgatacgatgaaatgcttcatggaaaaagagaaaatggaacagctgcataagaaattgtggattcaagctggaggggacagagagaacataccctcgatttgggaagcaccaccgtcgagtgaaccaccaaacaacgtgagcacaaattcggaatgggaagcaccgacccagaaagataaatttccaaagccttgcaattggaggaaaaacgaattcaaaaaatggaccaaattggcatcccaaggccgcggaattgtaaattttgaaagagacaaaattagtaaccattggatccaatactacagacgcatacctcacaggaaactcctcactgcactacaactcagggccaacgtttaccccacgagagaatttctagccaggggtagacaagaccaatacatcaaggcgtgtaggcactgcgatgcggacaacgaatcctgcgcccacatcatcggcaactgcccagtgacacaggacgcccgaatcaagaggcacaattacatctgcgaactgcttctcgaggaggcgaagaagaaggactgggtagtgttcaaggaaccgcacataagggattccaacaaggaactgtacaaacctgacctgatatttgtgaaggatgggcgtgcacttgtcgtggatgtgacagtacggtatgaagcagccaaatcatcgctggaggaagccgctgcagagaaagtgagaaagtacaaacacctggaaacggaagtaagacatctcacgaatgcaaaggacgttacttttgtgggctttcccctaggagcgcgggggaaatggcaccaagataactttaaacttttgactgagcttggcctctccaaatcgaggcaagtgaaaatggcagagactttttccacagtagcgctcttttcatctgtggacattgtacatatgtttgccagtagggccagaaaatctatggttatgtgataataggctgccttctgcggggcttgccttctggccatgcccttcttctctcccttgcacctgtacctcttggtctttgaataaagcctgagtaggaaggaccggtaaaaaaaaaaaaaaaaaaaaaaaaaaaaaaacgttgactaaaaaaaaaaaaaaaaaaaaaaaaaaaaaaaaaaaaaaaaaaaaaaaaaaaaaaaaaaaaaaaaaaaaaa

SEQ ID NO: 11730 - DNA, 4439 bp, synthetic construct
  source 1..4439: mol_type = other DNA
gaaataagagagaaaagaagagtaagaagaaatataagagaattcgccaccatggcttcttgcccgaaacctggccccccggtttcagcaggggcaatgagtttggaaagtggactgaccacccactccgttctcgccatcgaacgtggtcccaattcgttggcaaattccggatcagactttgggggggggggtctggggctaccgttacgcctattgagggtatcggtcggcactcagacctcccgctccgactgggtagacctggtgtcctggagccacccaggacccacgtctaagtcccagcaggttgacctggtgtctttatttcctaaacaccgggttgacctgttatccaaaaacgaccaggtagacctggtggctcaatttttaccatctaaatttccccccaatttggcagaaaatgatttggctttgctggtgaacttagagttctacagatcggatttgcatgtgtatgagtgtgttcataaggctgcacattgggagggattaagtggtttgcctgaggtgtatgaacaacttgcaccacaaccgtgtgtgggagaaactttacattctagcctcccacgagacagtgaactgtttgtgcctgaagaggggagcagcgagaaggagagcgaggacgcgccaaaaacatctcctccgacgcctgggaaacatggtttggaacagactggggaggaaaaagtgatggtgactgttcctgacaaaaatccaccttgtccttgctgtggtacccgggtaaactctgtgttgaatctgattgaacatctgaaagtgtcacacgggaaaaggggggtttgttttcggtgtgcaaaatgtggaaaggaaaatagtaactatcacagtgttgtttgtcattttaagaaatgcaggggtccagagacggagaaagccccagctggggagtggatttgtgaggtatgcaacagagattttacaaccaaaattggcctgggacaacacaagagattggcacacccagcagtgagaaatcaggaaaggatcgttgcttcccaaccgaaagaaacatcaaatagaggtgctcacaaaaggtgctggacaaaggaggaggaagaattactaataagactggaggctcagttcgagggaaacaaaaatattaataagcttattgcagaacacataaccaccaaaacagctaagcagatcagtgacaaaaggcgattgctgtccagaaagccagcagaggagccacgtgaggagcctggaacgtgtcatcacaccaggagagcagctgcgagcctgagaacggagcctgagatgagtcatcacgcccaggcagaggacagagataatggacctgggagacgccctctgccaggcagggcagctgccggagggagaacaatggacgagataagacgccaccctgataagggcaacggacagcagagacccaccaagcaaaaatcagaagaacagctgcaggcttactataaaaagacactagaggaacgactttcagctggggcacttaacaccttcccccgagcattcaagcaggtaatggaaggccgggatataaagctagtaatcaatcagacagcgcaggactgcttcggatgcctggaatccataagccaaataagaacggcaacccgagataaaaaggacacggtgacccgggagaaacacccaaagaaaccttttcagaagtggatgaagaagagagcaatcaaaaaaggtaattatcttcggttccagcgtttattttatcttgatagagggaaactggctaaaatcattttagatgatattgaatgcttgtcttgtgacataccactcagtgaaatttattcggtttttaaaacaagatgggaaacaactggtagctttaaaagccttggggactttaaaacttacgggaaggctgacaacactgccttcagagaattaattacggctaaagaaattgagaaaaatgtgcaggaaatgagcaaaggctcggctcccggtccagacgggattactcttggggacgtcgtaaagatggatcccgagttttcccggaccatggagattttcaatttatggttaacaactggtaaaatcccggacatggtgagggggtgcagaaccgttttgattccaaaatcatcaaagccggatcgtttgaaagacattaataactggagacctatcacgatcggttccatcttgctgagactgttctccaggattgtaacagctaggctgagcaaagcgtgccccctgaacccaaggcaaagaggctttatcagagcggcgggatgctctgaaaacttaaaactcctgcaaactataatttggtcggccaaaagagaacacagaccactgggtgttgtattcgtggacatcgccaaggcttttgacaccgtaagccaccagcacatcattcatgctttgcagcaaagagaggtggatccccacatcgtcggtctggtgagcaatatgtacgagaacatcagtacgtatatcaccacaaagaggaacacacacacagacaaaatccagatccgggttggagtaaagcagggtgacccgatgtcgccccttttatttaacctggcaatggaccctctattatgcaagctggaagagagtggcaaaggataccaccgaggacagagcagcatcacagcgatggcatttgcagacgatctggttttgctgagcgactcctgggaaggcatgaatacaaatattagcatactggagaccttctgcaatctgaccggactcaaaacacaggggcaaaagtgccacggcttttacatcaagccgacaaaggactcttacaccatcaatgactgcgctgcctggactatcaacggcacacccctgaacatgatcgaccccggcgaatctgagaaatacctcggcctgcagtttgacccgtggattggaatagcaaggtccggtctctccacaaaactagatttttggcttcagcggatcgatcaagcaccacttaaacctctgcagaaaactgatattctcaaaacatacaccatccctcggctgatctacatagctgaccactcagaagtgaaaagcgcactactcgaaacccttgaccagaagatccggacagcggtcaaggaatggcttcacctacctccgtgcacctgcgatgccatcctgtactcgagcacgagagacggcggtttgggcatcaccaaattggcaggactgatccccagcgtgcaggcccgtagactgcatcggatcgcacagtcatctgacgatacgatgaaatgcttcatggaaaaagagaaaatggaacagctgcataagaaattgtggattcaagctggaggggacagagagaacataccctcgatttgggaagcaccaccgtcgagtgaaccaccaaacaacgtgagcacaaattcggaatgggaagcaccgacccagaaagataaatttccaaagccttgcaattggaggaaaaacgaattcaaaaaatggaccaaattggcatcccaaggccgcggaattgtaaattttgaaagagacaaaattagtaaccattggatccaatactacagacgcatacctcacaggaaactcctcactgcactacaactcagggccaacgtttaccccacgagagaatttctagccaggggtagacaagaccaatacatcaaggcgtgtaggcactgcgatgcggacaacgaatcctgcgcccacatcatcggcaactgcccagtgacacaggacgcccgaatcaagaggcacaattacatctgcgaactgcttctcgaggaggcgaagaagaaggactgggtagtgttcaaggaaccgcacataagggattccaacaaggaactgtacaaacctgacctgatatttgtgaaggatgggcgtgcacttgtcgtggatgtgacagtacggtatgaagcagccaaatcatcgctggaggaagccgctgcagagaaagtgagaaagtacaaacacctggaaacggaagtaagacatctcacgaatgcaaaggacgttacttttgtgggctttcccctaggagcgcgggggaaatggcaccaagataactttaaacttttgactgagcttggcctctccaaatcgaggcaagtgaaaatggcagagactttttccacagtagcgctcttttcatctgtggacattgtacatatgtttgccagtagggccagaaaatctatggttatgtgataataggctgccttctgcggggcttgccttctggccatgcccttcttctctcccttgcacctgtacctcttggtctttgaataaagcctgagtaggaaggaccggtaaaaaaaaaaaaaaaaaaaaaaaaaaaaaaacgttgactaaaaaaaaaaaaaaaaaaaaaaaaaaaaaaaaaaaaaaaaaaaaaaaaaaaaaaaaaaaaaaaaaaaaaa

SEQ ID NO: 11731 - DNA, 4439 bp, synthetic construct
  source 1..4439: mol_type = other DNA
gaaataagagagaaaagaagagtaagaagaaatataagagaattcgccaccatggcttcttgcccgaaacctggccccccggtttcagcaggggcaatgagtttggaaagtggactgaccacccactccgttctcgccatcgaacgtggtcccaattcgttggcaaattccggatcagactttgggggggggggtctggggctaccgttacgcctattgagggtatcggtcggcactcagacctcccgctccgactgggtagacctggtgtcctggagccacccaggacccacgtctaagtcccagcaggttgacctggtgtctttatttcctaaacaccgggttgacctgttatccaaaaacgaccaggtagacctggtggctcaatttttaccatctaaatttccccccaatttggcagaaaatgatttggctttgctggtgaacttagagttctacagatcggatttgcatgtgtatgagtgtgttcataaggctgcacattgggagggattaagtggtttgcctgaggtgtatgaacaacttgcaccacaaccgtgtgtgggagaaactttacattctagcctcccacgagacagtgaactgtttgtgcctgaagaggggagcagcgagaaggagagcgaggacgcgccaaaaacatctcctccgacgcctgggaaacatggtttggaacagactggggaggaaaaagtgatggtgactgttcctgacaaaaatccaccttgtccttgctgtggtacccgggtaaactctgtgttgaatctgattgaacatctgaaagtgtcacacgggaaaaggggggtttgttttcggtgtgcaaaatgtggaaaggaaaatagtaactatcacagtgttgtttgtcattttaagaaatgcaggggtccagagacggagaaagccccagctggggagtggatttgtgaggtatgcaacagagattttacaaccaaaattggcctgggacaacacaagagattggcacacccagcagtgagaaatcaggaaaggatcgttgcttcccaaccgaaagaaacatcaaatagaggtgctcacaaaaggtgctggacaaaggaggaggaagaattactaataagactggaggctcagttcgagggaaacaaaaatattaataagcttattgcagaacacataaccaccaaaacagctaagcagatcagtgacaaaaggcgattgctgtccagaaagccagcagaggagccacgtatggagcctggaacgtgtcatcacaccaggagagcagctgcgagcctgagaacggagcctgagatgagtcatcacgcccaggcagaggacagagataatggacctgggagacgccctctgccaggcagggcagctgccggagggagaacaatggacgagataagacgccaccctgataagggcaacggacagcagagacccaccaagcaaaaatcagaagaacagctgcaggcttactataaaaagacactagaggaacgactttcagctggggcacttaacaccttcccccgagcattcaagcaggtaatggaaggccgggatataaagctagtaatcaatcagacagcgcaggactgcttcggatgcctggaatccataagccaaataagaacggcaacccgagataaaaaggacacggtgacccgggagaaacacccaaagaaaccttttcagaagtggatgaagaagagagcaatcaaaaaaggtaattatcttcggttccagcgtttattttatcttgatagagggaaactggctaaaatcattttagatgatattgaatgcttgtcttgtgacataccactcagtgaaatttattcggtttttaaaacaagatgggaaacaactggtagctttaaaagccttggggactttaaaacttacgggaaggctgacaacactgccttcagagaattaattacggctaaagaaattgagaaaaatgtgcaggaaatgagcaaaggctcggctcccggtccagacgggattactcttggggacgtcgtaaagatggatcccgagttttcccggaccatggagattttcaatttatggttaacaactggtaaaatcccggacatggtgagggggtgcagaaccgttttgattccaaaatcatcaaagccggatcgtttgaaagacattaataactggagacctatcacgatcggttccatcttgctgagactgttctccaggattgtaacagctaggctgagcaaagcgtgccccctgaacccaaggcaaagaggctttatcagagcggcgggatgctctgaaaacttaaaactcctgcaaactataatttggtcggccaaaagagaacacagaccactgggtgttgtattcgtggacatcgccaaggcttttgacaccgtaagccaccagcacatcattcatgctttgcagcaaagagaggtggatccccacatcgtcggtctggtgagcaatatgtacgagaacatcagtacgtatatcaccacaaagaggaacacacacacagacaaaatccagatccgggttggagtaaagcagggtgacccgatgtcgccccttttatttaacctggcaatggaccctctattatgcaagctggaagagagtggcaaaggataccaccgaggacagagcagcatcacagcgatggcatttgcagacgatctggttttgctgagcgactcctgggaaaatatgaatacaaatattagcatactggagaccttctgcaatctgaccggactcaaaacacaggggcaaaagtgccacggcttttacatcaagccgacaaaggactcttacaccatcaatgactgcgctgcctggactatcaacggcacacccctgaacatgatcgaccccggcgaatctgagaaatacctcggcctgcagtttgacccgtggattggaatagcaaggtccggtctctccacaaaactagatttttggcttcagcggatcgatcaagcaccacttaaacctctgcagaaaactgatattctcaaaacatacaccatccctcggctgatctacatagctgaccactcagaagtgaaaagcgcactactcgaaacccttgaccagaagatccggacagcggtcaaggaatggcttcacctacctccgtgcacctgcgatgccatcctgtactcgagcacgagagacggcggtttgggcatcaccaaattggcaggactgatccccagcgtgcaggcccgtagactgcatcggatcgcacagtcatctgacgatacgatgaaatgcttcatggaaaaagagaaaatggaacagctgcataagaaattgtggattcaagctggaggggacagagagaacataccctcgatttgggaagcaccaccgtcgagtgaaccaccaaacaacgtgagcacaaattcggaatgggaagcaccgacccagaaagataaatttccaaagccttgcaattggaggaaaaacgaattcaaaaaatggaccaaattggcatcccaaggccgcggaattgtaaattttgaaagagacaaaattagtaaccattggatccaatactacagacgcatacctcacaggaaactcctcactgcactacaactcagggccaacgtttaccccacgagagaatttctagccaggggtagacaagaccaatacatcaaggcgtgtaggcactgcgatgcggacaacgaatcctgcgcccacatcatcggcaactgcccagtgacacaggacgcccgaatcaagaggcacaattacatctgcgaactgcttctcgaggaggcgaagaagaaggactgggtagtgttcaaggaaccgcacataagggattccaacaaggaactgtacaaacctgacctgatatttgtgaaggatgggcgtgcacttgtcgtggatgtgacagtacggtatgaagcagccaaatcatcgctggaggaagccgctgcagagaaagtgagaaagtacaaacacctggaaacggaagtaagacatctcacgaatgcaaaggacgttacttttgtgggctttcccctaggagcgcgggggaaatggcaccaagataactttaaacttttgactgagcttggcctctccaaatcgaggcaagtgaaaatggcagagactttttccacagtagcgctcttttcatctgtggacattgtacatatgtttgccagtagggccagaaaatctatggttatgtgataataggctgccttctgcggggcttgccttctggccatgcccttcttctctcccttgcacctgtacctcttggtctttgaataaagcctgagtaggaaggaccggtaaaaaaaaaaaaaaaaaaaaaaaaaaaaaaacgttgactaaaaaaaaaaaaaaaaaaaaaaaaaaaaaaaaaaaaaaaaaaaaaaaaaaaaaaaaaaaaaaaaaaaaaa

SEQ ID NO: 11732 - DNA, 4439 bp, synthetic construct
  source 1..4439: mol_type = other DNA
gaaataagagagaaaagaagagtaagaagaaatataagagaattcgccaccatggcttcttgcccgaaacctggccccccggtttcagcaggggcaatgagtttggaaagtggactgaccacccactccgttctcgccatcgaacgtggtcccaattcgttggcaaattccggatcagactttgggggggggggtctggggctaccgttacgcctattgagggtatcggtcggcactcagacctcccgctccgactgggtagacctggtgtcctggagccacccaggacccacgtctaagtcccagcaggttgacctggtgtctttatttcctaaacaccgggttgacctgttatccaaaaacgaccaggtagacctggtggctcaatttttaccatctaaatttccccccaatttggcagaaaatgatttggctttgctggtgaacttagagttctacagatcggatttgcatgtgtatgagtgtgttcataaggctgcacattgggagggattaagtggtttgcctgaggtgtatgaacaacttgcaccacaaccgtgtgtgggagaaactttacattctagcctcccacgagacagtgaactgtttgtgcctgaagaggggagcagcgagaaggagagcgaggacgcgccaaaaacatctcctccgacgcctgggaaacatggtttggaacagactggggaggaaaaagtgatggtgactgttcctgacaaaaatccaccttgtccttgctgtggtacccgggtaaactctgtgttgaatctgattgaacatctgaaagtgtcacacgggaaaaggggggtttgttttcggtgtgcaaaatgtggaaaggaaaatagtaactatcacagtgttgtttgtcattttaagaaatgcaggggtccagagacggagaaagccccagctggggagtggatttgtgaggtatgcaacagagattttacaaccaaaattggcctgggacaacacaagagattggcacacccagcagtgagaaatcaggaaaggatcgttgcttcccaaccgaaagaaacatcaaatagaggtgctcacaaaaggtgctggacaaaggaggaggaagaattactaataagactggaggctcagttcgagggaaacaaaaatattaataagcttattgcagaacacataaccaccaaaacagctaagcagatcagtgacaaaaggcgattgctgtccagaaagccagcagaggagccacgtgaggagcctggaacgtgtcatcacaccaggagagcagctgcgagcctgagaacggagcctgagatgagtcatcacgcccaggcagaggacagagataatggacctgggagacgccctctgccaggcagggcagctgccggagggagaacaatggacgagataagacgccaccctgataagggcaacggacagcagagacccaccaagcaaaaatcagaagaacagctgcaggcttactataaaaagacactagaggaacgactttcagctggggcacttaacaccttcccccgagcattcaagcaggtaatggaaggccgggatataaagctagtaatcaatcagacagcgcaggactgcttcggatgcctggaatccataagccaaataagaacggcaacccgagataaaaaggacacggtgacccgggagaaacacccaaagaaaccttttcagaagtggatgaagaagagagcaatcaaaaaaggtaattatcttcggttccagcgtttattttatcttgatagagggaaactggctaaaatcattttagatgatattgaatgcttgtcttgtgacataccactcagtgaaatttattcggtttttaaaacaagatgggaaacaactggtagctttaaaagccttggggactttaaaacttacgggaaggctgacaacactgccttcagagaattaattacggctaaagaaattgagaaaaatgtgcaggaaatgagcaaaggctcggctcccggtccagacgggattactcttggggacgtcgtaaagatggatcccgagttttcccggaccatggagattttcaatttatggttaacaactggtaaaatcccggacatggtgagggggtgcagaaccgttttgattccaaaatcatcaaagccggatcgtttgaaagacattaataactggagacctatcacgatcggttccatcttgctgagactgttctccaggattgtaacagctaggctgagcaaagcgtgccccctgaacccaaggcaaagaggctttatcagagcggcgggatgctctgaaaacttaaaactcctgcaaactataatttggtcggccaaaagagaacacagaccactgggtgttgtattcgtggacatcgccaaggcttttgacaccgtaagccaccagcacatcattcatgctttgcagcaaagagaggtggatccccacatcgtcggtctggtgagcaatatgtacgagaacatcagtacgtatatcaccacaaagaggaacacacacacagacaaaatccagatccgggttggagtaaagcagggtgacccgatgtcgccccttttatttaacctggcaatggaccctctattatgcaagctggaagagagtggcaaaggataccaccgaggacagagcagcatcacagcgatggcatttgcagacgatctggttttgctgagcgactcctgggaaaatatgaatacaaatattagcatactggagaccttctgcaatctgaccggactcaaaacacaggggcaaaagtgccacggcttttacatcaagccgacaaagaagtcttacaccatcaatgactgcgctgcctggactatcaacggcacacccctgaacatgatcgaccccggcgaatctgagaaatacctcggcctgcagtttgacccgtggattggaatagcaaggtccggtctctccacaaaactagatttttggcttcagcggatcgatcaagcaccacttaaacctctgcagaaaactgatattctcaaaacatacaccatccctcggctgatctacatagctgaccactcagaagtgaaaagcgcactactcgaaacccttgaccagaagatccggacagcggtcaaggaatggcttcacctacctccgtgcacctgcgatgccatcctgtactcgagcacgagagacggcggtttgggcatcaccaaattggcaggactgatccccagcgtgcaggcccgtagactgcatcggatcgcacagtcatctgacgatacgatgaaatgcttcatggaaaaagagaaaatggaacagctgcataagaaattgtggattcaagctggaggggacagagagaacataccctcgatttgggaagcaccaccgtcgagtgaaccaccaaacaacgtgagcacaaattcggaatgggaagcaccgacccagaaagataaatttccaaagccttgcaattggaggaaaaacgaattcaaaaaatggaccaaattggcatcccaaggccgcggaattgtaaattttgaaagagacaaaattagtaaccattggatccaatactacagacgcatacctcacaggaaactcctcactgcactacaactcagggccaacgtttaccccacgagagaatttctagccaggggtagacaagaccaatacatcaaggcgtgtaggcactgcgatgcggacaacgaatcctgcgcccacatcatcggcaactgcccagtgacacaggacgcccgaatcaagaggcacaattacatctgcgaactgcttctcgaggaggcgaagaagaaggactgggtagtgttcaaggaaccgcacataagggattccaacaaggaactgtacaaacctgacctgatatttgtgaaggatgggcgtgcacttgtcgtggatgtgacagtacggtatgaagcagccaaatcatcgctggaggaagccgctgcagagaaagtgagaaagtacaaacacctggaaacggaagtaagacatctcacgaatgcaaaggacgttacttttgtgggctttcccctaggagcgcgggggaaatggcaccaagataactttaaacttttgactgagcttggcctctccaaatcgaggcaagtgaaaatggcagagactttttccacagtagcgctcttttcatctgtggacattgtacatatgtttgccagtagggccagaaaatctatggttatgtgataataggctgccttctgcggggcttgccttctggccatgcccttcttctctcccttgcacctgtacctcttggtctttgaataaagcctgagtaggaaggaccggtaaaaaaaaaaaaaaaaaaaaaaaaaaaaaaacgttgactaaaaaaaaaaaaaaaaaaaaaaaaaaaaaaaaaaaaaaaaaaaaaaaaaaaaaaaaaaaaaaaaaaaaaa

SEQ ID NO: 11733 - DNA, 4439 bp, synthetic construct
  source 1..4439: mol_type = other DNA
gaaataagagagaaaagaagagtaagaagaaatataagagaattcgccaccatggcttcttgcccgaaacctggccccccggtttcagcaggggcaatgagtttggaaagtggactgaccacccactccgttctcgccatcgaacgtggtcccaattcgttggcaaattccggatcagactttgggggggggggtctggggctaccgttacgcctattgagggtatcggtcggcactcagacctcccgctccgactgggtagacctggtgtcctggagccacccaggacccacgtctaagtcccagcaggttgacctggtgtctttatttcctaaacaccgggttgacctgttatccaaaaacgaccaggtagacctggtggctcaatttttaccatctaaatttccccccaatttggcagaaaatgatttggctttgctggtgaacttagagttctacagatcggatttgcatgtgtatgagtgtgttcataaggctgcacattgggagggattaagtggtttgcctgaggtgtatgaacaacttgcaccacaaccgtgtgtgggagaaactttacattctagcctcccacgagacagtgaactgtttgtgcctgaagaggggagcagcgagaaggagagcgaggacgcgccaaaaacatctcctccgacgcctgggaaacatggtttggaacagactggggaggaaaaagtgatggtgactgttcctgacaaaaatccaccttgtccttgctgtggtacccgggtaaactctgtgttgaatctgattgaacatctgaaagtgtcacacgggaaaaggggggtttgttttcggtgtgcaaaatgtggaaaggaaaatagtaactatcacagtgttgtttgtcattttaagaaatgcaggggtccagagacggagaaagccccagctggggagtggatttgtgaggtatgcaacagagattttacaaccaaaattggcctgggacaacacaagagattggcacacccagcagtgagaaatcaggaaaggatcgttgcttcccaaccgaaagaaacatcaaatagaggtgctcacaaaaggtgctggacaaaggaggaggaagaattactaataagactggaggctcagttcgagggaaacaaaaatattaataagcttattgcagaacacataaccaccaaaacagctaagcagatcagtgacaaaaggcgattgctgtccagaaagccagcagaggagccacgtatggagcctggaacgtgtcatcacaccaggagagcagctgcgagcctgagaacggagcctgagatgagtcatcacgcccaggcagaggacagagataatggacctgggagacgccctctgccaggcagggcagctgccggagggagaacaatggacgagataagacgccaccctgataagggcaacggacagcagagacccaccaagcaaaaatcagaagaacagctgcaggcttactataaaaagacactagaggaacgactttcagctggggcacttaacaccttcccccgagcattcaagcaggtaatggaaggccgggatataaagctagtaatcaatcagacagcgcaggactacttcggatgcctggaatccataagccaaataagaacggcaacccgagataaaaaggacacggtgacccgggagaaacacccaaagaaaccttttcagaagtggatgaagaagagagcaatcaaaaaaggtaattatcttcggttccagcgtttattttatcttgatagagggaaactggctaaaatcattttagatgatattgaatgcttgtcttgtgacataccactcagtgaaatttattcggtttttaaaacaagatgggaaacaactggtagctttaaaagccttggggactttaaaacttacgggaaggctgacaacactgccttcagagaattaattacggctaaagaaattgagaaaaatgtgcaggaaatgagcaaaggctcggctcccggtccagacgggattactcttggggacgtcgtaaagatggatcccgagttttcccggaccatggagattttcaatttatggttaacaactggtaaaatcccggacatggtgagggggtgcagaaccgttttgattccaaaatcatcaaagccggatcgtttgaaagacattaataactggagacctatcacgatcggttccatcttgctgagactgttctccaggattgtaacagctaggctgagcaaagcgtgccccctgaacccaaggcaaagaggctttatcagagcggcgggatgctctgaaaacttaaaactcctgcaaactataatttggtcggccaaaagagaacacagaccactgggtgttgtattcgtggacatcgccaaggcttttgacaccgtaagccaccagcacatcattcatgctttgcagcaaagagaggtggatccccacatcgtcggtctggtgagcaatatgtacgagaacatcagtacgtatatcaccacaaagaggaacacacacacagacaaaatccagatccgggttggagtaaagcagggtgacccgatgtcgccccttttatttaacctggcaatggaccctctattatgcaagctggaagagagtggcaaaggataccaccgaggacagagcagcatcacagcgatggcatttgcagacgatctggttttgctgagcgactcctgggaaaatatgaatacaaatattagcatactggagaccttctgcaatctgaccggactcaaaacacaggggcaaaagtgccacggcttttacatcaagccgacaaaggactcttacaccatcaatgactgcgctgcctggactatcaacggcacacccctgaacatgatcgaccccggcgaatctgagaaatacctcggcctgcagtttgacccgtggattggaatagcaaggtccggtctctccacaaaactagatttttggcttcagcggatcgatcaagcaccacttaaacctctgcagaaaactgatattctcaaaacatacaccatccctcggctgatctacatagctgaccactcagaagtgaaaagcgcactactcgaaacccttgaccagaagatccggacagcggtcaaggaatggcttcacctacctccgtgcacctgcgatgccatcctgtactcgagcacgagagacggcggtttgggcatcaccaaattggcaggactgatccccagcgtgcaggcccgtagactgcatcggatcgcacagtcatctgacgatacgatgaaatgcttcatggaaaaagagaaaatggaacagctgcataagaaattgtggattcaagctggaggggacagagagaacataccctcgatttgggaagcaccaccgtcgagtgaaccaccaaacaacgtgagcacaaattcggaatgggaagcaccgacccagaaagataaatttccaaagccttgcaattggaggaaaaacgaattcaaaaaatggaccaaattggcatcccaaggccgcggaattgtaaattttgaaagagacaaaattagtaaccattggatccaatactacagacgcatacctcacaggaaactcctcactgcactacaactcagggccaacgtttaccccacgagagaatttctagccaggggtagacaagaccaatacatcaaggcgtgtaggcactgcgatgcggacaacgaatcctgcgcccacatcatcggcaactgcccagtgacacaggacgcccgaatcaagaggcacaattacatctgcgaactgcttctcgaggaggcgaagaagaaggactgggtagtgttcaaggaaccgcacataagggattccaacaaggaactgtacaaacctgacctgatatttgtgaaggatgggcgtgcacttgtcgtggatgtgacagtacggtatgaagcagccaaatcatcgctggaggaagccgctgcagagaaagtgagaaagtacaaacacctggaaacggaagtaagacatctcacgaatgcaaaggacgttacttttgtgggctttcccctaggagcgcgggggaaatggcaccaagataactttaaacttttgactgagcttggcctctccaaatcgaggcaagtgaaaatggcagagactttttccacagtagcgctcttttcatctgtggacattgtacatatgtttgccagtagggccagaaaatctatggttatgtgataataggctgccttctgcggggcttgccttctggccatgcccttcttctctcccttgcacctgtacctcttggtctttgaataaagcctgagtaggaaggaccggtaaaaaaaaaaaaaaaaaaaaaaaaaaaaaaacgttgactaaaaaaaaaaaaaaaaaaaaaaaaaaaaaaaaaaaaaaaaaaaaaaaaaaaaaaaaaaaaaaaaaaaaaa

SEQ ID NO: 11734 - DNA, 4439 bp, synthetic construct
  source 1..4439: mol_type = other DNA
gaaataagagagaaaagaagagtaagaagaaatataagagaattcgccaccatggcttcttgcccgaaacctggccccccggtttcagcaggggcaatgagtttggaaagtggactgaccacccactccgttctcgccatcgaacgtggtcccaattcgttggcaaattccggatcagactttgggggggggggtctggggctaccgttacgcctattgagggtatcggtcggcactcagacctcccgctccgactgggtagacctggtgtcctggagccacccaggacccacgtctaagtcccagcaggttgacctggtgtctttatttcctaaacaccgggttgacctgttatccaaaaacgaccaggtagacctggtggctcaatttttaccatctaaatttccccccaatttggcagaaaatgatttggctttgctggtgaacttagagttctacagatcggatttgcatgtgtatgagtgtgttcataaggctgcacattgggagggattaagtggtttgcctgaggtgtatgaacaacttgcaccacaaccgtgtgtgggagaaactttacattctagcctcccacgagacagtgaactgtttgtgcctgaagaggggagcagcgagaaggagagcgaggacgcgccaaaaacatctcctccgacgcctgggaaacatggtttggaacagactggggaggaaaaagtgatggtgactgttcctgacaaaaatccaccttgtccttgctgtggtacccgggtaaactctgtgttgaatctgattgaacatctgaaagtgtcacacgggaaaaggggggtttgttttcggtgtgcaaaatgtggaaaggaaaatagtaactatcacagtgttgtttgtcattttaagaaatgcaggggtccagagacggagaaagccccagctggggagtggatttgtgaggtatgcaacagagattttacaaccaaaattggcctgggacaacacaagagattggcacacccagcagtgagaaatcaggaaaggatcgttgcttcccaaccgaaagaaacatcaaatagaggtgctcacaaaaggtgctggacaaaggaggaggaagaattactaataagactggaggctcagttcgagggaaacaaaaatattaataagcttattgcagaacacataaccaccaaaacagctaagcagatcagtgacaaaaggcgattgctgtccagaaagccagcagaggagccacgtgaggagcctggaacgtgtcatcacaccaggagagcagctgcgagcctgagaacggagcctgagatgagtcatcacgcccaggcagaggacagagataatggacctgggagacgccctctgccaggcagggcagctgccggagggagaacaatggacgagataagacgccaccctgataagggcaacggacagcagagacccaccaagcaaaaatcagaagaacagctgcaggcttactataaaaagacactagaggaacgactttcagctggggcacttaacaccttcccccgagcattcaagcaggtaatggaaggccgggatataaagctagtaatcaatcagacagcgcaggactacttcggatgcctggaatccataagccaaataagaacggcaacccgagataaaaaggacacggtgacccgggagaaacacccaaagaaaccttttcagaagtggatgaagaagagagcaatcaaaaaaggtaattatcttcggttccagcgtttattttatcttgatagagggaaactggctaaaatcattttagatgatattgaatgcttgtcttgtgacataccactcagtgaaatttattcggtttttaaaacaagatgggaaacaactggtagctttaaaagccttggggactttaaaacttacgggaaggctgacaacactgccttcagagaattaattacggctaaagaaattgagaaaaatgtgcaggaaatgagcaaaggctcggctcccggtccagacgggattactcttggggacgtcgtaaagatggatcccgagttttcccggaccatggagattttcaatttatggttaacaactggtaaaatcccggacatggtgagggggtgcagaaccgttttgattccaaaatcatcaaagccggatcgtttgaaagacattaataactggagacctatcacgatcggttccatcttgctgagactgttctccaggattgtaacagctaggctgagcaaagcgtgccccctgaacccaaggcaaagaggctttatcagagcggcgggatgctctgaaaacttaaaactcctgcaaactataatttggtcggccaaaagagaacacagaccactgggtgttgtattcgtggacatcgccaaggcttttgacaccgtaagccaccagcacatcattcatgctttgcagcaaagagaggtggatccccacatcgtcggtctggtgagcaatatgtacgagaacatcagtacgtatatcaccacaaagaggaacacacacacagacaaaatccagatccgggttggagtaaagcagggtgacccgatgtcgccccttttatttaacctggcaatggaccctctattatgcaagctggaagagagtggcaaaggataccaccgaggacagagcagcatcacagcgatggcatttgcagacgatctggttttgctgagcgactcctgggaaggcatgaatacaaatattagcatactggagaccttctgcaatctgaccggactcaaaacacaggggcaaaagtgccacggcttttacatcaagccgacaaaggactcttacaccatcaatgactgcgctgcctggactatcaacggcacacccctgaacatgatcgaccccggcgaatctgagaaatacctcggcctgcagtttgacccgtggattggaatagcaaggtccggtctctccacaaaactagatttttggcttcagcggatcgatcaagcaccacttaaacctctgcagaaaactgatattctcaaaacatacaccatccctcggctgatctacatagctgaccactcagaagtgaaaagcgcactactcgaaacccttgaccagaagatccggacagcggtcaaggaatggcttcacctacctccgtgcacctgcgatgccatcctgtactcgagcacgagagacggcggtttgggcatcaccaaattggcaggactgatccccagcgtgcaggcccgtagactgcatcggatcgcacagtcatctgacgatacgatgaaatgcttcatggaaaaagagaaaatggaacagctgcataagaaattgtggattcaagctggaggggacagagagaacataccctcgatttgggaagcaccaccgtcgagtgaaccaccaaacaacgtgagcacaaattcggaatgggaagcaccgacccagaaagataaatttccaaagccttgcaattggaggaaaaacgaattcaaaaaatggaccaaattggcatcccaaggccgcggaattgtaaattttgaaagagacaaaattagtaaccattggatccaatactacagacgcatacctcacaggaaactcctcactgcactacaactcagggccaacgtttaccccacgagagaatttctagccaggggtagacaagaccaatacatcaaggcgtgtaggcactgcgatgcggacaacgaatcctgcgcccacatcatcggcaactgcccagtgacacaggacgcccgaatcaagaggcacaattacatctgcgaactgcttctcgaggaggcgaagaagaaggactgggtagtgttcaaggaaccgcacataagggattccaacaaggaactgtacaaacctgacctgatatttgtgaaggatgggcgtgcacttgtcgtggatgtgacagtacggtatgaagcagccaaatcatcgctggaggaagccgctgcagagaaagtgagaaagtacaaacacctggaaacggaagtaagacatctcacgaatgcaaaggacgttacttttgtgggctttcccctaggagcgcgggggaaatggcaccaagataactttaaacttttgactgagcttggcctctccaaatcgaggcaagtgaaaatggcagagactttttccacagtagcgctcttttcatctgtggacattgtacatatgtttgccagtagggccagaaaatctatggttatgtgataataggctgccttctgcggggcttgccttctggccatgcccttcttctctcccttgcacctgtacctcttggtctttgaataaagcctgagtaggaaggaccggtaaaaaaaaaaaaaaaaaaaaaaaaaaaaaaacgttgactaaaaaaaaaaaaaaaaaaaaaaaaaaaaaaaaaaaaaaaaaaaaaaaaaaaaaaaaaaaaaaaaaaaaaa

SEQ ID NO: 11735 - DNA, 4564 bp, synthetic construct
  source 1..4564: mol_type = other DNA
ggtctagttacaactgggcatcgctgcagagatcgcacctcctcgtggtcccgctggtagcccttcgaagggtgactaagtcgatctctgccccaggtacggagccgttgggactcaccagtccaacgtaactcctgcctaaattcggtgaaacaaattcctcggtaaaaagccccatggcttcttgcccgaaacctggccccccggtttcagcaggggcaatgagtttggaaagtggactgaccacccactccgttctcgccatcgaacgtggtcccaattcgttggcaaattccggatcagactttgggggggggggtctggggctaccgttacgcctattgagggtatcggtcggcactcagacctcccgctccgactgggtagacctggtgtcctggagccacccaggacccacgtctaagtcccagcaggttgacctggtgtctttatttcctaaacaccgggttgacctgttatccaaaaacgaccaggtagacctggtggctcaatttttaccatctaaatttccccccaatttggcagaaaatgatttggctttgctggtgaacttagagttctacagatcggatttgcatgtgtatgagggcgttcataaggctgcacattgggagggattaagtggtttgcctgaggtgtatgaacaacttgcaccacaaccgtgtgtgggagaaactttacattctagcctcccacgagacagtgaactgtttgtgcctgaagaggggagcagcgagaaggagagcgaggacgcgccaaaaacatctcctccgacgcctgggaaacatggtaagaggcagactggggaggaaaaagtgatggtgactgttcctgacaaaaatccaccttgtccttgctgtggtacccgggtaaactctgtgttgaatctgattgaacatctgaaagtgtcacacgggaaaaggagggtttgttttcggtgtgcaaaatgtggaaaggaaaatagtaactatcacagtgttgtttgtcattttaagaaatgcaggggtccagagacggagaaagccccagctggggagtggatttgtgaggtatgcaacagagattttacaaccaaaattggcctgggacaacacaagagattggcacacccagcagtgagaaatcaggaaaggatcgttgcttcccaaccgaaagaaacatcaaatagaggtgctcacaaaaggtgctggacaaaggaggaggaagaattactaataagactggaggctcagttcgagggaaacaaaaatattaataagcttattgcagaacacataaccaccaaaacagctaagcagatcagtgacaaaaggcgattgctgtccagaaagccagcagaggagccacgtgaggagcctggaacgtgtcatcacaccaggagagcagctgcgagcctgagaacggagcctgagatgagtcatcacgcccaggcagaggacagagataatggacctgggagacgccctctgccaggcagggcagctgccggagggagaacaatggacgagataagacgccaccctgataagggcaacggacagcagagacccaccaagcaaaaatcagaagaacagctgcaggcttactataaaaagacactagaggaacgactttcagctggggcacttaacaccttcccccgagcattcaagcaggtaatggaaggccgggatataaagctagtaatcaatcagacagcgcaggactgcttcggatgcctggaatccataagccaaataagaacggcaacccgagataaaaagtacacggtgacccggaagaaacacccaaagaaaccttttcagaagtggatgaagaagagagcaatcaaaaaaggtaattatcttcggttccagcgtttattttatcttgatagagggaaactggctaaaatcattttagatgatattgaatgcttgtcttgtgacataccactcagtgaaatttattcggtttttaaaacaagatgggaaacaactggtagctttaaaagccttggggactttaaaacttacgggaaggctgacaacactgccttcagagaattaattacggctaaagaaattgagaaaaatgtgcaggaaatgagcaaaggctcggctcccggtccagacgggattactcttggggacgtcgtaaagatggatcccgagggctcccggaccatggagattttcaatttatggttaacaactggtaaaatcccggacatggtgagggggtgcagaaccgttttgattccaaaatcatcagacccggatcgtttgaaagacattaataactggagacctatcacgatcggttccatcttgctgagactgttctccaggattgtaacagctaggctgagcaaagcgtgccccctgaacccaaggcaaagaggctttatcagagcggcgggatgctctgaaaacttaaaactcctgcaaactataatttggtcggccaaaagagaacacagaccactgggtgttgtattcgtggacatcgccaaggcttttgacaccgtaagccaccagcacatcattcatgctttgcagcaaagagaggtggatccccacatcgtcggtctggtgagcaatatgtacgagaacatcagtacgtatatcaccacaaagaggaacacacacacagacaaaatccagatccgggttggagtaaagcagggtgacccgatgtcgccccttttatttaacctggcaatggaccctctattatgcaagctggaagagagtggcaaaggataccaccgaggacagagcagcatcacagcgatggcatttgcagacgatctggttttgctgagcgactcctgggaaggcatgaatacaaatattagcatactggagaccttctgcaatctgaccggactcaaaacacaggggcaaaagtgccacggcttttacatcaagccgacaaagaagtcttacaccatcaatgactgcgctgcctggactatcaacggcacacccctgaacatgatcgaccccggcgaatctgagaaatacctcggcctgcagtttgacccgtggattggaatagcaaggtccggtctctccacaaaactagatttttggcttcagcggatcgatcaagcaccacttaaacctctgcagaaactggatattctcaaaacatacaccatccctcggctgatctacatagctgaccactcagaagtgaaaactgcactactcgaaacccttgaccagaagatccggacagcggtcaaggaatggcttcacctacctccgtgcacctgcgatgccatcctgtactcgagcacgagagacggcggtttgggcatcaccaaattggcaggactgatccccagcgtgcaggcccgtagactgcatcggatcgcacagtcatctgacgatacgatgaaatgcttcatggaaaaagagaaaatggaacagctgcataagaaattgtggattcaagctggaggggacagagagaacataccctcgatttgggaagcaccaccgtcgagtgaaccaccaaacaacgtgagcacaaattcggaatgggaagcaccgacccagaaagataaatttccaaagccttgcaattggaggaaaaacgaattcaaaaaatggaccaaattggcatcccaaggccgcggaattgtaaattttgaaagagacaaaattagtaaccattggatccaatactacagacgcatacctcacaggaaactcctcactgcactacaactcagggccaacgtttaccccacgagagaatttctagccaggggtagacaagaccaatacatcaaggcgtgtaggcactgcgatgcggacattgaatcctgcgcccacatcatcggcaactgcccagtgacacaggacgcccgaatcaagaggcacaataagatctgcgaactgcttctcgaggaggcgaagaagaaggactgggtagtgttcaaggaaccgcacataagggattccaacaaggaactgtacaaacctgacctgatatttgtgaaggatggccgtgcacttgtcgtggatgtgacagtacggtatgaagcagccaaatcatcgctggaggaagccgctgcagagaaagtgagaaagtacaaacacctggaaacggaagtaagacatctcacgaatgcaaaggacgttacttttgtgggctttcccctaggagcgcgggggaaatggcaccaagataactttaaacttttgactgagcttggcctctccaaatcgaggcaagtgaaaatggcagagactttttccacagtagcgctcttttcatctgtggacattgtacatatgtttgccagtagggccagaaaatctatggttatgtgataataggctgccttctgcggggcttgccttctggccatgcccttcttctctcccttgcacctgtacctcttggtctttgaataaagcctgagtaggaaggaccggtaaaaaaaaaaaaaaaaaaaaaaaaaaaaaaacgttgactaaaaaaaaaaaaaaaaaaaaaaaaaaaaaaaaaaaaaaaaaaaaaaaaaaaaaaaaaaaaaaaaaaaaaa

SEQ ID NO: 11736 - DNA, 4564 bp, synthetic construct
  source 1..4564: mol_type = other DNA
ggtctagttacaactgggcatcgctgcagagatcgcacctcctcgtggtcccgctggtagcccttcgaagggtgactaagtcgatctctgccccaggtacggagccgttgggactcaccagtccaacgtaactcctgcctaaattcggtgaaacaaattcctcggtaaaaagccccatggcttcttgcccgaaacctggccccccggtttcagcaggggcaatgagtttggaaagtggactgaccacccactccgttctcgccatcgaacgtggtcccaattcgttggcaaattccggatcagactttgggggggggggtctggggctaccgttacgcctattgagggtatcggtcggcactcagacctcccgctccgactgggtagacctggtgtcctggagccacccaggacccacgtctaagtcccagcaggttgacctggtgtctttatttcctaaacaccgggttgacctgttatccaaaaacgaccaggtagacctggtggctcaatttttaccatctaaatttccccccaatttggcagaaaatgatttggctttgctggtgaacttagagttctacagatcggatttgcatgtgtatgagtgtgttcataaggctgcacattgggagggattaagtggtttgcctgaggtgtatgaacaacttgcaccacaaccgtgtgtgggagaaactttacattctagcctcccacgagacagtgaactgtttgtgcctgaagaggggagcagcgagaaggagagcgaggacgcgccaaaaacatctcctccgacgcctgggaaacatggtttggaacagactggggaggaaaaagtgatggtgactgttcctgacaaaaatccaccttgtccttgctgtggtacccgggtaaactctgtgttgaatctgattgaacatctgaaagtgtcacacgggaaaaggagggtttgttttcggtgtgcaaaatgtggaaaggaaaatagtaactatcacagtgttgtttgtcattttccaaaatgcaggggtccagagacggagaaagccccagctggggagtggatttgtgaggtatgcaacagagattttacaaccaaaattggcctgggacaacacaagagattggcacacccagcagtgagaaatcaggaaaggatcgttgcttcccaaccgaaagaaacatcaaatagaggtgctcacaaaaggtgctggacaaaggaggaggaagaattactaataagactggaggctcagttcgagggacacaaaaatattaataagcttattgcagaacacataaccaccaaaacagctaagcagatcagtgacaaaaggcgattgctgtccagaaagccagcagaggagccacgtgaggagcctggaacgtgtcatcacaccaggagagcagctgcgagcctgagaacggagcctgagatgagtcatcacgcccaggcagaggacagagataatggacctgggagacgccctctgccaggcagggcagctgccggagggagaacaatggacgagataagacgccaccctgataagggcaacggacagcagagacccaccaagcaaaaatcagaagaacagctgcaggcttactataaaaagacactagaggaacgactttcagctggggcacttaacaccttcccccgagcattcaagcaggtaatggaaggccgggatataaagctagtaatcaatcagacagcgcaggactgcttcggatgcctggaatccataagccaaataagaacggcaacccgagataaaaagtacacggtgacccgggagaaacacccaaagaggccttttcagaagtggatgaaggacagagcaatcaaaaaaggtaattatcttcggttccagcgtttattttatcttgatagagggaaactggctaaaatcattttagatgatattgaatgcttgtcttgtgacataccactcagtgaaatttattcggtttttaaaacaagatgggaaacaactggtagctttaaaagccttggggactttaaaacttacgggaaggctgacaacactgccttcagagaattaattacggctaaagaaattgagaaaaatgtgcaggaaatgagcaaaggctcggctcccggtccagacgggattactcttggggacgtcgtaaagatggatcccgagttttccctgaccatggagattttcaatttatggttaacaactggtaaaatcccggacatggtgagggggtgcagaaccgttttgattccaaaatcatcaaagccggatcgtttgaaagacattaataactggagacctatcacgatcggttccatcttgctgagactgttctccaggattgtaacagctaggctgagcaaagcgtgccccctgaacccaaggcaaagaggctttatcagagcggcgggatgctctgaaaacttaaaactcctgcaaactataatttggtcggccaaaagagaacacagaccactgggtgttgtattcgtggacatcgccaaggcttttgacaccgtaagccaccagcacatcattcatgctttgcagcaaagagaggtggatccccacatcgtcggtctggtgagcaatatgtacgagaacatcagtacgtatatcaccacaaagaggaacacacacacagacaaaatccagatccgggttggagtaaagcagggtgacccgatgtcgccccttttatttaacctggcaatggaccctctattatgcaagctggaagagagtggcaaaggataccaccgaggacagagcagcatcacagcgatggcatttgcagacgatctggttttgctgagcgactcctgggaaaatatgaatacaaatattagcatactggagaccttctgcaatctgaccggactcaaaacacaggggcaaaagtgccacggcttttacatcaagccgacaaaggactcttacaccatcaatgactgcgctgcctggactatcaacggcacacccctgaacatgatcgaccccggcgaatctgagaaatacctcggcctgcagtttgacccgtggattggaatagcaaggtccggtctctccacaaaactagatgagtggcttcagcggatcgatcaagcaccacttaaacctctgcagaaaactgatattctcaaaacatacaccatccctcggctgatctacatagctgaccactcagaagtgaaagccgcactactcgaaacccttgaccagaagatccggacagcggtcaaggaatggcttcacctacctccgtgcacctgcgatgccatcctgtactcgagcacgagagacggcggtttgggcatcaccaaattggcaggactgatccccagcgtgcaggcccgtagactgcatcggatcgcacagtcatctgacgatacgatgaaatgcttcatggaaaaagagaggatggaacagctgcataagaaattgtggattcaagctggaggggacagagagaacataccctcgatttgggaagcaccaccgtcgagtgaaccaccaaacaacgtgagcacaaattcggaatgggaagcaccgacccagaaacccaaatttccaaagccttgcaattggaggaaaaacgaattcaaaaaatggaccaaattggcatcccaaggccgcggaattgtaaattttgaaagagacaaaattagtaaccattggatccaatactacagacgcatacctcacaggaaactcctcactgcactacaactcagggccaacgtttaccccacgagagaatttctagccaggggtagacaagaccaatacatcaaggcgtgtaggcactgcgatgcggacattgaatcctgcgcccacatcatcggcaactgcccagtgacacaggacgcccgaatcaagaggcacaattacatctgcgaactgcttctcgaggaggcgaagaagaaggactgggtagtgttcaaggaaccgcacataagggattccaacaaggaactgtacaaacctgacctgatatttgtgaaggatggccgtgcacttgtcgtggatgtgacagtacggtatgaagcagccaaatcatcgctggaggaagccgctgcagagaaagtgagaaagtacaaacacctggaaacggaagtaagacatctcacgaatgcaaaggacgttacttttgtgggctttcccctaggagcgcgggggaaatggcaccaagataactttaaacttttgactgagcttggcctctccaaatcgaggcaagtgaaaatggcagagactttttccacagtagcgctcttttcatctgtggacattgtacatatgtttgccagtagggccagaaaatctatggttatgtgataataggctgccttctgcggggcttgccttctggccatgcccttcttctctcccttgcacctgtacctcttggtctttgaataaagcctgagtaggaaggaccggtaaaaaaaaaaaaaaaaaaaaaaaaaaaaaaacgttgactaaaaaaaaaaaaaaaaaaaaaaaaaaaaaaaaaaaaaaaaaaaaaaaaaaaaaaaaaaaaaaaaaaaaaa

SEQ ID NO: 11737 - DNA, 4564 bp, synthetic construct
  source 1..4564: mol_type = other DNA
ggtctagttacaactgggcatcgctgcagagatcgcacctcctcgtggtcccgctggtagcccttcgaagggtgactaagtcgatctctgccccaggtacggagccgttgggactcaccagtccaacgtaactcctgcctaaattcggtgaaacaaattcctcggtaaaaagccccatggcttcttgcccgaaacctggccccccggtttcagcaggggcaatgagtttggaaagtggactgaccacccactccgttctcgccatcgaacgtggtcccaattcgttggcaaattccggatcagactttgggggggggggtctggggctaccgttacgcctattgagggtatcggtcggcactcagacctcccgctccgactgggtagacctggtgtcctggagccacccaggacccacgtctaagtcccagcaggttgacctggtgtctttatttcctaaacaccgggttgacctgttatccaaaaacgaccaggtagacctggtggctcaatttttaccatctaaatttccccccaatttggcagaaaatgatttggctttgctggtgaacttagagttctacagatcggatttgcatgtgtatgagtgtgttcataaggctgcacattgggagggattaagtggtttgcctgaggtgtatgaacaacttgcaccacaaccgtgtgtgggagaaactttacattctagcctcccacgagacagtgaactgtttgtgcctgaagaggggagcagcgagaaggagagcgaggacgcgccaaaaacatctcctccgacgcctgggaaacatggtttggaacagactggggaggaaaaagtgatggtgactgttcctgacaaaaatccaccttgtccttgctgtggtacccgggtaaactctgtgttgaatctgattgaacatctgaaagtgtcacacgggaaaaggggggtttgttttcggtgtgcaaaatgtggaaaggaaaatagtaactatcacagtgttgtttgtcattttaagaaatgcaggggtccagagacggagaaagccccagctggggagtggatttgtgaggtatgcaacagagattttacaaccaaaattggcctgggacaacacaagagattggcacacccagcagtgagaaatcaggaaaggatcgttgcttcccaaccgaaagaaacatcaaatagaggtgctcacaaaaggtgctggacaaaggaggaggaagaattactaataagactggaggctcagttcgagggacacaaaaatattaataagcttattgcagaacacataaccaccaaaacagctaagcagatcagtgacaaaaggcgattgctgtccagaaagccagcagaggagccacgtgaggagcctggaacgtgtcatcacaccaggagagcagctgcgagcctgagaacggagcctgagatgagtcatcacgcccaggcagaggacagagataatggacctgggagacgccctctgccaggcagggcagctgccggagggagaacaatggacgagataagacgccaccctgataagggcaacggacagcagagacccaccaagcaaaaatcagaagaacagctgcaggcttactataaaaagacactagaggaacgactttcagctggggcacttaacaccttcccccgagcattcaagcaggtaatggaaggccgggatataaagctagtaatcaatcagacagcgcaggactgcttcggatgcctggaatccataagccaaataagaacggcaacccgagataaaaagtacacggtgacccgggagaaacacccaaagaggccttttcagaagtggatgaagaagagagcaatcaaaaaaggtaattatcttcggttccagcgtttattttatcttgatagagggaaactggctaaaatcattttagatgatattgaatgcttgtcttgtgacataccactcagtgaaatttattcggtttttaaaacaagatgggaaacaactggtagctttaaaagccttggggactttaaaacttacgggaaggctgacaacactgccttcagagaattaattacggctaaagaaattgagaaaaatgtgcaggaaatgagcaaaggctcggctcccggtccagacgggattactcttggggacgtcgtaaagatggatcccgagttttccctgaccatggagattttcaatttatggttaacaactggtaaaatcccggacatggtgagggggtgcagaaccgttttgattccaaaatcatcaaagccggatcgtttgaaagacattaataactggagacctatcacgatcggttccatcttgctgagactgttctccaggattgtaacagctaggctgagcaaagcgtgccccctgaacccaaggcaaagaggctttatcagagcggcgggatgctctgaaaacttaaaactcctgcaaactataatttggtcggccaaaagagaacacagaccactgggtgttgtattcgtggacatcgccaaggcttttgacaccgtaagccaccagcacatcattcatgctttgcagcaaagagaggtggatccccacatcgtcggtctggtgagcaatatgtacgagaacatcagtacgtatatcaccacaaagaggaacacacacacagacaaaatccagatccgggttggagtaaagcagggtgacccgatgtcgccccttttatttaacctggcaatggaccctctattatgcaagctggaagagagtggcaaaggataccaccgaggacagagcagcatcacagcgatggcatttgcagacgatctggttttgctgagcgactcctgggaaaatatgaatacaaatattagcatactggagaccttctgcaatctgaccggactcaaaacacaggggcaaaagtgccacggcttttacatcaagccgacaaaggactcttacaccatcaatgactgcgctgcctggactatcaacggcacacccctgaacatgatcgaccccggcgaatctgagaaatacctcggcctgcagtttgacccgtggattggaatagcaaggtccggtctctccacaaaactagatgagtggcttcagcggatcgatcaagcaccacttaaacctctgcagaaaactgatattctcaaaacatacaccatccctcggctgatctacatagctgaccactcagaagtgaaagccgcactactcgaaacccttgaccagaagatccggacagcggtcaaggaatggcttcacctacctccgtgcacctgcgatgccatcctgtactcgagcacgagagacggcggtttgggcatcaccaaattggcaggactgatccccagcgtgcaggcccgtagactgcatcggatcgcacagtcatctgacgatacgatgaaatgcttcatggaaaaagagaggatggaacagctgcataagaaattgtggattcaagctggaggggacagagagaacataccctcgatttgggaagcaccaccgtcgagtgaaccaccaaacaacgtgagcacaaattcggaatgggaagcaccgacccagaaacccaaatttccaaagccttgcaattggaggaaaaacgaattcaaaaaatggaccaaattggcatcccaaggccgcggaattgtaaattttgaaagagacaaaattagtaaccattggatccaatactacagacgcatacctcacaggaaactcctcactgcactacaactcagggccaacgtttaccccacgagagaatttctagccaggggtagacaagaccaatacatcaaggcgtgtaggcactgcgatgcggacattgaatcctgcgcccacatcatcggcaactgcccagtgacacaggacgcccgaatcaagaggcacaattacatctgcgaactgcttctcgaggaggcgaagaagaaggactgggtagtgttcaaggaaccgcacataagggattccaacaaggaactgtacaaacctgacctgatatttgtgaaggatggccgtgcacttgtcgtggatgtgacagtacggtatgaagcagccaaatcatcgctggaggaagccgctgcagagaaagtgagaaagtacaaacacctggaaacggaagtaagacatctcacgaatgcaaaggacgttacttttgtgggctttcccctaggagcgcgggggaaatggcaccaagataactttaaacttttgactgagcttggcctctccaaatcgaggcaagtgaaaatggcagagactttttccacagtagcgctcttttcatctgtggacattgtacatatgtttgccagtagggccagaaaatctatggttatgtgataataggctgccttctgcggggcttgccttctggccatgcccttcttctctcccttgcacctgtacctcttggtctttgaataaagcctgagtaggaaggaccggtaaaaaaaaaaaaaaaaaaaaaaaaaaaaaaacgttgactaaaaaaaaaaaaaaaaaaaaaaaaaaaaaaaaaaaaaaaaaaaaaaaaaaaaaaaaaaaaaaaaaaaaaa

SEQ ID NO: 11738 - DNA, 5407 bp, synthetic construct
  source 1..5407: mol_type = other DNA
ggtctagttacaactgggcatcgctgcagagatcgcacctcctcgtggtcccgctggtagcccttcgaagggtgactaagtcgatctctgccccaggtacggagccgttgggactcaccagtccaacgtaactcctgcctaaattcggtgaaacaaattcctcggtaaaaagccccatgggaactgcactaacaccgctcctgacgaagttcgccacgcgctacgagatgggtaccacgcctgaagaagtggcgaacacgctcaagcagacctgtttcaagggccaggtcaatgattcgcagatggtcgccctgctgatcgtggcagaccagtacaagcttaaccccttcaccaaggagttgtacgcattccccgacaagaacaacggcatcgtgccggttgttggtgtggatggctgggctcggatcatcaacgagaacccacagttcgatggcatggaattctcaatggaccagcagggaaccgaatgcacctgcaagatctatcggaaggaccgcagccatgccatcagcgcgactgagtacatggccgagtgcaagcggaacacccagccttggcagtcccatccgcgccggatgcttcgccacaaggcaatgatccagtgcgcacgcctcgcgttcgggttcgccggcatatacgaccaggacgaggccgagcggatcgttgaacgagacgtcactcccgcagagcagtacgaggacgtcagcgaggcgatctgcctgatcaaggactccccaacaatggaggacttgcaggcagcattcagcaatgcctggaaagcctataagacaaagggcgcgcgcgaccagcttacggcggccaaggaccagcggaagaaagaattgctggacgcccctatagacgttgaattcgaggagaccggcgatgatcgagcagcgtctggaggatctagcggaggatcctctggcagcgagacaccaggaacaagcgagtcagcaacaccagagagcagtggcggcagcagcggcggcagcagcatggcttcttgcccgaaacctggccccccggtttcagcaggggcaatgagtttggaaagtggactgaccacccactccgttctcgccatcgaacgtggtcccaattcgttggcaaattccggatcagactttgggggggggggtctggggctaccgttacgcctattgagggtatcggtcggcactcagacctcccgctccgactgggtagacctggtgtcctggagccacccaggacccacgtctaagtcccagcaggttgacctggtgtctttatttcctaaacaccgggttgacctgttatccaaaaacgaccaggtagacctggtggctcaatttttaccatctaaatttccccccaatttggcagaaaatgatttggctttgctggtgaacttagagttctacagatcggatttgcatgtgtatgagtgtgttcataaggctgcacattgggagggattaagtggtttgcctgaggtgtatgaacaacttgcaccacaaccgtgtgtgggagaaactttacattctagcctcccacgagacagtgaactgtttgtgcctgaagaggggagcagcgagaaggagagcgaggacgcgccaaaaacatctcctccgacgcctgggaaacatggtttggaacagactggggaggaaaaagtgatggtgactgttcctgacaaaaatccaccttgtccttgctgtggtacccgggtaaactctgtgttgaatctgattgaacatctgaaagtgtcacacgggaaaaggagggtttgttttcggtgtgcaaaatgtggaaaggaaaatagtaactatcacagtgttgtttgtcattttccaaaatgcaggggtccagagacggagaaagccccagctggggagtggatttgtgaggtatgcaacagagattttacaaccaaaattggcctgggacaacacaagagattggcacacccagcagtgagaaatcaggaaaggatcgttgcttcccaaccgaaagaaacatcaaatagaggtgctcacaaaaggtgctggacaaaggaggaggaagaattactaataagactggaggctcagttcgagggacacaaaaatattaataagcttattgcagaacacataaccaccaaaacagctaagcagatcagtgacaaaaggcgattgctgtccagaaagccagcagaggagccacgtatggagcctggaacgtgtcatcacaccaggagagcagctgcgagcctgagaacggagcctgagatgagtcatcacgcccaggcagaggacagagataatggacctgggagacgccctctgccaggcaggcccgctgccggagggagaacaatggacgagataagacgccaccctgataagggcaacggacagcagagacccaccaagcaaaaatcagaagaacagctgcaggcttactataaaaagacactagaggaacgactttcagctggggcacttaacaccttcccccgagcattcaagcaggtaatggaaggccgggatataaagctagtaatcaatcagacagcgcaggactgcttcggatgcctggaatccataagccaaataagaacggcaacccgagataaaaagtacacggtgacccgggagaaacacccaaagaggccttttcagaagtggatgaaggacagagcaatcaaaaaaggtaattatcttcggttccagcgtttattttatcttgatagagggaaactggctaaaatcattttagatgatattgaatgcttgtcttgtgacataccactcagtgaaatttattcggtttttaaaacaagatgggaaacaactggtagctttaaaagccttggggactttaaaacttacgggaaggctgacaacactgccttcagagaattaattacggctaaagaaattgagaaaaatgtgcaggaaatgagcaaaggctcggctcccggtccagacgggattactcttggggacgtcgtaaagatggatcccgagttttccctgaccatggagattttcaatttatggttaacaactggtaaaatcccggacatggtgagggggtgcagaaccgttttgattccaaaatcatcaaagccggatcgtttgaaagacattaataactggagacctatcacgatcggttccatcttgctgagactgttctccaggattgtaacagctaggctgagcaaagcgtgccccctgaacccaaggcaaagaggctttatcagagcggcgggatgctctgaaaacttaaaactcctgcaaactataatttggtcggccaaaagagaacacagaccactgggtgttgtattcgtggacatcgccaaggcttttgacaccgtaagccaccagcacatcattcatgctttgcagcaaagagaggtggatccccacatcgtcggtctggtgagcaatatgtacgagaacatcagtacgtatatcaccacaaagaggaacacacacacagacaaaatccagatccgggttggagtaaagcagggtgacccgatgtcgccccttttatttaacctggcaatggaccctctattatgcaagctggaagagagtggcaaaggataccaccgaggacagagcagcatcacagcgatggcatttgcagacgatctggttttgctgagcgactcctgggaaaatatgaatacaaatattagcatactggagaccttctgcaatctgaccggactcaaaacacaggggcaaaagtgccacggcttttacatcaagccgacaaaggactcttacaccatcaatgactgcgctgcctggactatcaacggcacacccctgaacatgatcgaccccggcgaatctgagaaatacctcggcctgcagtttgacccgtggattggaatagcaaggtccggtctctccacaaaactagatgagtggcttcagcggatcgatcaagcaccacttaaacctctgcagaaaactgatattctcaaaacatacaccatccctcggctgatctacatagctgaccactcagaagtgaaagccgcactactcgaaacccttgaccagaagatccggacagcggtcaaggaatggcttcacctacctccgtgcacctgcgatgccatcctgtactcgagcacgagagacggcggtttgggcatcaccaaattggcaggactgatccccagcgtgcaggcccgtagactgcatcggatcgcacagtcatctgacgatacgatgaaatgcttcatggaaaaagagaggatggaacagctgcataagaaattgtggattcaagctggaggggacagagagaacataccctcgatttgggaagcaccaccgtcgagtgaaccaccaaacaacgtgagcacaaattcggaatgggaagcaccgacccagaaacccaaatttccaaagccttgcaattggaggaaaaacgaattcaaaaaatggaccaaattggcatcccaaggccgcggaattgtaaattttgaaagagacaaaattagtaaccattggatccaatactacagacgcatacctcacaggaaactcctcactgcactacaactcagggccaacgtttaccccacgagagaatttctagccaggggtagacaagaccaatacatcaaggcgtgtaggcactgcgatgcggacattgaatcctgcgcccacatcatcggcaactgcccagtgacacaggacgcccgaatcaagaggcacaattacatctgcgaactgcttctcgaggaggcgaagaagaaggactgggtagtgttcaaggaaccgcacataagggattccaacaaggaactgtacaaacctgacctgatatttgtgaaggatggccgtgcacttgtcgtggatgtgacagtacggtatgaagcagccaaatcatcgctggaggaagccgctgcagagaaagtgagaaagtacaaacacctggaaacggaagtaagacatctcacgaatgcaaaggacgttacttttgtgggctttcccctaggagcgcgggggaaatggcaccaagataactttaaacttttgactgagcttggcctctccaaatcgaggcaagtgaaaatggcagagactttttccacagtagcgctcttttcatctgtggacattgtacatatgtttgccagtagggccagaaaatctatggttatgtgataataggctgccttctgcggggcttgccttctggccatgcccttcttctctcccttgcacctgtacctcttggtctttgaataaagcctgagtaggaaggaccggtaaaaaaaaaaaaaaaaaaaaaaaaaaaaaaacgttgactaaaaaaaaaaaaaaaaaaaaaaaaaaaaaaaaaaaaaaaaaaaaaaaaaaaaaaaaaaaaaaaaaaaaaa

SEQ ID NO: 11739 - DNA, 4439 bp, synthetic construct
  source 1..4439: mol_type = other DNA
gaaataagagagaaaagaagagtaagaagaaatataagagaattcgccaccatggcttcttgcccgaaacctggccccccggtttcagcaggggcaatgagtttggaaagtggactgaccacccactccgttctcgccatcgaacgtggtcccaattcgttggcaaattccggatcagactttgggggggggggtctggggctaccgttacgcctattgagggtatcggtcggcactcagacctcccgctccgactgggtagacctggtgtcctggagccacccaggacccacgtctaagtcccagcaggttgacctggtgtctttatttcctaaacaccgggttgacctgttatccaaaaacgaccaggtagacctggtggctcaatttttaccatctaaatttccccccaatttggcagaaaatgatttggctttgctggtgaacttagagttctacagatcggatttgcatgtgtatgagggcgttcataaggctgcacattgggagggattaagtggtttgcctgaggtgtatgaacaacttgcaccacaaccgtgtgtgggagaaactttacattctagcctcccacgagacagtgaactgtttgtgcctgaagaggggagcagcgagaaggagagcgaggacgcgccaaaaacatctcctccgacgcctgggaaacatggtttgagacagactggggaggaaaaagtgatggtgactgttcctgacaaaaatccaccttgtccttgctgtggtacccgggtaaactctgtgttgaatctgattgaacatctgaaagtgtcacacgggaaaaggggggtttgttttcggtgtgcaaaatgtggaaaggaaaatagtaactatcacagtgttgtttgtcattttaagaaatgcaggggtccagagacggagaaagccccagctggggagtggatttgtgaggtatgcaacagagattttacaaccaaaattggcctgggacaacacaagagattggcacacccagcagtgagaaatcaggaaaggatcgttgcttcccaaccgaaagaaacatcaaatagaggtgctcacaaaaggtgctggacaaaggaggaggaagaattactaataagactggaggctcagttcgagggaaacaaaaatattaataagcttattgcagaacacataaccaccaaaacagctaagcagatcagtgacaaaaggcgattgctgtccagaaagccagcagaggagccacgtatggagcctggaacgtgtcatcacaccaggagagcagctgcgagcctgagaacggagcctgagatgagtcatcacgcccaggcagaggacagagataatggacctgggagacgccctctgccaggcagggcagctgccggagggagaacaatggacgagataagacgccaccctgataagggcaacggacagcagagacccaccaagcaaaaatcagaagaacagctgcaggcttactataaaaagacactagaggaacgactttcagctggggcacttaacaccttcccccgagcattcaagcaggtaatggaaggccgggatataaagctagtaatcaatcagacagcgcaggactgcttcggatgcctggaatccataagccaaataagaacggcaacccgagataaaaaggacacggtgacccgggagaaacacccaaagaaaccttttcagaagtggatgaagaagagagcaatcaaaaaaggtaattatcttcggttccagcgtttattttatcttgatagagggaaactggctaaaatcattttagatgatattgaatgcttgtcttgtgacataccactcagtgaaatttattcggtttttaaaacaagatgggaaacaactggtagctttaaaagccttggggactttaaaacttacgggaaggctgacaacactgccttcagagaattaattacggctaaagaaattgagaaaaatgtgcaggaaatgagcaaaggctcggctcccggtccagacgggattactcttggggacgtcgtaaagatggatcccgagttttcccggaccatggagattttcaatttatggttaacaactggtaaaatcccggacatggtgagggggtgcagaaccgttttgattccaaaatcatcagacccggatcgtttgaaagacattaataactggagacctatcacgatcggttccatcttgctgagactgttctccaggattgtaacagctaggctgagcaaagcgtgccccctgaacccaaggcaaagaggctttatcagagcggcgggatgctctgaaaacttaaaactcctgcaaactataatttggtcggccaaaagagaacacagaccactgggtgttgtattcgtggacatcgccaaggcttttgacaccgtaagccaccagcacatcattcatgctttgcagcaaagagaggtggatccccacatcgtcggtctggtgagcaatatgtacgagaacatcagtacgtatatcaccacaaagaggaacacacacacagacaaaatccagatccgggttggagtaaagcagggtgacccgatgtcgccccttttatttaacctggcaatggaccctctattatgcaagctggaagagagtggcaaaggataccaccgaggacagagcagcatcacagcgatggcatttgcagacgatctggttttgctgagcgactcctgggaaaatatgaatacaaatattaagatactggagaccttctgcaatctgaccggactcaaaacacaggggcaaaagtgccacggcttttacatcaagccgacaaagaagtcttacaccatcaatgactgcgctgcctggactatcaacggcacacccctgaacatgatcgaccccggcgaatctgagaaatacctcggcctgcagtttgacccgtggattggaatagcaaggtccggtctctccacaaaactagatttttggcttcagcggatcgatcaagcaccacttaaacctctgcagaaactggatattctcaaaacatacaccatccctcggctgatctacatagctgaccactcagaagtgaaaagcgcactactcgaaacccttgaccagaagatccggacagcggtcaaggaatggcttcacctacctccgtgcacctgcgatgccatcctgtactcgagcacgagagacggcggtttgggcatcaccaaattggcaggactgatccccagcgtgcaggcccgtagactgcatcggatcgcacagtcatctgacgatacgatgaaatgcttcatggaaaaagagaaaatggaacagctgcataagaaattgtggattcaagctggaggggacagagagaacataccctcgatttgggaagcaccaccgtcgagtgaaccaccaaacaacgtgagcacaaattcggaatgggaagcaccgacccagaaagataaatttccaaagccttgcaattggaggaaaaacgaattcaaaaaatggaccaaattggcatcccaaggccgcggaattgtaaattttgaaagagacaaaattagtaaccattggatccaatactacagacgcatacctcacaggaaactcctcactgcactacaactcagggccaacgtttaccccacgagagaatttctagccaggggtagacaagaccaatacatcaaggcgtgtaggcactgcgatgcggacaacgaatcctgcgcccacatcatcggcaactgcccagtgacacaggacgcccgaatcaagaggcacaataagatctgcgaactgcttctcgaggaggcgaagaagaaggactgggtagtgttcaaggaaccgcacataagggattccaacaaggaactgtacaaacctgacctgatatttgtgaaggatgggcgtgcacttgtcgtggatgtgacagtacggtatgaagcagccaaatcatcgctggaggaagccgctgcagagaaagtgagaaagtacaaacacctggaaacggaagtaagacatctcacgaatgcaaaggacgttacttttgtgggctttcccctaggagcgcgggggaaatggcaccaagataactttaaacttttgactgagcttggcctctccaaatcgaggcaagtgaaaatggcagagactttttccacagtagcgctcttttcatctgtggacattgtacatatgtttgccagtagggccagaaaatctatggttatgtgataataggctgccttctgcggggcttgccttctggccatgcccttcttctctcccttgcacctgtacctcttggtctttgaataaagcctgagtaggaaggaccggtaaaaaaaaaaaaaaaaaaaaaaaaaaaaaaacgttgactaaaaaaaaaaaaaaaaaaaaaaaaaaaaaaaaaaaaaaaaaaaaaaaaaaaaaaaaaaaaaaaaaaaaaa

SEQ ID NO: 11740 - DNA, 4925 bp, synthetic construct
  source 1..4925: mol_type = other DNA
ggtctagttacaactgggcatcgctgcagagatcgcacctcctcgtggtcccgctggtagcccttcgaagggtgactaagtcgatctctgccccaggtacggagccgttgggactcaccagtccaacgtaactcctgcctaaattcggtgaaacaaattcctcggtaaaaagccccatggcccctaagaaaaagagaaaggtggtgaccgtgaagttcaagtacaagggcgaggaaaaggaagtggacatcagcaagatcaagaaggtctggcgggtgggcaagatgatcagctttacctacgacgataacggcaagacaggcagaggcgccgtgtccgagaaggacgcccctaaagagctgctgcagatgctggaaaaaagcggctctgagacacctggaacaagcgagagcgccaccccggaatcctatgaacaacttgcaccacaaccgtgtgtgggagaaactttacattctagcctcccacgagacagtgaactgtttgtgcctgaagaggggagcagcgagaaggagagcgaggacgcgccaaaaacatctcctccgacgcctgggaaacatggtttggaacagactggggaggaaaaagtgatggtgactgttcctgacaaaaatccaccttgtccttgctgtggtacccgggtaaactctgtgttgaatctgattgaacatctgaaagtgtcacacgggaaaaggggggtttgttttcggtgtgcaaaatgtggaaaggaaaatagtaactatcacagtgttgtttgtcattttaagaaatgcaggggtccagagacggagaaagccccagctggggagtggatttgtgaggtatgcaacagagattttacaaccaaaattggcctgggacaacacaagagattggcacacccagcagtgagaaatcaggaaaggatcgttgcttcccaaccgaaagaaacatcaaatagaggtgctcacaaaaggtgctggacaaaggaggaggaagaattactaataagactggaggctcagttcgagggaaacaaaaatattaataagcttattgcagaacacataaccaccaaaacagctaagcagatcagtgacaaaaggcgattgctgtccagaaagccagcagaggagccacgtgaggagcctggaacgtgtcatcacaccaggagagcagctgcgagcctgagaacggagcctgagatgagtcatcacgcccaggcagaggacagagataatggacctgggagacgccctctgccaggcagggcagctgccggagggagaacaatggacgagataagacgccaccctgataagggcaacggacagcagagacccaccaagcaaaaatcagaagaacagctgcaggcttactataaaaagacactagaggaacgactttcagctggggcacttaacaccttcccccgagcattcaagcaggtaatggaaggccgggatataaagctagtaatcaatcagacagcgcaggactgcttcggatgcctggaatccataagccaaataagaacggcaacccgagataaaaaggacacggtgacccgggagaaacacccaaagaaaccttttcagaagtggatgaagaagagagcaatcaaaaaaggtaattatcttcggttccagcgtttattttatcttgatagagggaaactggctaaaatcattttagatgatattgaatgcttgtcttgtgacataccactcagtgaaatttattcggtttttaaaacaagatgggaaacaactggtagctttaaaagccttggggactttaaaacttacgggaaggctgacaacactgccttcagagaattaattacggctaaagaaattgagaaaaatgtgcaggaaatgagcaaaggctcggctcccggtccagacgggattactcttggggacgtcgtaaagatggatcccgagttttcccggaccatggagattttcaatttatggttaacaactggtaaaatcccggacatggtgagggggtgcagaaccgttttgattgacacttcaaacctcatggagcagatcctttcatctgacaacctcaacagggcttacttgcaagtggttcgcaacaaaggggctgagggcgtggacggaatgaagtacacggagttgaaggagcatctcgcgaagaacggagagacaataaagggacaactcagaactgctgcttataagcctcaaccggcgagacgggtagagatacccaagcccgacggtggcgtgaggaacctcggcgtccctacagtcacggaccgcttcatccaacaagccatcgctcaagtcctcactccaatctacgaggagcaattccacgaccattcctacgggttccggccaaaccggtgcgcccaacaagctatacttacagctttgaacataatgaacgacggaaacgactggattgtcgacatagatctcgagaagttcttcgacacagtcaatcatgacaagttgatgactctcatcgggcgcaccattgcagacggcgacgtaatctccattgttcgaaagtacctcgtgtccggaatcatgatagacgacgagtacgaggactcaatcgtgggaaccccacaaggcggcaacttgtctccccttcttgcaaacatcatgcttaacgagttggataaggaaatggaagctgcaggccttaacttcgtcaggtacgcagacgactgtatcatcatggtgggatctgagatgtctgccaaccgggtcatgaggaacatctcaagatttattgaggagaagttggggcttaaggtgaatatgacgaagtctaaggtggaccggcccagcggacttaagtatctcggattcggcttttacttcgaccccagagctcatcaattcaaggccaagcctcacgcgaagagtgtcgcgaagtttaagaagagaatgaaggagctcacgtgcaggagttggggcgtgtctaactcctacaaggtcgagaagctcaatcaattgatccgtggctggattaattactttaagatcgggagtatgaaaacactctgtaaggaacttgactcacgcatcagatacaggctccggatgtgcatctggaagcaatggaaaactccacaaaaccaggagaagaacttggtaaagctcgggatcgaccgcaacacggccaggcgggtggcgtacactggcaagcgaatcgcctacgtctgtaacaagggagctgtgaacgtcgcgataagtaacaagaggctcgcttcattccagtttgacccgtggattggaatagcaaggtccggtctctccacaaaactagatttttggcttcagcggatcgatcaagcaccacttaaacctctgcagaaaactgatattctcaaaacatacaccatccctcggctgatctacatagctgaccactcagaagtgaaaactgcactactcgaaacccttgaccagaagatccggacagcggtcaaggaatggcttcacctacctccgtgcacctgcgatgccatcctgtactcgagcacgagagacggcggtttgggcatcaccaaattggcaggactgatccccagcgtgcaggcccgtagactgcatcggatcgcacagtcatctgacgatacgatgaaatgcttcatggaaaaagagaaaatggaacagctgcataagaaattgtggattcaagctggaggggacagagagaacataccctcgatttgggaagcaccaccgtcgagtgaaccaccaaacaacgtgagcacaaattcggaatgggaagcaccgacccagaaagataaatttccaaagccttgcaattggaggaaaaacgaattcaaaaaatggaccaaattggcatcccaaggccgcggaattgtaaattttgaaagagacaaaattagtaaccattggatccaatactacagacgcatacctcacaggaaactcctcactgcactacaactcagggccaacgtttaccccacgagagaatttctagccaggggtagacaagaccaatacatcaaggcgtgtaggcactgcgatgcggacattgaatcctgcgcccacatcatcggcaactgcccagtgacacaggacgcccgaatcaagaggcacaattacatctgcgaactgcttctcgaggaggcgaagaagaaggactgggtagtgttcaaggaaccgcacataagggattccaacaaggaactgtacaaacctgacctgatatttgtgaaggatgcccgtgcacttgtcgtggatgtgacagtacggtatgaagcagccaaatcatcgctggaggaagccgctgcagagaaagtgagaaagtacaaacacctggaaacggaagtaagacatctcacgaatgcaaaggacgttacttttgtgggctttcccctaggagcgcgggggaaatggcaccaagataactttaaacttttgactgagcttggcctctccaaatcgaggcaagtgaaaatggcagagactttttccacagtagcgctcttttcatctgtggacattgtacatatgtttgccagtagggccagaaaatctatggttatgtgataataggctgccttctgcggggcttgccttctggccatgcccttcttctctcccttgcacctgtacctcttggtctttgaataaagcctgagtaggaaggaccggtagacatgataagatacattgatgagtttggacaaaccacaactagaatgcagtgaaaaaaatgctttatttgtgaaatttgtgatgctattgctttatttgtaaccattataagctgcaataaacaagttaacaacaacaaaaaaaaaaaaaaaaaaaaaaaaaaaaaaacgttgactaaaaaaaaaaaaaaaaaaaaaaaaaaaaaaaaaaaaaaaaaaaaaaaaaaaaaaaaaaaaaaaaaaaaaa

SEQ ID NO: 11741 - DNA, 5016 bp, synthetic construct
  source 1..5016: mol_type = other DNA
ggtctagttacaactgggcatcgctgcagagatcgcacctcctcgtggtcccgctggtagcccttcgaagggtgactaagtcgatctctgccccaggtacggagccgttgggactcaccagtccaacgtaactcctgcctaaattcggtgaaacaaattcctcggtaaaaagccccatggctagctgccctaagcctggacctcctgtgtctgctggcgctatgagcctggagagcggacttaccacccactctgtgctggccatcgagagaggccccaactctctggccaactctggcagcgatttcggcggaggaggacttggcctgcctctgagacttctgagagtttctgtgggcacccagaccagcagaagcgactgggtcgaccttgtgagctggagccaccctggtcctacaagcaagagccagcaggtcgatctggtgagcctgttccccaagcacagagtcgacctgctgagcaagaacgaccaggtcgacttggtggcccagttcctgcctagcaagttccctcccaacctggctgagaacgacttagccctgctggtgaacctggagttctatcgttccgacctgcacgtgtacgagggcgtgcacttcgctgcccattgggagggcttaagcggccttcctgaggtgtacgaacagctggctccccagccctgtgtaggcgagacattacacagcagcctgcccagagacagcgagctgttcgttccggaagagggctctagcgagaaggagagcgaggacgctcctaagaccagccctcctacccctggcaaacacggcctggagcaaacaggcgaggagaaggtcatggtgaccgtgcccgacaagaaccctccctgtccttgctgtggcacaagagtcaacagcgtgctgaacctcatcgagcacctgaaggtgtcccacggcaagagaggcgtgtgcttcagatgcgccaagtgcggcaaggagaacagcaactaccacagcgtcgtgtgccacttccctaagtgcagaggccctgagaccgagaaggctcccgctggcgaatggatttgcgaggtgtgcaacagagacttcaccaccaagatcggcctgggccagcacaagcggttagctcaccctgctgtgagaaaccaggagagaatcgtggccagccagcccaaggagacaagcaacaggggcgctcacaagagatgctggaccaaggaggaagaggagctgctcatcagactggaggctcagttcgagggcaacaagaacatcaataagcttatcgccgagcacatcaccacaaagaccgccaagcagatcagcgacaagaggagactgctgtccagaaagcccgccgaggagcctagagaggaacctggtacatgtcaccacaccagaagagccgccgctagcctgagaaccgagcccgaaatgtctcaccacgctcaggccgaggacagagacaacggccctggcaggagacctcttcccggcagagctgctgctggaggcagaaccatggacgagatcaggagacaccccgataagggcaacggccagcagagacccacaaagcagaagtccgaggaacagctccaggcctactacaagaaaaccctggaggagagactgtccgcgggagctctgaacaccttccctagagccttcaaacaagtcatggagggcagagacatcaagctggtgatcaaccagaccgcccaggactgcttcggctgccttgagtctatcagccagatcaggaccgccacacgggataagaaggacaccgtcaccagagagaagcaccccaagaagcccttccagaaatggatgaagaagagggccatcaagaagggcaattacctgagattccagaggctgttctacctggacagaggcaagctggccaagatcatcctggacgacatcgagtgcctgagctgcgacatccctctgagcgagatctacagcgtgttcaagaccagatgggagaccaccggcagcttcaagtctctgggcgacttcaagacatacggcaaggccgacaacaccgccttcagagagctcatcaccgctaaggagatcgagaagaacgtgcaggagatgagcaagggcagcgctcctggccccgatggaattacactgggcgatgtggtgaagatggaccccgagttcagcagaacaatggagatcttcaacctgtggctcaccacaggcaagatccccgacatggtgagaggctgcagaaccgtgcttatcgacacttcaaacctcatggagcagatcctttcatctgacaacctcaacagggcttacttgcaagtggttcgcaacaaaggggctgagggcgtggacggaatgaagtacacggagttgaaggagcatctcgcgaagaacggagagacaataaagggacaactcagaactgctgcttataagcctcaaccggcgagacgggtagagatacccaagcccgacggtggcgtgaggaacctcggcgtccctacagtcacggaccgcttcatccaacaagccatcgctcaagtcctcactccaatctacgaggagcaattccacgaccattcctacgggttccggccaaaccggtgcgcccaacaagctatacttacagctttgaacataatgaacgacggaaacgactggattgtcgacatagatctcgagaagttcttcgacacagtcaatcatgacaagttgatgactctcatcgggcgcaccattgcagacggcgacgtaatctccattgttcgaaagtacctcgtgtccggaatcatgatagacgacgagtacgaggactcaatcgtgggaaccccacaaggcggcaacttgtctccccttcttgcaaacatcatgcttaacgagttggataaggaaatggaagctgcaggccttaacttcgtcaggtacgcagacgactgtatcatcatggtgggatctgagatgtctgccaaccgggtcatgaggaacatctcaagatttattgaggagaagttggggcttaaggtgaatatgacgaagtctaaggtggaccggcccagcggacttaagtatctcggattcggcttttacttcgaccccagagctcatcaattcaaggccaagcctcacgcgaagagtgtcgcgaagtttaagaagagaatgaaggagctcacgtgcaggagttggggcgtgtctaactcctacaaggtcgagaagctcaatcaattgatccgtggctggattaattactttaagatcgggagtatgaaaacactctgtaaggaacttgactcacgcatcagatacaggctccggatgtgcatctggaagcaatggaaaactccacaaaaccaggagaagaacttggtaaagctcgggatcgaccgcaacacggccaggcgggtggcgtacactggcaagcgaatcgcctacgtctgtaacaagggagctgtgaacgtcgcgataagtaacaagaggctcgcttcattcagttcgatccctggatcggcatcgctagaagcggcttgagcaccaagctggacttttggctccaacgcatagaccaggcccccctgaagcctcttcagaaaaccgacattttgaaaacttatacgatccccagactcatctacatcgccgaccactccgaggtcaagaccggcctgctggaaaccctggaccagaaaatcagaaccgccgtcaaggaatggctgcacctgcccccttgcacatgcgacgctatcctgtacagcagcaccagggacggcggcttaggaatcaccaagttagccggcctcatccccagcgtgcaggctaggagactccacagaatcgcccagagcagcgacgacaccatgaagtgcttcatggagaaggaaaagatggagcagctgcacaagaagctgtggatccaagcgggcggagatcgtgagaacattcccagcatctgggaggcccctcccagctcagaacctcccaataacgtgtccaccaattctgaatgggaggctcccacccagaaggataagtttcccaagccctgcaactggcggaagaacgagttcaaaaaatggacaaagctggctagccagggcaggggcatcgtgaacttcgaaagggacaagattagcaaccactggatccagtactacagaagaatcccccacagaaagctcctcaccgccctccagttacgtgcaaacgtgtacccaaccagagaattcctggccagaggcagacaggaccagtacatcaaggcctgccggcactgcgatgccgatatcgagagctgtgctcacatcatcggcaactgccccgtcacccaggacgccagaatcaagagacacaactacatctgcgagttacttctggaggaagccaagaagaaggattgggttgtgttcaaggagccccacatcagagactccaacaaggagctgtacaagccagacctcatcttcgtgaaggacgctagagccctggtggtggacgtcaccgtcagatacgaggctgctaagtccagccttgaggaggctgccgccgagaaagtgcggaagtacaagcacctggaaacagaggtcagacacctcaccaacgccaaggacgttaccttcgtgggcttccccctaggtgctagaggcaaatggcaccaggacaacttcaagctgcttaccgagctgggcctctccaagagccgacaggttaagatggccgagaccttcagcaccgtcgccctgttctcttctgtggacattgtgcacatgttcgcctccagagccagaaagagcatggtgatgtgataataggctgccttctgcggggcttgccttctggccatgcccttcttctctcccttgcacctgtacctcttggtctttgaataaagcctgagtaggaaggaccggtaaaaaaaaaaaaaaaaaaaaaaaaaaaaaaacgttgactaaaaaaaaaaaaaaaaaaaaaaaaaaaaaaaaaaaaaaaaaaaaaaaaaaaaaaaaaaaaaaaaaaaaaa

SEQ ID NO: 11742 - DNA, 6245 bp, synthetic construct
  source 1..6245: mol_type = other DNA
ggtctagttacaactgggcatcgctgcagagatcgcacctcctcgtggtcccgctggtagcccttcgaagggtgactaagtcgatctctgccccaggtacggagccgttgggactcaccagtccaacgtaactcctgcctaaattcggtgaaacaaattcctcggtaaaaagccccatggcttcttgcccgaaacctggccccccggtttcagcaggggcaatgagtttggaaagtggactgaccacccactccgttctcgccatcgaacgtggtcccaattcgttggcaaattccggatcagactttgggggggggggtctggggctaccgttacgcctattgagggtatcggtcggcactcagacctcccgctccgactgggtagacctggtgtcctggagccacccaggacccacgtctaagtcccagcaggttgacctggtgtctttatttcctaaacaccgggttgacctgttatccaaaaacgaccaggtagacctggtggctcaatttttaccatctaaatttccccccaatttggcagaaaatgatttggctttgctggtgaacttagagttctacagatcggatttgcatgtgtatgagtgtgttcattttgctgcacattgggagggattaagtggtttgcctgaggtgtatgaacaacttgcaccacaaccgtgtgtgggagaaactttacattctagcctcccacgagacagtgaactgtttgtgcctgaagaggggagcagcgagaaggagagcgaggacgcgccaaaaacatctcctccgacgcctgggaaacatggtttggaacagactggggaggaaaaagtgatggtgactgttcctgacaaaaatccaccttgtccttgctgtggtacccgggtaaactctgtgttgaatctgattgaacatctgaaagtgtcacacgggaaaaggggggtttgttttcggtgtgcaaaatgtggaaaggaaaatagtaactatcacagtgttgtttgtcattttccaaaatgcaggggtccagagacggagaaagccccagctggggagtggatttgtgaggtatgcaacagagattttacaaccaaaattggcctgggacaacacaagagattggcacacccagcagtgagaaatcaggaaaggatcgttgcttcccaaccgaaagaaacatcaaatagaggtgctcacaaaaggtgctggacaaaggaggaggaagaattactaataagactggaggctcagttcgagggaaacaaaaatattaataagcttattgcagaacacataaccaccaaaacagctaagcagatcagtgacaaaaggcgattgctgtccagaaagccagcagaggagccacgtgaggagcctggaacgtgtcatcacaccaggagagcagctgcgagcctgagaacggagcctgagatgagtcatcacgcccaggcagaggacagagataatggacctgggagacgccctctgccaggcagggcagctgccggagggagaacaatggacgagataagacgccaccctgataagggcaacggacagcagagacccaccaagcaaaaatcagaagaacagctgcaggcttactataaaaagacactagaggaacgactttcagctggggcacttaacaccttcccccgagcattcaagcaggtaatggaaggccgggatataaagctagtaatcaatcagacagcgcaggactgcttcggatgcctggaatccataagccaaataagaacggcaacccgagataaaaaggacacggtgacccgggagaaacacccaaagaaaccttttcagaagtggatgaaggacagagcaatcaaaaaaggtaattatcttcggttccagcgtttattttatcttgatagagggaaactggctaaaatcattttagatgatattgaatgcttgtcttgtgacataccactcagtgaaatttattcggtttttaaaacaagatgggaaacaactggtagctttaaaagccttggggactttaaaacttacgggaaggctgacaacactgccttcagagaattaattacggctaaagaaattgagaaaaatgtgcaggaaatgagcaaaggctcggctcccggtccagacgggattactcttggggacgtcgtaaagatggatcccgagttttcccggaccatggagattttcaatttatggttaacaactggtaaaatcccggacatggtgagggggtgcagaaccgttttgattatcctggacaccgactacatcaccgaggacggcaagcccgtgatcaggatcttcaagaaggagaacggcgagttcaagatcgagtacgacaggaccttcgagccctacctgtacgccctgctgaaggacgacagcgccatcgaggaggtgaagaagatcaccgccgagaggcacggcaccgtggtgaccgtgaagagggtggagaaggtgcagaagaagttcctgggcaggcccgtggaggtgtggaagctgtacttcacccacccccaggacgtgcccgccatcatggacaagatcagggagcaccccgccgtgatcgacatctacgagtacgacatccccttcgccatcaggtacctgatcgacaagggcctggtgcccatggagggcgacgaggagctgaagctgctggccttcgacatcgagaccctgtaccacgagggcgaggagttcgccgagggccccatcctgatgatcagctacgccgacgaggagggcgccagggtgatcacctggaagaacgtggacctgccctacgtggacgtggtgagcaccgagagggagatgatcaagaggttcctgagggtggtgaaggagaaggaccccgacgtgctgatcacctacaacggcgacaacttcgacttcgcctacctgaagaagaggtgcgagaagctgggcatcaacttcgccctgggcagggacggcagcgagcccaagatccagaggatgggcgacaggttcgccgtggaggtgaagggcaggatccacttcgacctgtaccccgtgatcaggaggaccatcaacctgcccacctacaccctggaggccgtgtacgaggccgtgttcggccagcccaaggagaaggtgtacgccgaggagatcaccaccgcctgggagaccggcgagaacctggagagggtggccaggtacagcatggaggacgccaaggtgacctacgagctgggcaaggagttcctgcccatggaggcccagctgagcaggctgatcggccagagcctgtgggacgtgagcaggagcagcaccggcaacctggtggagtggttcctgctgaggaaggcctacgagaggaacgagctggcccccaacaagcccgacgagaaggagctggccaggaggcaccagagccacgagggcggctacatcaaggagcccgagaggggcctgtgggagaacatcgtgtacctggacttcaggagcctgtaccccagcatcatcatcacccacaacgtgagccccgacaccctgaacagggagggctgcaaggagtacgacgtggccccccaggtgggccacaggttctgcaaggacttccccggcttcatccccagcctgctgggcgacctgctggaggagaggcagaagatcaagaagaggatgaaggccaccatcgaccccatcgagaggaagctgctggactacaggcagagggccatcaagatcctggccaacagcctgtacggctactacggctacgccagggccaggtggtactgcaaggagtgcgccgagagcgtgatcgcctggggcagggagtacctgaccatgaccatcaaggagatcgaggagaagtacggcttcaaggtgatctacagcgacaccgacggcttcttcgccaccatccccggcgccgacgccgagaccgtgaagaagaaggccatggagttcctgaagtacatcaacgccaagctgcccggcgccctggagctggagtacgagggcttctacaagaggggcctgttcgtgaccaagaagaagtacgccgtgatcgacgaggagggcaagatcaccaccaggggcctggagatcgtgaggagggactggagcgagatcgccaaggagacccaggccagggtgctggaggccctgctgaaggacggcgacgtggagaaggccgtgaggatcgtgaaggaggtgaccgagaagctgagcaagtacgaggtgccccccgagaagctggtgatccacaagcagatcaccagggacctgaaggactacaaggccaccggcccccacgtggccgtggccaagaggctggccgccaggggcgtgaagatcaggcccggcaccgtgatcagctacatcgtgctgaagggcagcggcaggatcgtggacagggccatccccttcgacgagttcgaccccaccaagcacaagtacgacgccgagtactacatcgagaagcaggtgctgcccgccgtggagaggatcctgagggccttcggctacaggaaggaggacctgaggtaccagaaaaccaggcaggtgggcctgagcgccaggctgaagcccaagggcacccagtttgacccgtggattggaatagcaaggtccggtctctccacaaaactagatttttggcttcagcggatcgatcaagcaccacttaaacctctgcagaaaactgatattctcaaaacatacaccatccctcggctgatctacatagctgaccactcagaagtgaaaactgcactactcgaaacccttgaccagaagatccggacagcggtcaaggaatggcttcacctacctccgtgcacctgcgatgccatcctgtactcgagcacgagagacggcggtttgggcatcaccaaattggcaggactgatccccagcgtgcaggcccgtagactgcatcggatcgcacagtcatctgacgatacgatgaaatgcttcatggaaaaagagaaaatggaacagctgcataagaaattgtggattcaagctggaggggacagagagaacataccctcgatttgggaagcaccaccgtcgagtgaaccaccaaacaacgtgagcacaaattcggaatgggaagcaccgacccagaaagataaatttccaaagccttgcaattggaggaaaaacgaattcaaaaaatggaccaaattggcatcccaaggccgcggaattgtaaattttgaaagagacaaaattagtaaccattggatccaatactacagacgcatacctcacaggaaactcctcactgcactacaactcagggccaacgtttaccccacgagagaatttctagccaggggtagacaagaccaatacatcaaggcgtgtaggcactgcgatgcggacattgaatcctgcgcccacatcatcggcaactgcccagtgacacaggacgcccgaatcaagaggcacaattacatctgcgaactgcttctcgaggaggcgaagaagaaggactgggtagtgttcaaggaaccgcacataagggattccaacaaggaactgtacaaacctgacctgatatttgtgaaggatgcccgtgcacttgtcgtggatgtgacagtacggtatgaagcagccaaatcatcgctggaggaagccgctgcagagaaagtgagaaagtacaaacacctggaaacggaagtaagacatctcacgaatgcaaaggacgttacttttgtgggctttcccctaggagcgcgggggaaatggcaccaagataactttaaacttttgactgagcttggcctctccaaatcgaggcaagtgaaaatggcagagactttttccacagtagcgctcttttcatctgtggacattgtacatatgtttgccagtagggccagaaaatctatggttatgtgataataggctgccttctgcggggcttgccttctggccatgcccttcttctctcccttgcacctgtacctcttggtctttgaataaagcctgagtaggaaggaccggtagacatgataagatacattgatgagtttggacaaaccacaactagaatgcagtgaaaaaaatgctttatttgtgaaatttgtgatgctattgctttatttgtaaccattataagctgcaataaacaagttaacaacaacaaaaaaaaaaaaaaaaaaaaaaaaaaaaaaacgttgactaaaaaaaaaaaaaaaaaaaaaaaaaaaaaaaaaaaaaaaaaaaaaaaaaaaaaaaaaaaaaaaaaaaaaa

SEQ ID NO: 11743 - DNA, 5144 bp, synthetic construct
  source 1..5144: mol_type = other DNA
gaaataagagagaaaagaagagtaagaagaaatataagagaattcgccaccatggcccctaagaaaaagcggaaggtgaatatcagcggctctagctgcggcagccccaacagcgccgacaccagcagcgacttcaaggacctgtggaccaagctgaaggaatgccacgaccgggaagtgcagggactccaggtgaaggtcaccaaactcaagcaagaaagaatcctggacgcccagagactggaagaattcttcaccaagaaccagcagctgagagagcagcagaaagtgctgcacgagacaatcaaggttctggaagatagactgcgggccggcctgtgcgacagatgcgccgtgaccgaggaacacatgcgcaaaaagcagcaggagttcgagaacattagacagcaaaatctgaaattgatcacagagctgatgaacgagagaaacacactgcaggaggagaacaagaagctgagcgagcagctgcaacagaagatcgagaatgatcagcaacaccaggccgctgagctggaatgtgaagaggacgtgatccccgacagcccaatcacagctttcagcttttctggcgtgaacagactgaggcggaaggaaaacccccacgtgcggtacatcgagcagacccataccaagctggaacacagcgtgtgtgccaacgagatgagaaaggtgtccaagtcctccacccatccccagcacaaccctaacgaaaatgagatcctggtggctgatacctacgaccagtctcagagccctatggccaaggcccacggcaccagctcttatacccctgataagagctccttcaacctggccaccgtggtggccgagacactgggcctgggcgtgcaggaggaaagcgagacacagggcccaatgagccctctgggagatgagctgtaccactgcctggaaggcaaccacaagaaacagccttttgagtccggctccgagactcctggaacaagcgagagcgctacacctgagggcagcgtgaccgtgaagttcaagtacaagggcgaggaaaaggaagtggacatcagcaagatcaagaaggtctggcgggtgggcaagatgatcagctttacctacgacgataacggcaagacaggcagaggcgccgtgtccgagaaggacgcccctaaagagctgctgcagatgctggaaaaaagcggctctgagacacctggaacaagcgagagcgccaccccggaatcctatgaacaacttgcaccacaaccgtgtgtgggagaaactttacattctagcctcccacgagacagtgaactgtttgtgcctgaagaggggagcagcgagaaggagagcgaggacgcgccaaaaacatctcctccgacgcctgggaaacatggtttggaacagactggggaggaaaaagtgatggtgactgttcctgacaaaaatccaccttgtccttgctgtggtacccgggtaaactctgtgttgaatctgattgaacatctgaaagtgtcacacgggaaaaggggggtttgttttcggtgtgcaaaatgtggaaaggaaaatagtaactatcacagtgttgtttgtcattttaagaaatgcaggggtccagagacggagaaagccccagctggggagtggatttgtgaggtatgcaacagagattttacaaccaaaattggcctgggacaacacaagagattggcacacccagcagtgagaaatcaggaaaggatcgttgcttcccaaccgaaagaaacatcaaatagaggtgctcacaaaaggtgctggacaaaggaggaggaagaattactaataagactggaggctcagttcgagggaaacaaaaatattaataagcttattgcagaacacataaccaccaaaacagctaagcagatcagtgacaaaaggcgattgctgtccagaaagccagcagaggagccacgtgaggagcctggaacgtgtcatcacaccaggagagcagctgcgagcctgagaacggagcctgagatgagtcatcacgcccaggcagaggacagagataatggacctgggagacgccctctgccaggcagggcagctgccggagggagaacaatggacgagataagacgccaccctgataagggcaacggacagcagagacccaccaagcaaaaatcagaagaacagctgcaggcttactataaaaagacactagaggaacgactttcagctggggcacttaacaccttcccccgagcattcaagcaggtaatggaaggccgggatataaagctagtaatcaatcagacagcgcaggactgcttcggatgcctggaatccataagccaaataagaacggcaacccgagataaaaaggacacggtgacccgggagaaacacccaaagaaaccttttcagaagtggatgaagaagagagcaatcaaaaaaggtaattatcttcggttccagcgtttattttatcttgatagagggaaactggctaaaatcattttagatgatattgaatgcttgtcttgtgacataccactcagtgaaatttattcggtttttaaaacaagatgggaaacaactggtagctttaaaagccttggggactttaaaacttacgggaaggctgacaacactgccttcagagaattaattacggctaaagaaattgagaaaaatgtgcaggaaatgagcaaaggctcggctcccggtccagacgggattactcttggggacgtcgtaaagatggatcccgagttttcccggaccatggagattttcaatttatggttaacaactggtaaaatcccggacatggtgagggggtgcagaaccgttttgattccaaaatcatcaaagccggatcgtttgaaagacattaataactggagacctatcacgatcggttccatcttgctgagactgttctccaggattgtaacagctaggctgagcaaagcgtgccccctgaacccaaggcaaagaggctttatcagagcggcgggatgctctgaaaacttaaaactcctgcaaactataatttggtcggccaaaagagaacacagaccactgggtgttgtattcgtggacatcgccaaggcttttgacaccgtaagccaccagcacatcattcatgctttgcagcaaagagaggtggatccccacatcgtcggtctggtgagcaatatgtacgagaacatcagtacgtatatcaccacaaagaggaacacacacacagacaaaatccagatccgggttggagtaaagcagggtgacccgatgtcgccccttttatttaacctggcaatggaccctctattatgcaagctggaagagagtggcaaaggataccaccgaggacagagcagcatcacagcgatggcatttgcagacgatctggttttgctgagcgactcctgggaaaatatgaatacaaatattagcatactggagaccttctgcaatctgaccggactcaaaacacaggggcaaaagtgccacggcttttacatcaagccgacaaaggactcttacaccatcaatgactgcgctgcctggactatcaacggcacacccctgaacatgatcgaccccggcgaatctgagaaatacctcggcctgcagtttgacccgtggattggaatagcaaggtccggtctctccacaaaactagatttttggcttcagcggatcgatcaagcaccacttaaacctctgcagaaactggatattctcaaaacatacaccatccctcggctgatctacatagctgaccactcagaagtgaaaagcgcactactcgaaacccttgaccagaagatccggacagcggtcaaggaatggcttcacctacctccgtgcacctgcgatgccatcctgtactcgagcacgagagacggcggtttgggcatcaccaaattggcaggactgatccccagcgtgcaggcccgtagactgcatcggatcgcacagtcatctgacgatacgatgaaatgcttcatggaaaaagagaaaatggaacagctgcataagaaattgtggattcaagctggaggggacagagagaacataccctcgatttgggaagcaccaccgtcgagtgaaccaccaaacaacgtgagcacaaattcggaatgggaagcaccgacccagaaagataaatttccaaagccttgcaattggaggaaaaacgaattcaaaaaatggaccaaattggcatcccaaggccgcggaattgtaaattttgaaagagacaaaattagtaaccattggatccaatactacagacgcatacctcacaggaaactcctcactgcactacaactcagggccaacgtttaccccacgagagaatttctagccaggggtagacaagaccaatacatcaaggcgtgtaggcactgcgatgcggacaacgaatcctgcgcccacatcatcggcaactgcccagtgacacaggacgcccgaatcaagaggcacaattacatctgcgaactgcttctcgaggaggcgaagaagaaggactgggtagtgttcaaggaaccgcacataagggattccaacaaggaactgtacaaacctgacctgatatttgtgaaggatgggcgtgcacttgtcgtggatgtgacagtacggtatgaagcagccaaatcatcgctggaggaagccgctgcagagaaagtgagaaagtacaaacacctggaaacggaagtaagacatctcacgaatgcaaaggacgttacttttgtgggctttcccctaggagcgcgggggaaatggcaccaagataactttaaacttttgactgagcttggcctctccaaatcgaggcaagtgaaaatggcagagactttttccacagtagcgctcttttcatctgtggacattgtacatatgtttgccagtagggccagaaaatctatggttatgtgataataggctgccttctgcggggcttgccttctggccatgcccttcttctctcccttgcacctgtacctcttggtctttgaataaagcctgagtaggaaggaccggtaaaaaaaaaaaaaaaaaaaaaaaaaaaaaaacgttgactaaaaaaaaaaaaaaaaaaaaaaaaaaaaaaaaaaaaaaaaaaaaaaaaaaaaaaaaaaaaaaaaaaaaaa

SEQ ID NO: 11744 - DNA, 4484 bp, synthetic construct
  source 1..4484: mol_type = other DNA
gaaataagagagaaaagaagagtaagaagaaatataagagaattcgccaccatggcccctaagaaaaagagaaaggtggtgaccgtgaagttcaagtacaagggcgaggaaaaggaagtggacatcagcaagatcaagaaggtctggcgggtgggcaagatgatcagctttacctacgacgataacggcaagacaggcagaggcgccgtgtccgagaaggacgcccctaaagagctgctgcagatgctggaaaaaagcggctctgagacacctggaacaagcgagagcgccaccccggaatcccctaagagaaaggtgtccagcgccgagggcgctgccaaggaagagcctaaacggagaagcgccagactgagcgccaagccccccgccaaggtggaagccaagcctaagaaggccgccgctaaggacaagagcagcgataagaaagtccagaccaagggcaagcggggcgccaaaggcaaacaggccgaggtggccaaccaggagacaaaggaagatctgcctgctgagaacggcgaaaccaagaccgaggaatctccagcttctgacgaggccggagagaaggaggccaaaagcgacagcggctctgagacacctggaacaagcgagagcgccaccccggaatccctgtttgtgcctgaagaggggagcagcgagaaggagagcgaggacgcgccaaaaacatctcctccgacgcctgggaaacatggtttggaacagactggggaggaaaaagtgatggtgactgttcctgacaaaaatccaccttgtccttgctgtggtacccgggtaaactctgtgttgaatctgattgaacatctgaaagtgtcacacgggaaaaggggggtttgttttcggtgtgcaaaatgtggaaaggaaaatagtaactatcacagtgttgtttgtcattttaagaaatgcaggggtccagagacggagaaagccccagctggggagtggatttgtgaggtatgcaacagagattttacaaccaaaattggcctgggacaacacaagagattggcacacccagcagtgagaaatcaggaaaggatcgttgcttcccaaccgaaagaaacatcaaatagaggtgctcacaaaaggtgctggacaaaggaggaggaagaattactaataagactggaggctcagttcgagggaaacaaaaatattaataagcttattgcagaacacataaccaccaaaacagctaagcagatcagtgacaaaaggcgattgctgtccagaaagccagcagaggagccacgtgaggagcctggaacgtgtcatcacaccaggagagcagctgcgagcctgagaacggagcctgagatgagtcatcacgcccaggcagaggacagagataatggacctgggagacgccctctgccaggcagggcagctgccggagggagaacaatggacgagataagacgccaccctgataagggcaacggacagcagagacccaccaagcaaaaatcagaagaacagctgcaggcttactataaaaagacactagaggaacgactttcagctggggcacttaacaccttcccccgagcattcaagcaggtaatggaaggccgggatataaagctagtaatcaatcagacagcgcaggactgcttcggatgcctggaatccataagccaaataagaacggcaacccgagataaaaaggacacggtgacccgggagaaacacccaaagaaaccttttcagaagtggatgaagaagagagcaatcaaaaaaggtaattatcttcggttccagcgtttattttatcttgatagagggaaactggctaaaatcattttagatgatattgaatgcttgtcttgtgacataccactcagtgaaatttattcggtttttaaaacaagatgggaaacaactggtagctttaaaagccttggggactttaaaacttacgggaaggctgacaacactgccttcagagaattaattacggctaaagaaattgagaaaaatgtgcaggaaatgagcaaaggctcggctcccggtccagacgggattactcttggggacgtcgtaaagatggatcccgagttttcccggaccatggagattttcaatttatggttaacaactggtaaaatcccggacatggtgagggggtgcagaaccgttttgattccaaaatcatcaaagccggatcgtttgaaagacattaataactggagacctatcacgatcggttccatcttgctgagactgttctccaggattgtaacagctaggctgagcaaagcgtgccccctgaacccaaggcaaagaggctttatcagagcggcgggatgctctgaaaacttaaaactcctgcaaactataatttggtcggccaaaagagaacacagaccactgggtgttgtattcgtggacatcgccaaggcttttgacaccgtaagccaccagcacatcattcatgctttgcagcaaagagaggtggatccccacatcgtcggtctggtgagcaatatgtacgagaacatcagtacgtatatcaccacaaagaggaacacacacacagacaaaatccagatccgggttggagtaaagcagggtgacccgatgtcgccccttttatttaacctggcaatggaccctctattatgcaagctggaagagagtggcaaaggataccaccgaggacagagcagcatcacagcgatggcatttgcagacgatctggttttgctgagcgactcctgggaaaatatgaatacaaatattagcatactggagaccttctgcaatctgaccggactcaaaacacaggggcaaaagtgccacggcttttacatcaagccgacaaaggactcttacaccatcaatgactgcgctgcctggactatcaacggcacacccctgaacatgatcgaccccggcgaatctgagaaatacctcggcctgcagtttgacccgtggattggaatagcaaggtccggtctctccacaaaactagatttttggcttcagcggatcgatcaagcaccacttaaacctctgcagaaactggatattctcaaaacatacaccatccctcggctgatctacatagctgaccactcagaagtgaaaagcgcactactcgaaacccttgaccagaagatccggacagcggtcaaggaatggcttcacctacctccgtgcacctgcgatgccatcctgtactcgagcacgagagacggcggtttgggcatcaccaaattggcaggactgatccccagcgtgcaggcccgtagactgcatcggatcgcacagtcatctgacgatacgatgaaatgcttcatggaaaaagagaaaatggaacagctgcataagaaattgtggattcaagctggaggggacagagagaacataccctcgatttgggaagcaccaccgtcgagtgaaccaccaaacaacgtgagcacaaattcggaatgggaagcaccgacccagaaagataaatttccaaagccttgcaattggaggaaaaacgaattcaaaaaatggaccaaattggcatcccaaggccgcggaattgtaaattttgaaagagacaaaattagtaaccattggatccaatactacagacgcatacctcacaggaaactcctcactgcactacaactcagggccaacgtttaccccacgagagaatttctagccaggggtagacaagaccaatacatcaaggcgtgtaggcactgcgatgcggacaacgaatcctgcgcccacatcatcggcaactgcccagtgacacaggacgcccgaatcaagaggcacaattacatctgcgaactgcttctcgaggaggcgaagaagaaggactgggtagtgttcaaggaaccgcacataagggattccaacaaggaactgtacaaacctgacctgatatttgtgaaggatgggcgtgcacttgtcgtggatgtgacagtacggtatgaagcagccaaatcatcgctggaggaagccgctgcagagaaagtgagaaagtacaaacacctggaaacggaagtaagacatctcacgaatgcaaaggacgttacttttgtgggctttcccctaggagcgcgggggaaatggcaccaagataactttaaacttttgactgagcttggcctctccaaatcgaggcaagtgaaaatggcagagactttttccacagtagcgctcttttcatctgtggacattgtacatatgtttgccagtagggccagaaaatctatggttatgtgataataggctgccttctgcggggcttgccttctggccatgcccttcttctctcccttgcacctgtacctcttggtctttgaataaagcctgagtaggaaggaccggtaaaaaaaaaaaaaaaaaaaaaaaaaaaaaaacgttgactaaaaaaaaaaaaaaaaaaaaaaaaaaaaaaaaaaaaaaaaaaaaaaaaaaaaaaaaaaaaaaaaaaaaaa

SEQ ID NO: 11745 - DNA, 4484 bp, synthetic construct
  source 1..4484: mol_type = other DNA
gaaataagagagaaaagaagagtaagaagaaatataagagaattcgccaccatggcccctaagaaaaagagaaaggtggtgaccgtgaagttcaagtacaagggcgaggaaaaggaagtggacatcagcaagatcaagaaggtctggcgggtgggcaagatgatcagctttacctacgacgataacggcaagacaggcagaggcgccgtgtccgagaaggacgcccctaaagagctgctgcagatgctggaaaaaagcggctctgagacacctggaacaagcgagagcgccaccccggaatcccctaagagaaaggtgtccagcgccgagggcgctgccaaggaagagcctaaacggagaagcgccagactgagcgccaagccccccgccaaggtggaagccaagcctaagaaggccgccgctaaggacaagagcagcgataagaaagtccagaccaagggcaagcggggcgccaaaggcaaacaggccgaggtggccaaccaggagacaaaggaagatctgcctgctgagaacggcgaaaccaagaccgaggaatctccagcttctgacgaggccggagagaaggaggccaaaagcgacagcggctctgagacacctggaacaagcgagagcgccaccccggaatccctgtttgtgcctgaagaggggagcagcgagaaggagagcgaggacgcgccaaaaacatctcctccgacgcctgggaaacatggtttggaacagactggggaggaaaaagtgatggtgactgttcctgacaaaaatccaccttgtccttgctgtggtacccgggtaaactctgtgttgaatctgattgaacatctgaaagtgtcacacgggaaaaggggggtttgttttcggtgtgcaaaatgtggaaaggaaaatagtaactatcacagtgttgtttgtcattttaagaaatgcaggggtccagagacggagaaagccccagctggggagtggatttgtgaggtatgcaacagagattttacaaccaaaattggcctgggacaacacaagagattggcacacccagcagtgagaaatcaggaaaggatcgttgcttcccaaccgaaagaaacatcaaatagaggtgctcacaaaaggtgctggacaaaggaggaggaagaattactaataagactggaggctcagttcgagggaaacaaaaatattaataagcttattgcagaacacataaccaccaaaacagctaagcagatcagtgacaaaaggcgattgctgtccagaaagccagcagaggagccacgtgaggagcctggaacgtgtcatcacaccaggagagcagctgcgagcctgagaacggagcctgagatgagtcatcacgcccaggcagaggacagagataatggacctgggagacgccctctgccaggcagggcagctgccggagggagaacaatggacgagataagacgccaccctgataagggcaacggacagcagagacccaccaagcaaaaatcagaagaacagctgcaggcttactataaaaagacactagaggaacgactttcagctggggcacttaacaccttcccccgagcattcaagcaggtaatggaaggccgggatataaagctagtaatcaatcagacagcgcaggactgcttcggatgcctggaatccataagccaaataagaacggcaacccgagataaaaaggacacggtgacccgggagaaacacccaaagaaaccttttcagaagtggatgaagaagagagcaatcaaaaaaggtaattatcttcggttccagcgtttattttatcttgatagagggaaactggctaaaatcattttagatgatattgaatgcttgtcttgtgacataccactcagtgaaatttattcggtttttaaaacaagatgggaaacaactggtagctttaaaagccttggggactttaaaacttacgggaaggctgacaacactgccttcagagaattaattacggctaaagaaattgagaaaaatgtgcaggaaatgagcaaaggctcggctcccggtccagacgggattactcttggggacgtcgtaaagatggatcccgagttttcccggaccatggagattttcaatttatggttaacaactggtaaaatcccggacatggtgagggggtgcagaaccgttttgattccaaaatcatcaaagccggatcgtttgaaagacattaataactggagacctatcacgatcggttccatcttgctgagactgttctccaggattgtaacagctaggctgagcaaagcgtgccccctgaacccaaggcaaagaggctttatcagagcggcgggatgctctgaaaacttaaaactcctgcaaactataatttggtcggccaaaagagaacacagaccactgggtgttgtattcgtggacatcgccaaggcttttgacaccgtaagccaccagcacatcattcatgctttgcagcaaagagaggtggatccccacatcgtcggtctggtgagcaatatgtacgagaacatcagtacgtatatcaccacaaagaggaacacacacacagacaaaatccagatccgggttggagtaaagcagggtgacccgatgtcgccccttttatttaacctggcaatggaccctctattatgcaagctggaagagagtggcaaaggataccaccgaggacagagcagcatcacagcgatggcatttgcagacgatctggttttgctgagcgactcctgggaaaatatgaatacaaatattagcatactggagaccttctgcaatctgaccggactcaaaacacaggggcaaaagtgccacggcttttacatcaagccgacaaagaagtcttacaccatcaatgactgcgctgcctggactatcaacggcacacccctgaacatgatcgaccccggcgaatctgagaaatacctcggcctgcagtttgacccgtggattggaatagcaaggtccggtctctccacaaaactagatttttggcttcagcggatcgatcaagcaccacttaaacctctgcagaaaactgatattctcaaaacatacaccatccctcggctgatctacatagctgaccactcagaagtgaaaagcgcactactcgaaacccttgaccagaagatccggacagcggtcaaggaatggcttcacctacctccgtgcacctgcgatgccatcctgtactcgagcacgagagacggcggtttgggcatcaccaaattggcaggactgatccccagcgtgcaggcccgtagactgcatcggatcgcacagtcatctgacgatacgatgaaatgcttcatggaaaaagagaaaatggaacagctgcataagaaattgtggattcaagctggaggggacagagagaacataccctcgatttgggaagcaccaccgtcgagtgaaccaccaaacaacgtgagcacaaattcggaatgggaagcaccgacccagaaagataaatttccaaagccttgcaattggaggaaaaacgaattcaaaaaatggaccaaattggcatcccaaggccgcggaattgtaaattttgaaagagacaaaattagtaaccattggatccaatactacagacgcatacctcacaggaaactcctcactgcactacaactcagggccaacgtttaccccacgagagaatttctagccaggggtagacaagaccaatacatcaaggcgtgtaggcactgcgatgcggacaacgaatcctgcgcccacatcatcggcaactgcccagtgacacaggacgcccgaatcaagaggcacaattacatctgcgaactgcttctcgaggaggcgaagaagaaggactgggtagtgttcaaggaaccgcacataagggattccaacaaggaactgtacaaacctgacctgatatttgtgaaggatgggcgtgcacttgtcgtggatgtgacagtacggtatgaagcagccaaatcatcgctggaggaagccgctgcagagaaagtgagaaagtacaaacacctggaaacggaagtaagacatctcacgaatgcaaaggacgttacttttgtgggctttcccctaggagcgcgggggaaatggcaccaagataactttaaacttttgactgagcttggcctctccaaatcgaggcaagtgaaaatggcagagactttttccacagtagcgctcttttcatctgtggacattgtacatatgtttgccagtagggccagaaaatctatggttatgtgataataggctgccttctgcggggcttgccttctggccatgcccttcttctctcccttgcacctgtacctcttggtctttgaataaagcctgagtaggaaggaccggtaaaaaaaaaaaaaaaaaaaaaaaaaaaaaaacgttgactaaaaaaaaaaaaaaaaaaaaaaaaaaaaaaaaaaaaaaaaaaaaaaaaaaaaaaaaaaaaaaaaaaaaaa

SEQ ID NO: 11746 - DNA, 6626 bp, synthetic construct
  source 1..6626: mol_type = other DNA
ggtgttgacgcgatgtgatttctgcccagtgctctgaatgtcaaagtgaagaaattcaatgaagcgcgggtaaacggcgggagtaactatgactctcttaagtctagttacaactgggcatcgctgcagagatcgcacctcctcgtggtcccgctggtagcccttcgaagggtgactaagtcgatctctgccccaggtacggagccgttgggactcaccagtccaacgtaactcctgcctaaattcggtgaaacaaattcctcggtaaaaagccccatggcttcttgcccgaaacctggccccccggtttcagcaggggcaatgagtttggaaagtggactgaccacccactccgttctcgccatcgaacgtggtcccaattcgttggcaaattccggatcagactttgggggggggggtctggggctaccgttacgcctattgagggtatcggtcggcactcagacctcccgctccgactgggtagacctggtgtcctggagccacccaggacccacgtctaagtcccagcaggttgacctggtgtctttatttcctaaacaccgggttgacctgttatccaaaaacgaccaggtagacctggtggctcaatttttaccatctaaatttccccccaatttggcagaaaatgatttggctttgctggtgaacttagagttctacagatcggatttgcatgtgtatgagtgtgttcattttgctgcacattgggagggattaagtggtttgcctgaggtgtatgaacaacttgcaccacaaccgtgtgtgggagaaactttacattctagcctcccacgagacagtgaactgtttgtgcctgaagaggggagcagcgagaaggagagcgaggacgcgccaaaaacatctcctccgacgcctgggaaacatggtttggaacagactggggaggaaaaagtgatggtgactgttcctgacaaaaatccaccttgtccttgctgtggtacccgggtaaactctgtgttgaatctgattgaacatctgaaagtgtcacacgggaaaaggggggtttgttttcggtgtgcaaaatgtggaaaggaaaatagtaactatcacagtgttgtttgtcattttccaaaatgcaggggtccagagacggagaaagccccagctggggagtggatttgtgaggtatgcaacagagattttacaaccaaaattggcctgggacaacacaagagattggcacacccagcagtgagaaatcaggaaaggatcgttgcttcccaaccgaaagaaacatcaaatagaggtgctcacaaaaggtgctggacaaaggaggaggaagaattactaataagactggaggctcagttcgagggaaacaaaaatattaataagcttattgcagaacacataaccaccaaaacagctaagcagatcagtgacaaaaggcgattgctgtccagaaagccagcagaggagccacgtgaggagcctggaacgtgtcatcacaccaggagagcagctgcgagcctgagaacggagcctgagatgagtcatcacgcccaggcagaggacagagataatggacctgggagacgccctctgccaggcagggcagctgccggagggagaacaatggacgagataagacgccaccctgataagggcaacggacagcagagacccaccaagcaaaaatcagaagaacagctgcaggcttactataaaaagacactagaggaacgactttcagctggggcacttaacaccttcccccgagcattcaagcaggtaatggaaggccgggatataaagctagtaatcaatcagacagcgcaggactgcttcggatgcctggaatccataagccaaataagaacggcaacccgagataaaaaggacacggtgacccgggagaaacacccaaagaaaccttttcagaagtggatgaaggacagagcaatcaaaaaaggtaattatcttcggttccagcgtttattttatcttgatagagggaaactggctaaaatcattttagatgatattgaatgcttgtcttgtgacataccactcagtgaaatttattcggtttttaaaacaagatgggaaacaactggtagctttaaaagccttggggactttaaaacttacgggaaggctgacaacactgccttcagagaattaattacggctaaagaaattgagaaaaatgtgcaggaaatgagcaaaggctcggctcccggtccagacgggattactcttggggacgtcgtaaagatggatcccgagttttcccggaccatggagattttcaatttatggttaacaactggtaaaatcccggacatggtgagggggtgcagaaccgttttgattccaaaatcatcaaagccggatcgtttgaaagacattaataactggagacctatcacgatcggttccatcttgctgagactgttctccaggattgtaacagctaggctgagcaaagcgtgccccctgaacccaaggcaaagaggctttatcagagcggcgggatgctctgaaaacttaaaactcctgcaaactataatttggtcggccaaaagagaacacagaccactgggtgttgtattcgtggacatcgccaaggcttttgacaccgtaagccaccagcacatcattcatgctttgcagcaaagagaggtggatccccacatcgtcggtctggtgagcaatatgtacgagaacatcagtacgtatatcaccacaaagaggaacacacacacagacaaaatccagatccgggttggagtaaagcagggtgacccgatgtcgccccttttatttaacctggcaatggaccctctattatgcaagctggaagagagtggcaaaggataccaccgaggacagagcagcatcacagcgatggcatttgcagacgatctggttttgctgagcgactcctgggaaaatatgaatacaaatattagcatactggagaccttctgcaatctgaccggactcaaaacacaggggcaaaagtgccacggcttttacatcaagccgacaaaggactcttacaccatcaatgactgcgctgcctggactatcaacggcacacccctgaacatgatcgaccccggcgaatctgagaaatacctcggcctgcagtttgacccgtggattggaatagcaaggtccggtctctccacaaaactagatttttggcttcagcggatcgatcaagcaccacttaaacctctgcagaaaactgatattctcaaaacatacaccatccctcggctgatctacatagctgaccactcagaagtgaaaactgcactactcgaaacccttgaccagaagatccggacagcggtcaaggaatggcttcacctacctccgtgcacctgcgatgccatcctgtactcgagcacgagagacggcggtttgggcatcaccaaattggcaggactgatccccagcgtgcaggcccgtagactgcatcggatcgcacagtcatctgacgatacgatgaaatgcttcatggaaaaagagaaaatggaacagctgcataagaaattgtggattcaagctggaggggacagagagaacataccctcgatttgggaagcaccaccgtcgagtgaaccaccaaacaacgtgagcacaaattcggaatgggaagcaccgacccagaaagataaatttccaaagccttgcaattggaggaaaaacgaattcaaaaaatggaccaaattggcatcccaaggccgcggaattgtaaattttgaaagagacaaaattagtaaccattggatccaatactacagacgcatacctcacaggaaactcctcactgcactacaactcagggccaacgtttaccccacgagagaatttctagccaggggtagacaagaccaatacatcaaggcgtgtaggcactgcgatgcggacattgaatcctgcgcccacatcatcggcaactgcccagtgacacaggacgcccgaatcaagaggcacaattacatctgcgaactgcttctcgaggaggcgaagaagaaggactgggtagtgttcaaggaaccgcacataagggattccaacaaggaactgtacaaacctgacctgatatttgtgaaggatgcccgtgcacttgtcgtggatgtgacagtacggtatgaagcagccaaatcatcgctggaggaagccgctgcagagaaagtgagaaagtacaaacacctggaaacggaagtaagacatctcacgaatgcaaaggacgttacttttgtgggctttcccctaggagcgcgggggaaatggcaccaagataactttaaacttttgactgagcttggcctctccaaatcgaggcaagtgaaaatggcagagactttttccacagtagcgctcttttcatctgtggacattgtacatatgtttgccagtagggccagaaaatctatggttatgtaatactcgacggatcgatccgaacaaacgacccaacacccgtgcgttttattctgtctttttattgccgatcccctcagaagaactcgtcaagaaggcgatagaaggcgatgcgctgcgaatcgggagcggcgataccgtaaagcacgaggaagcggtcagcccattcgccgccaagctcttcagcaatatcacgggtagccaacgctatgtcctgatagcggtcggccgctttacttgtacagctcgtccatgccgagagtgatcccggcggcggtcacgaactccagcaggaccatgtgatcgcgcttctcgttggggtctttgctcagggcggactgggtgctcaggtagtggttgtcgggcagcagcacggggccgtcgccgatgggggtgttctgctggtagtggtcggccagctgcacgctgccgtcctcgatgttgtggcggatcttgaagttcaccttgatgccgttcttctgcttgtcggccatgatatagacgttgtggctgttgtagttgtactccagcttgtgccccaggatgttgccgtcctccttgaagtcgatgcccttcagctcgatgcggttcaccagggtgtcgccctcgaacttcacctcggcgcgggtcttgtagttgccgtcgtccttgaagaagatggtgcgctcctggacgtagccttcgggcatggcggacttgaagaagtcgtgctgcttcatgtggtcggggtagcggctgaagcactgcacgccgtaggtcagggtggtcacgagggtgggccagggcacgggcagcttgccggtggtgcagatgaacttcagggtcagcttgccgtaggtggcatcgccctcgccctcgccggacacgctgaacttgtggccgtttacgtcgccgtccagctcgaccaggatgggcaccaccccggtgaacagctcctcgcccttgctcaccatggtggctcgagaactagatcgcgccgagtgagggttgtgggctcttttattgagctcggggagcagaagcgcgcgaacagaagcgagaagcgaactgattggttagttcaaataaggcacagggtcatttcaggtccttggggcaccctggaaacatctgatggttctctagaaactgctgagggcgggaccgcatctggggaccatctgttcttggccctgagccggggcaggaactgcttaccacagatatcctgtttggcccatattctgctgttccaactgttcttggccctgagccggggcaggaactgcttaccacagatatcctgtttggcccatattctgctgtctctctgttcctaaccttgatcctagcttgccaaacctacaggtggggtctttcattcccccctttttctggagactaaataaaatcttttattctatctatggctcgtactctataggcttcagctggtgatattgttgagtcaaaactagagcctggaccactgatatcctgtctttaacaaattggactaatcttcaggttatttagatgcttagtttttgtacctttcttgttttgtttaggattttgatagtgttagtatttttatatttttgtacgattgcataatgttcttttttatacagttctgttttaataaaatagacgatagctagagacgttagggcagccacaagccagttaggtagcggatagtaggtaggaacagacttttactatttcataacgcgtcaattaccacctgatttggaccaattcacgggatttgtccaaggtggacgggccacctttacttaacccggaaaaggaacatatataatttatgtgtgttcgataaatagccaaatgcctcgtcatctaattagtgacgcgcatgaatggatgaacgagattcccactgtccctacctactatccagcgaaaccacagccaagggaaaccggtagacatgataagatacattgatgagtttggacaaaccacaactagaatgcagtgaaaaaaatgctttatttgtgaaatttgtgatgctattgctttatttgtaaccattataagctgcaataaacaagttaacaacaacaaaaaaaaaaaaaaaaaaaaaaaaaaaaaaacgttgactaaaaaaaaaaaaaaaaaaaaaaaaaaaaaaaaaaaaaaaaaaaaaaaaaaaaaaaaaaaaaaaaaaaaaa

SEQ ID NO: 11747-11749 - skipped (3 entries)

SEQ ID NO: 11750 - DNA, 4439 bp, synthetic construct
  source 1..4439: mol_type = other DNA
gaaataagagagaaaagaagagtaagaagaaatataagagaattcgccaccatggcttcttgcccgaaacctggccccccggtttcagcaggggcaatgagtttggaaagtggactgaccacccactccgttctcgccatcgaacgtggtcccaattcgttggcaaattccggatcagactttgggggggggggtctggggctaccgttacgcctattgagggtatcggtcggcactcagacctcccgctccgactgggtagacctggtgtcctggagccacccaggacccacgtctaagtcccagcaggttgacctggtgtctttatttcctaaacaccgggttgacctgttatccaaaaacgaccaggtagacctggtggctcaatttttaccatctaaatttccccccaatttggcagaaaatgatttggctttgctggtgaacttagagttctacagatcggatttgcatgtgtatgagtgtgttcataaggctgcacattgggagggattaagtggtttgcctgaggtgtatgaacaacttgcaccacaaccgtgtgtgggagaaactttacattctagcctcccacgagacagtgaactgtttgtgcctgaagaggggagcagcgagaaggagagcgaggacgcgccaaaaacatctcctccgacgcctgggaaacatggtttggaacagactggggaggaaaaagtgatggtgactgttcctgacaaaaatccaccttgtccttgctgtggtacccgggtaaactctgtgttgaatctgattgaacatctgaaagtgtcacacgggaaaaggggggtttgttttcggtgtgcaaaatgtggaaaggaaaatagtaactatcacagtgttgtttgtcattttaagaaatgcaggggtccagagacggagaaagccccagctggggagtggatttgtgaggtatgcaacagagattttacaaccaaaattggcctgggacaacacaagagattggcacacccagcagtgagaaatcaggaaaggatcgttgcttcccaaccgaaagaaacatcaaatagaggtgctcacaaaaggtgctggacaaaggaggaggaagaattactaataagactggaggctcagttcgagggaaacaaaaatattaataagcttattgcagaacacataaccaccaaaacagctaagcagatcagtgacaaaaggcgattgctgtccagaaagccagcagaggagccacgtgaggagcctggaacgtgtcatcacaccaggagagcagctgcgagcctgagaacggagcctgagatgagtcatcacgcccaggcagaggacagagataatggacctgggagacgccctctgccaggcagggcagctgccggagggagaacaatggacgagataagacgccaccctgataagggcaacggacagcagagacccaccaagcaaaaatcagaagaacagctgcaggcttactataaaaagacactagaggaacgactttcagctggggcacttaacaccttcccccgagcattcaagcaggtaatggaaggccgggatataaagctagtaatcaatcagacagcgcaggactgcttcggatgcctggaatccataagccaaataagaacggcaacccgagataaaaaggacacggtgacccgggagaaacacccaaagaaaccttttcagaagtggatgaagaagagagcaatcaaaaaaggtaattatcttcggttccagcgtttattttatcttgatagagggaaactggctaaaatcattttagatgatattgaatgcttgtcttgtgacataccactcagtgaaatttattcggtttttaaaacaagatgggaaacaactggtagctttaaaagccttggggactttaaaacttacgggaaggctgacaacactgccttcagagaattaattacggctaaagaaattgagaaaaatgtgcaggaaatgagcaaaggctcggctcccggtccagacgggattactcttggggacgtcgtaaagatggatcccgagttttcccggaccatggagattttcaatttatggttaacaactggtaaaatcccggacatggtgagggggtgcagaaccgttttgattccaaaatcatcaaagccggatcgtttgaaagacattaataactggagacctatcacgatcggttccatcttgctgagactgttctccaggattgtaacagctaggctgagcaaagcgtgccccctgaacccaaggcaaagaggctttatcagagcggcgggatgctctgaaaacttaaaactcctgcaaactataatttggtcggccaaaagagaacacagaccactgggtgttgtattcgtggacatcgccaaggcttttgacaccgtaagccaccagcacatcattcatgctttgcagcaaagagaggtggatccccacatcgtcggtctggtgagcaatatgtacgagaacatcagtacgtatatcaccacaaagaggaacacacacacagacaaaatccagatccgggttggagtaaagcagggtgacccgatgtcgccccttttatttaacctggcaatggaccctctattatgcaagctggaagagagtggcaaaggataccaccgaggacagagcagcatcacagcgatggcatttgcagacgatctggttttgctgagcgactcctgggaaaatatgaatacaaatattagcatactggagaccttctgcaatctgaccggactcaaaacacaggggcaaaagtgccacggcttttacatcaagccgacaaaggactcttacaccatcaatgactgcgctgcctggactatcaacggcacacccctgaacatgatcgaccccggcgaatctgagaaatacctcggcctgcagtttgacccgtggattggaatagcaaggtccggtctctccacaaaactagatttttggcttcagcggatcgatcaagcaccacttaaacctctgcagaaactggatattctcaaaacatacaccatccctcggctgatctacatagctgaccactcagaagtgaaaagcgcactactcgaaacccttgaccagaagatccggacagcggtcaaggaatggcttcacctacctccgtgcacctgcgatgccatcctgtactcgagcacgagagacggcggtttgggcatcaccaaattggcaggactgatccccagcgtgcaggcccgtagactgcatcggatcgcacagtcatctgacgatacgatgaaatgcttcatggaaaaagagaaaatggaacagctgcataagaaattgtggattcaagctggaggggacagagagaacataccctcgatttgggaagcaccaccgtcgagtgaaccaccaaacaacgtgagcacaaattcggaatgggaagcaccgacccagaaagataaatttccaaagccttgcaattggaggaaaaacgaattcaaaaaatggaccaaattggcatcccaaggccgcggaattgtaaattttgaaagagacaaaattagtaaccattggatccaatactacagacgcatacctcacaggaaactcctcactgcactacaactcagggccaacgtttaccccacgagagaatttctagccaggggtagacaagaccaatacatcaaggcgtgtaggcactgcgatgcggacaacgaatcctgcgcccacatcatcggcaactgcccagtgacacaggacgcccgaatcaagaggcacaattacatctgcgaactgcttctcgaggaggcgaagaagaaggactgggtagtgttcaaggaaccgcacataagggattccaacaaggaactgtacaaacctgacctgatatttgtgaaggatgggcgtgcacttgtcgtggatgtgacagtacggtatgaagcagccaaatcatcgctggaggaagccgctgcagagaaagtgagaaagtacaaacacctggaaacggaagtaagacatctcacgaatgcaaaggacgttacttttgtgggctttcccctaggagcgcgggggaaatggcaccaagataactttaaacttttgactgagcttggcctctccaaatcgaggcaagtgaaaatggcagagactttttccacagtagcgctcttttcatctgtggacattgtacatatgtttgccagtagggccagaaaatctatggttatgtgataataggctgccttctgcggggcttgccttctggccatgcccttcttctctcccttgcacctgtacctcttggtctttgaataaagcctgagtaggaaggaccggtaaaaaaaaaaaaaaaaaaaaaaaaaaaaaaacgttgactaaaaaaaaaaaaaaaaaaaaaaaaaaaaaaaaaaaaaaaaaaaaaaaaaaaaaaaaaaaaaaaaaaaaaa

SEQ ID NO: 11751 - DNA, 4439 bp, synthetic construct
  source 1..4439: mol_type = other DNA
gaaataagagagaaaagaagagtaagaagaaatataagagaattcgccaccatggcttcttgcccgaaacctggccccccggtttcagcaggggcaatgagtttggaaagtggactgaccacccactccgttctcgccatcgaacgtggtcccaattcgttggcaaattccggatcagactttgggggggggggtctggggctaccgttacgcctattgagggtatcggtcggcactcagacctcccgctccgactgggtagacctggtgtcctggagccacccaggacccacgtctaagtcccagcaggttgacctggtgtctttatttcctaaacaccgggttgacctgttatccaaaaacgaccaggtagacctggtggctcaatttttaccatctaaatttccccccaatttggcagaaaatgatttggctttgctggtgaacttagagttctacagatcggatttgcatgtgtatgagtgtgttcataaggctgcacattgggagggattaagtggtttgcctgaggtgtatgaacaacttgcaccacaaccgtgtgtgggagaaactttacattctagcctcccacgagacagtgaactgtttgtgcctgaagaggggagcagcgagaaggagagcgaggacgcgccaaaaacatctcctccgacgcctgggaaacatggtttggaacagactggggaggaaaaagtgatggtgactgttcctgacaaaaatccaccttgtccttgctgtggtacccgggtaaactctgtgttgaatctgattgaacatctgaaagtgtcacacgggaaaaggggggtttgttttcggtgtgcaaaatgtggaaaggaaaatagtaactatcacagtgttgtttgtcattttaagaaatgcaggggtccagagacggagaaagccccagctggggagtggatttgtgaggtatgcaacagagattttacaaccaaaattggcctgggacaacacaagagattggcacacccagcagtgagaaatcaggaaaggatcgttgcttcccaaccgaaagaaacatcaaatagaggtgctcacaaaaggtgctggacaaaggaggaggaagaattactaataagactggaggctcagttcgagggaaacaaaaatattaataagcttattgcagaacacataaccaccaaaacagctaagcagatcagtgacaaaaggcgattgctgtccagaaagccagcagaggagccacgtgaggagcctggaacgtgtcatcacaccaggagagcagctgcgagcctgagaacggagcctgagatgagtcatcacgcccaggcagaggacagagataatggacctgggagacgccctctgccaggcagggcagctgccggagggagaacaatggacgagataagacgccaccctgataagggcaacggacagcagagacccaccaagcaaaaatcagaagaacagctgcaggcttactataaaaagacactagaggaacgactttcagctggggcacttaacaccttcccccgagcattcaagcaggtaatggaaggccgggatataaagctagtaatcaatcagacagcgcaggactgcttcggatgcctggaatccataagccaaataagaacggcaacccgagataaaaaggacacggtgacccgggagaaacacccaaagaaaccttttcagaagtggatgaagaagagagcaatcaaaaaaggtaattatcttcggttccagcgtttattttatcttgatagagggaaactggctaaaatcattttagatgatattgaatgcttgtcttgtgacataccactcagtgaaatttattcggtttttaaaacaagatgggaaacaactggtagctttaaaagccttggggactttaaaacttacgggaaggctgacaacactgccttcagagaattaattacggctaaagaaattgagaaaaatgtgcaggaaatgagcaaaggctcggctcccggtccagacgggattactcttggggacagggtaaagatggatcccgagttttcccggaccatggagattttcaatttatggttaacaactggtaaaatcccggacatggtgagggggtgcagaaccgttttgattccaaaatcatcaaagccggatcgtttgaaagacattaataactggagacctatcacgatcggttccatcttgctgagactgttctccaggattgtaacagctaggctgagcaaagcgtgccccctgaacccaaggcaaagaggctttatcagagcggcgggatgctctgaaaacttaaaactcctgcaaactataatttggtcggccaaaagagaacacagaccactgggtgttgtattcgtggacatcgccaaggcttttgacaccgtaagccaccagcacatcattcatgctttgcagcaaagagaggtggatccccacatcgtcggtctggtgagcaatatgtacgagaacatcagtacgtatatcaccacaaagaggaacacacacacagacaaaatccagatccgggttggagtaaagcagggtgacccgatgtcgccccttttatttaacctggcaatggaccctctattatgcaagctggaagagagtggcaaaggataccaccgaggacagagcagcatcacagcgatggcatttgcagacgatctggttttgctgagcgactcctgggaaaatatgaatacaaatattagcatactggagaccttctgcaatctgaccggactcaaaacacaggggcaaaagtgccacggcttttacatcaagccgacaaaggactcttacaccatcaatgactgcgctgcctggactatcaacggcacacccctgaacatgatcgaccccggcgaatctgagaaatacctcggcctgcagtttgacccgtggattggaatagcaaggtccggtctctccacaaaactagatttttggcttcagcggatcgatcaagcaccacttaaacctctgcagaaaactgatattctcaaaacatacaccatccctcggctgatctacatagctgaccactcagaagtgaaaagcgcactactcgaaacccttgaccagaagatccggacagcggtcaaggaatggcttcacctacctccgtgcacctgcgatgccatcctgtactcgagcacgagagacggcggtttgggcatcaccaaattggcaggactgatccccagcgtgcaggcccgtagactgcatcggatcgcacagtcatctgacgatacgatgaaatgcttcatggaaaaagagaaaatggaacagctgcataagaaattgtggattcaagctggaggggacagagagaacataccctcgatttgggaagcaccaccgtcgagtgaaccaccaaacaacgtgagcacaaattcggaatgggaagcaccgacccagaaagataaatttccaaagccttgcaattggaggaaaaacgaattcaaaaaatggaccaaattggcatcccaaggccgcggaattgtaaattttgaaagagacaaaattagtaaccattggatccaatactacagacgcatacctcacaggaaactcctcactgcactacaactcagggccaacgtttaccccacgagagaatttctagccaggggtagacaagaccaatacatcaaggcgtgtaggcactgcgatgcggacaacgaatcctgcgcccacatcatcggcaactgcccagtgacacaggacgcccgaatcaagaggcacaattacatctgcgaactgcttctcgaggaggcgaagaagaaggactgggtagtgttcaaggaaccgcacataagggattccaacaaggaactgtacaaacctgacctgatatttgtgaaggatgggcgtgcacttgtcgtggatgtgacagtacggtatgaagcagccaaatcatcgctggaggaagccgctgcagagaaagtgagaaagtacaaacacctggaaacggaagtaagacatctcacgaatgcaaaggacgttacttttgtgggctttcccctaggagcgcgggggaaatggcaccaagataactttaaacttttgactgagcttggcctctccaaatcgaggcaagtgaaaatggcagagactttttccacagtagcgctcttttcatctgtggacattgtacatatgtttgccagtagggccagaaaatctatggttatgtgataataggctgccttctgcggggcttgccttctggccatgcccttcttctctcccttgcacctgtacctcttggtctttgaataaagcctgagtaggaaggaccggtaaaaaaaaaaaaaaaaaaaaaaaaaaaaaaacgttgactaaaaaaaaaaaaaaaaaaaaaaaaaaaaaaaaaaaaaaaaaaaaaaaaaaaaaaaaaaaaaaaaaaaaaa

SEQ ID NO: 11752 - DNA, 4439 bp, synthetic construct
  source 1..4439: mol_type = other DNA
gaaataagagagaaaagaagagtaagaagaaatataagagaattcgccaccatggcttcttgcccgaaacctggccccccggtttcagcaggggcaatgagtttggaaagtggactgaccacccactccgttctcgccatcgaacgtggtcccaattcgttggcaaattccggatcagactttgggggggggggtctggggctaccgttacgcctattgagggtatcggtcggcactcagacctcccgctccgactgggtagacctggtgtcctggagccacccaggacccacgtctaagtcccagcaggttgacctggtgtctttatttcctaaacaccgggttgacctgttatccaaaaacgaccaggtagacctggtggctcaatttttaccatctaaatttccccccaatttggcagaaaatgatttggctttgctggtgaacttagagttctacagatcggatttgcatgtgtatgagtgtgttcataaggctgcacattgggagggattaagtggtttgcctgaggtgtatgaacaacttgcaccacaaccgtgtgtgggagaaactttacattctagcctcccacgagacagtgaactgtttgtgcctgaagaggggagcagcgagaaggagagcgaggacgcgccaaaaacatctcctccgacgcctgggaaacatggtttggaacagactggggaggaaaaagtgatggtgactgttcctgacaaaaatccaccttgtccttgctgtggtacccgggtaaactctgtgttgaatctgattgaacatctgaaagtgtcacacgggaaaaggggggtttgttttcggtgtgcaaaatgtggaaaggaaaatagtaactatcacagtgttgtttgtcattttaagaaatgcaggggtccagagacggagaaagccccagctggggagtggatttgtgaggtatgcaacagagattttacaaccaaaattggcctgggacaacacaagagattggcacacccagcagtgagaaatcaggaaaggatcgttgcttcccaaccgaaagaaacatcaaatagaggtgctcacaaaaggtgctggacaaaggaggaggaagaattactaataagactggaggctcagttcgagggaaacaaaaatattaataagcttattgcagaacacataaccaccaaaacagctaagcagatcagtgacaaaaggcgattgctgtccagaaagccagcagaggagccacgtgaggagcctggaacgtgtcatcacaccaggagagcagctgcgagcctgagaacggagcctgagatgagtcatcacgcccaggcagaggacagagataatggacctgggagacgccctctgccaggcagggcagctgccggagggagaacaatggacgagataagacgccaccctgataagggcaacggacagcagagacccaccaagcaaaaatcagaagaacagctgcaggcttactataaaaagacactagaggaacgactttcagctggggcacttaacaccttcccccgagcattcaagcaggtaatggaaggccgggatataaagctagtaatcaatcagacagcgcaggactgcttcggatgcctggaatccataagccaaataagaacggcaacccgagataaaaaggacacggtgacccgggagaaacacccaaagaaaccttttcagaagtggatgaagaagagagcaatcaaaaaaggtaattatcttcggttccagcgtttattttatcttgatagagggaaactggctaaaatcattttagatgatattgaatgcttgtcttgtgacataccactcagtgaaatttattcggtttttaaaacaagatgggaaacaactggtagctttaaaagccttggggactttaaaacttacgggaaggctgacaacactgccttcagagaattaattacggctaaagaaattctgaaaaatgtgcaggaaatgagcaaaggctcggctcccggtccagacgggattactcttggggacgtcgtaaagatggatcccgagttttcccggaccatggagattttcaatttatggttaacaactggtaaaatcccggacatggtgagggggtgcagaaccgttttgattccaaaatcatcaaagccggatcgtttgaaagacattaataactggagacctatcacgatcggttccatcttgctgagactgttctccaggattgtaacagctaggctgagcaaagcgtgccccctgaacccaaggcaaagaggctttatcagagcggcgggatgctctgaaaacttaaaactcctgcaaactataatttggtcggccaaaagagaacacagaccactgggtgttgtattcgtggacatcgccaaggcttttgacaccgtaagccaccagcacatcattcatgctttgcagcaaagagaggtggatccccacatcgtcggtctggtgagcaatatgtacgagaacatcagtacgtatatcaccacaaagaggaacacacacacagacaaaatccagatccgggttggagtaaagcagggtgacccgatgtcgccccttttatttaacctggcaatggaccctctattatgcaagctggaagagagtggcaaaggataccaccgaggacagagcagcatcacagcgatggcatttgcagacgatctggttttgctgagcgactcctgggaaaatatgaatacaaatattagcatactggagaccttctgcaatctgaccggactcaaaacacaggggcaaaagtgccacggcttttacatcaagccgacaaaggactcttacaccatcaatgactgcgctgcctggactatcaacggcacacccctgaacatgatcgaccccggcgaatctgagaaatacctcggcctgcagtttgacccgtggattggaatagcaaggtccggtctctccacaaaactagatttttggcttcagcggatcgatcaagcaccacttaaacctctgcagaaaactgatattctcaaaacatacaccatccctcggctgatctacatagctgaccactcagaagtgaaaagcgcactactcgaaacccttgaccagaagatccggacagcggtcaaggaatggcttcacctacctccgtgcacctgcgatgccatcctgtactcgagcacgagagacggcggtttgggcatcaccaaattggcaggactgatccccagcgtgcaggcccgtagactgcatcggatcgcacagtcatctgacgatacgatgaaatgcttcatggaaaaagagaaaatggaacagctgcataagaaattgtggattcaagctggaggggacagagagaacataccctcgatttgggaagcaccaccgtcgagtgaaccaccaaacaacgtgagcacaaattcggaatgggaagcaccgacccagaaagataaatttccaaagccttgcaattggaggaaaaacgaattcaaaaaatggaccaaattggcatcccaaggccgcggaattgtaaattttgaaagagacaaaattagtaaccattggatccaatactacagacgcatacctcacaggaaactcctcactgcactacaactcagggccaacgtttaccccacgagagaatttctagccaggggtagacaagaccaatacatcaaggcgtgtaggcactgcgatgcggacaacgaatcctgcgcccacatcatcggcaactgcccagtgacacaggacgcccgaatcaagaggcacaattacatctgcgaactgcttctcgaggaggcgaagaagaaggactgggtagtgttcaaggaaccgcacataagggattccaacaaggaactgtacaaacctgacctgatatttgtgaaggatgggcgtgcacttgtcgtggatgtgacagtacggtatgaagcagccaaatcatcgctggaggaagccgctgcagagaaagtgagaaagtacaaacacctggaaacggaagtaagacatctcacgaatgcaaaggacgttacttttgtgggctttcccctaggagcgcgggggaaatggcaccaagataactttaaacttttgactgagcttggcctctccaaatcgaggcaagtgaaaatggcagagactttttccacagtagcgctcttttcatctgtggacattgtacatatgtttgccagtagggccagaaaatctatggttatgtgataataggctgccttctgcggggcttgccttctggccatgcccttcttctctcccttgcacctgtacctcttggtctttgaataaagcctgagtaggaaggaccggtaaaaaaaaaaaaaaaaaaaaaaaaaaaaaaacgttgactaaaaaaaaaaaaaaaaaaaaaaaaaaaaaaaaaaaaaaaaaaaaaaaaaaaaaaaaaaaaaaaaaaaaaa

SEQ ID NO: 11753 - DNA, 5144 bp, synthetic construct
  source 1..5144: mol_type = other DNA
gaaataagagagaaaagaagagtaagaagaaatataagagaattcgccaccatggcccctaagaaaaagagaaaggtggtgaccgtgaagttcaagtacaagggcgaggaaaaggaagtggacatcagcaagatcaagaaggtctggcgggtgggcaagatgatcagctttacctacgacgataacggcaagacaggcagaggcgccgtgtccgagaaggacgcccctaaagagctgctgcagatgctggaaaaaagcggctctgagacacctggaacaagcgagagcgccaccccggaatccaatatcagcggctctagctgcggcagccccaacagcgccgacaccagcagcgacttcaaggacctgtggaccaagctgaaggaatgccacgaccgggaagtgcagggactccaggtgaaggtcaccaaactcaagcaagaaagaatcctggacgcccagagactggaagaattcttcaccaagaaccagcagctgagagagcagcagaaagtgctgcacgagacaatcaaggttctggaagatagactgcgggccggcctgtgcgacagatgcgccgtgaccgaggaacacatgcgcaaaaagcagcaggagttcgagaacattagacagcaaaatctgaaattgatcacagagctgatgaacgagagaaacacactgcaggaggagaacaagaagctgagcgagcagctgcaacagaagatcgagaatgatcagcaacaccaggccgctgagctggaatgtgaagaggacgtgatccccgacagcccaatcacagctttcagcttttctggcgtgaacagactgaggcggaaggaaaacccccacgtgcggtacatcgagcagacccataccaagctggaacacagcgtgtgtgccaacgagatgagaaaggtgtccaagtcctccacccatccccagcacaaccctaacgaaaatgagatcctggtggctgatacctacgaccagtctcagagccctatggccaaggcccacggcaccagctcttatacccctgataagagctccttcaacctggccaccgtggtggccgagacactgggcctgggcgtgcaggaggaaagcgagacacagggcccaatgagccctctgggagatgagctgtaccactgcctggaaggcaaccacaagaaacagccttttgagtccggctccgagactcctggaacaagcgagagcgctacacctgagggcagctatgaacaacttgcaccacaaccgtgtgtgggagaaactttacattctagcctcccacgagacagtgaactgtttgtgcctgaagaggggagcagcgagaaggagagcgaggacgcgccaaaaacatctcctccgacgcctgggaaacatggtttggaacagactggggaggaaaaagtgatggtgactgttcctgacaaaaatccaccttgtccttgctgtggtacccgggtaaactctgtgttgaatctgattgaacatctgaaagtgtcacacgggaaaaggggggtttgttttcggtgtgcaaaatgtggaaaggaaaatagtaactatcacagtgttgtttgtcattttaagaaatgcaggggtccagagacggagaaagccccagctggggagtggatttgtgaggtatgcaacagagattttacaaccaaaattggcctgggacaacacaagagattggcacacccagcagtgagaaatcaggaaaggatcgttgcttcccaaccgaaagaaacatcaaatagaggtgctcacaaaaggtgctggacaaaggaggaggaagaattactaataagactggaggctcagttcgagggaaacaaaaatattaataagcttattgcagaacacataaccaccaaaacagctaagcagatcagtgacaaaaggcgattgctgtccagaaagccagcagaggagccacgtgaggagcctggaacgtgtcatcacaccaggagagcagctgcgagcctgagaacggagcctgagatgagtcatcacgcccaggcagaggacagagataatggacctgggagacgccctctgccaggcagggcagctgccggagggagaacaatggacgagataagacgccaccctgataagggcaacggacagcagagacccaccaagcaaaaatcagaagaacagctgcaggcttactataaaaagacactagaggaacgactttcagctggggcacttaacaccttcccccgagcattcaagcaggtaatggaaggccgggatataaagctagtaatcaatcagacagcgcaggactgcttcggatgcctggaatccataagccaaataagaacggcaacccgagataaaaaggacacggtgacccgggagaaacacccaaagaaaccttttcagaagtggatgaagaagagagcaatcaaaaaaggtaattatcttcggttccagcgtttattttatcttgatagagggaaactggctaaaatcattttagatgatattgaatgcttgtcttgtgacataccactcagtgaaatttattcggtttttaaaacaagatgggaaacaactggtagctttaaaagccttggggactttaaaacttacgggaaggctgacaacactgccttcagagaattaattacggctaaagaaattgagaaaaatgtgcaggaaatgagcaaaggctcggctcccggtccagacgggattactcttggggacgtcgtaaagatggatcccgagttttcccggaccatggagattttcaatttatggttaacaactggtaaaatcccggacatggtgagggggtgcagaaccgttttgattccaaaatcatcaaagccggatcgtttgaaagacattaataactggagacctatcacgatcggttccatcttgctgagactgttctccaggattgtaacagctaggctgagcaaagcgtgccccctgaacccaaggcaaagaggctttatcagagcggcgggatgctctgaaaacttaaaactcctgcaaactataatttggtcggccaaaagagaacacagaccactgggtgttgtattcgtggacatcgccaaggcttttgacaccgtaagccaccagcacatcattcatgctttgcagcaaagagaggtggatccccacatcgtcggtctggtgagcaatatgtacgagaacatcagtacgtatatcaccacaaagaggaacacacacacagacaaaatccagatccgggttggagtaaagcagggtgacccgatgtcgccccttttatttaacctggcaatggaccctctattatgcaagctggaagagagtggcaaaggataccaccgaggacagagcagcatcacagcgatggcatttgcagacgatctggttttgctgagcgactcctgggaaaatatgaatacaaatattagcatactggagaccttctgcaatctgaccggactcaaaacacaggggcaaaagtgccacggcttttacatcaagccgacaaagaagtcttacaccatcaatgactgcgctgcctggactatcaacggcacacccctgaacatgatcgaccccggcgaatctgagaaatacctcggcctgcagtttgacccgtggattggaatagcaaggtccggtctctccacaaaactagatttttggcttcagcggatcgatcaagcaccacttaaacctctgcagaaaactgatattctcaaaacatacaccatccctcggctgatctacatagctgaccactcagaagtgaaaagcgcactactcgaaacccttgaccagaagatccggacagcggtcaaggaatggcttcacctacctccgtgcacctgcgatgccatcctgtactcgagcacgagagacggcggtttgggcatcaccaaattggcaggactgatccccagcgtgcaggcccgtagactgcatcggatcgcacagtcatctgacgatacgatgaaatgcttcatggaaaaagagaaaatggaacagctgcataagaaattgtggattcaagctggaggggacagagagaacataccctcgatttgggaagcaccaccgtcgagtgaaccaccaaacaacgtgagcacaaattcggaatgggaagcaccgacccagaaagataaatttccaaagccttgcaattggaggaaaaacgaattcaaaaaatggaccaaattggcatcccaaggccgcggaattgtaaattttgaaagagacaaaattagtaaccattggatccaatactacagacgcatacctcacaggaaactcctcactgcactacaactcagggccaacgtttaccccacgagagaatttctagccaggggtagacaagaccaatacatcaaggcgtgtaggcactgcgatgcggacaacgaatcctgcgcccacatcatcggcaactgcccagtgacacaggacgcccgaatcaagaggcacaattacatctgcgaactgcttctcgaggaggcgaagaagaaggactgggtagtgttcaaggaaccgcacataagggattccaacaaggaactgtacaaacctgacctgatatttgtgaaggatgggcgtgcacttgtcgtggatgtgacagtacggtatgaagcagccaaatcatcgctggaggaagccgctgcagagaaagtgagaaagtacaaacacctggaaacggaagtaagacatctcacgaatgcaaaggacgttacttttgtgggctttcccctaggagcgcgggggaaatggcaccaagataactttaaacttttgactgagcttggcctctccaaatcgaggcaagtgaaaatggcagagactttttccacagtagcgctcttttcatctgtggacattgtacatatgtttgccagtagggccagaaaatctatggttatgtgataataggctgccttctgcggggcttgccttctggccatgcccttcttctctcccttgcacctgtacctcttggtctttgaataaagcctgagtaggaaggaccggtaaaaaaaaaaaaaaaaaaaaaaaaaaaaaaacgttgactaaaaaaaaaaaaaaaaaaaaaaaaaaaaaaaaaaaaaaaaaaaaaaaaaaaaaaaaaaaaaaaaaaaaaa

SEQ ID NO: 11754 - DNA, 4460 bp, synthetic construct
  source 1..4460: mol_type = other DNA
gaaataagagagaaaagaagagtaagaagaaatataagagaattcgccaccatgcctaagagaaaggtgtccagcgccgagggcgctgccaaggaagagcctaaacggagaagcgccagactgagcgccaagccccccgccaaggtggaagccaagcctaagaaggccgccgctaaggacaagagcagcgataagaaagtccagaccaagggcaagcggggcgccaaaggcaaacaggccgaggtggccaaccaggagacaaaggaagatctgcctgctgagaacggcgaaaccaagaccgaggaatctccagcttctgacgaggccggagagaaggaggccaaaagcgacagcggctctgagacacctggaacaagcgagagcgccaccccggaatccgtgaccgtgaagttcaagtacaagggcgaggaaaaggaagtggacatcagcaagatcaagaaggtctggcgggtgggcaagatgatcagctttacctacgacgataacggcaagacaggcagaggcgccgtgtccgagaaggacgcccctaaagagctgctgcagatgctggaaaaaagcggctctgagacacctggaacaagcgagagcgccaccccggaatccctgtttgtgcctgaagaggggagcagcgagaaggagagcgaggacgcgccaaaaacatctcctccgacgcctgggaaacatggtttgaggcagactggggaggaaaaagtgatggtgactgttcctgacaaaaatccaccttgtccttgctgtggtacccgggtaaactctgtgttgaatctgattgaacatctgaaagtgtcacacgggaaaaggggggtttgttttcggtgtgcaaaatgtggaaaggaaaatagtaactatcacagtgttgtttgtcattttaagaaatgcaggggtccagagacggagaaagccccagctggggagtggatttgtgaggtatgcaacagagattttacaaccaaaattggcctgggacaacacaagagattggcacacccagcagtgagaaatcaggaaaggatcgttgcttcccaaccgaaagaaacatcaaatagaggtgctcacaaaaggtgctggacaaaggaggaggaagaattactaataagactggaggctcagttcgagggaaacaaaaatattaataagcttattgcagaacacataaccaccaaaacagctaagcagatcagtgacaaaaggcgattgctgtccagaaagccagcagaggagccacgtgaggagcctggaacgtgtcatcacaccaggagagcagctgcgagcctgagaacggagcctgagatgagtcatcacgcccaggcagaggacagagataatggacctgggagacgccctctgccaggcagggcagctgccggagggagaacaatggacgagataagacgccaccctgataagggcaacggacagcagagacccaccaagcaaaaatcagaagaacagctgcaggcttactataaaaagacactagaggaacgactttcagctggggcacttaacaccttcccccgagcattcaagcaggtaatggaaggccgggatataaagctagtaatcaatcagacagcgcaggactgcttcggatgcctggaatccataagccaaataagaacggcaacccgagataaaaaggacacggtgacccgggagaaacacccaaagaaaccttttcagaagtggatgaagaagagagcaatcaaaaaaggtaattatcttcggttccagcgtttattttatcttgatagagggaaactggctaaaatcattttagatgatattgaatgcttgtcttgtgacataccactcagtgaaatttattcggtttttaaaacaagatgggaaacaactggtagctttaaaagccttggggactttaaaacttacgggaaggctgacaacactgccttcagagaattaattacggctaaagaaattgagaaaaatgtgcaggaaatgagcaaaggctcggctcccggtccagacgggattactcttggggacgtcgtaaagatggatcccgagttttcccggaccatggagattttcaatttatggttaacaactggtaaaatcccggacatggtgagggggtgcagaaccgttttgattccaaaatcatcaaagccggatcgtttgaaagacattaataactggagacctatcacgatcggttccatcttgctgagactgttctccaggattgtaacagctaggctgagcaaagcgtgccccctgaacccaaggcaaagaggctttatcagagcggcgggatgctctgaaaacttaaaactcctgcaaactataatttggtcggccaaaagagaacacagaccactgggtgttgtattcgtggacatcgccaaggcttttgacaccgtaagccaccagcacatcattcatgctttgcagcaaagagaggtggatccccacatcgtcggtctggtgagcaatatgtacgagaacatcagtacgtatatcaccacaaagaggaacacacacacagacaaaatccagatccgggttggagtaaagcagggtgacccgatgtcgccccttttatttaacctggcaatggaccctctattatgcaagctggaagagagtggcaaaggataccaccgaggacagagcagcatcacagcgatggcatttgcagacgatctggttttgctgagcgactcctgggaaaatatgaatacaaatattagcatactggagaccttctgcaatctgaccggactcaaaacacaggggcaaaagtgccacggcttttacatcaagccgacaaaggactcttacaccatcaatgactgcgctgcctggactatcaacggcacacccctgaacatgatcgaccccggcgaatctgagaaatacctcggcctgcagtttgacccgtggattggaatagcaaggtccggtctctccacaaaactagatttttggcttcagcggatcgatcaagcaccacttaaacctctgcagaaaactgatattctcaaaacatacaccatccctcggctgatctacatagctgaccactcagaagtgaaaagcgcactactcgaaacccttgaccagaagatccggacagcggtcaaggaatggcttcacctacctccgtgcacctgcgatgccatcctgtactcgagcacgagagacggcggtttgggcatcaccaaattggcaggactgatccccagcgtgcaggcccgtagactgcatcggatcgcacagtcatctgacgatacgatgaaatgcttcatggaaaaagagaaaatggaacagctgcataagaaattgtggattcaagctggaggggacagagagaacataccctcgatttgggaagcaccaccgtcgagtgaaccaccaaacaacgtgagcacaaattcggaatgggaagcaccgacccagaaagataaatttccaaagccttgcaattggaggaaaaacgaattcaaaaaatggaccaaattggcatcccaaggccgcggaattgtaaattttgaaagagacaaaattagtaaccattggatccaatactacagacgcatacctcacaggaaactcctcactgcactacaactcagggccaacgtttaccccacgagagaatttctagccaggggtagacaagaccaatacatcaaggcgtgtaggcactgcgatgcggacaacgaatcctgcgcccacatcatcggcaactgcccagtgacacaggacgcccgaatcaagaggcacaattacatctgcgaactgcttctcgaggaggcgaagaagaaggactgggtagtgttcaaggaaccgcacataagggattccaacaaggaactgtacaaacctgacctgatatttgtgaaggatgggcgtgcacttgtcgtggatgtgacagtacggtatgaagcagccaaatcatcgctggaggaagccgctgcagagaaagtgagaaagtacaaacacctggaaacggaagtaagacatctcacgaatgcaaaggacgttacttttgtgggctttcccctaggagcgcgggggaaatggcaccaagataactttaaacttttgactgagcttggcctctccaaatcgaggcaagtgaaaatggcagagactttttccacagtagcgctcttttcatctgtggacattgtacatatgtttgccagtagggccagaaaatctatggttatgtgataataggctgccttctgcggggcttgccttctggccatgcccttcttctctcccttgcacctgtacctcttggtctttgaataaagcctgagtaggaaggaccggtaaaaaaaaaaaaaaaaaaaaaaaaaaaaaaacgttgactaaaaaaaaaaaaaaaaaaaaaaaaaaaaaaaaaaaaaaaaaaaaaaaaaaaaaaaaaaaaaaaaaaaaaa

SEQ ID NO: 11755 - DNA, 5240 bp, synthetic construct
  source 1..5240: mol_type = other DNA
gaaataagagagaaaagaagagtaagaagaaatataagagaattcgccaccatgcctaagagaaaggtgtccagcgccgagggcgctgccaaggaagagcctaaacggagaagcgccagactgagcgccaagccccccgccaaggtggaagccaagcctaagaaggccgccgctaaggacaagagcagcgataagaaagtccagaccaagggcaagcggggcgccaaaggcaaacaggccgaggtggccaaccaggagacaaaggaagatctgcctgctgagaacggcgaaaccaagaccgaggaatctccagcttctgacgaggccggagagaaggaggccaaaagcgacagcggctctgagacacctggaacaagcgagagcgccaccccggaatccaatatcagcggctctagctgcggcagccccaacagcgccgacaccagcagcgacttcaaggacctgtggaccaagctgaaggaatgccacgaccgggaagtgcagggactccaggtgaaggtcaccaaactcaagcaagaaagaatcctggacgcccagagactggaagaattcttcaccaagaaccagcagctgagagagcagcagaaagtgctgcacgagacaatcaaggttctggaagatagactgcgggccggcctgtgcgacagatgcgccgtgaccgaggaacacatgcgcaaaaagcagcaggagttcgagaacattagacagcaaaatctgaaattgatcacagagctgatgaacgagagaaacacactgcaggaggagaacaagaagctgagcgagcagctgcaacagaagatcgagaatgatcagcaacaccaggccgctgagctggaatgtgaagaggacgtgatccccgacagcccaatcacagctttcagcttttctggcgtgaacagactgaggcggaaggaaaacccccacgtgcggtacatcgagcagacccataccaagctggaacacagcgtgtgtgccaacgagatgagaaaggtgtccaagtcctccacccatccccagcacaaccctaacgaaaatgagatcctggtggctgatacctacgaccagtctcagagccctatggccaaggcccacggcaccagctcttatacccctgataagagctccttcaacctggccaccgtggtggccgagacactgggcctgggcgtgcaggaggaaagcgagacacagggcccaatgagccctctgggagatgagctgtaccactgcctggaaggcaaccacaagaaacagccttttgagtccggctccgagactcctggaacaagcgagagcgctacacctgagggcagctatgaacaacttgcaccacaaccgtgtgtgggagaaactttacattctagcctcccacgagacagtgaactgtttgtgcctgaagaggggagcagcgagaaggagagcgaggacgcgccaaaaacatctcctccgacgcctgggaaacatggtttggaacagactggggaggaaaaagtgatggtgactgttcctgacaaaaatccaccttgtccttgctgtggtacccgggtaaactctgtgttgaatctgattgaacatctgaaagtgtcacacgggaaaaggggggtttgttttcggtgtgcaaaatgtggaaaggaaaatagtaactatcacagtgttgtttgtcattttaagaaatgcaggggtccagagacggagaaagccccagctggggagtggatttgtgaggtatgcaacagagattttacaaccaaaattggcctgggacaacacaagagattggcacacccagcagtgagaaatcaggaaaggatcgttgcttcccaaccgaaagaaacatcaaatagaggtgctcacaaaaggtgctggacaaaggaggaggaagaattactaataagactggaggctcagttcgagggaaacaaaaatattaataagcttattgcagaacacataaccaccaaaacagctaagcagatcagtgacaaaaggcgattgctgtccagaaagccagcagaggagccacgtgaggagcctggaacgtgtcatcacaccaggagagcagctgcgagcctgagaacggagcctgagatgagtcatcacgcccaggcagaggacagagataatggacctgggagacgccctctgccaggcagggcagctgccggagggagaacaatggacgagataagacgccaccctgataagggcaacggacagcagagacccaccaagcaaaaatcagaagaacagctgcaggcttactataaaaagacactagaggaacgactttcagctggggcacttaacaccttcccccgagcattcaagcaggtaatggaaggccgggatataaagctagtaatcaatcagacagcgcaggactgcttcggatgcctggaatccataagccaaataagaacggcaacccgagataaaaaggacacggtgacccgggagaaacacccaaagaaaccttttcagaagtggatgaagaagagagcaatcaaaaaaggtaattatcttcggttccagcgtttattttatcttgatagagggaaactggctaaaatcattttagatgatattgaatgcttgtcttgtgacataccactcagtgaaatttattcggtttttaaaacaagatgggaaacaactggtagctttaaaagccttggggactttaaaacttacgggaaggctgacaacactgccttcagagaattaattacggctaaagaaattgagaaaaatgtgcaggaaatgagcaaaggctcggctcccggtccagacgggattactcttggggacgtcgtaaagatggatcccgagttttcccggaccatggagattttcaatttatggttaacaactggtaaaatcccggacatggtgagggggtgcagaaccgttttgattccaaaatcatcaaagccggatcgtttgaaagacattaataactggagacctatcacgatcggttccatcttgctgagactgttctccaggattgtaacagctaggctgagcaaagcgtgccccctgaacccaaggcaaagaggctttatcagagcggcgggatgctctgaaaacttaaaactcctgcaaactataatttggtcggccaaaagagaacacagaccactgggtgttgtattcgtggacatcgccaaggcttttgacaccgtaagccaccagcacatcattcatgctttgcagcaaagagaggtggatccccacatcgtcggtctggtgagcaatatgtacgagaacatcagtacgtatatcaccacaaagaggaacacacacacagacaaaatccagatccgggttggagtaaagcagggtgacccgatgtcgccccttttatttaacctggcaatggaccctctattatgcaagctggaagagagtggcaaaggataccaccgaggacagagcagcatcacagcgatggcatttgcagacgatctggttttgctgagcgactcctgggaaaatatgaatacaaatattagcatactggagaccttctgcaatctgaccggactcaaaacacaggggcaaaagtgccacggcttttacatcaagccgacaaaggactcttacaccatcaatgactgcgctgcctggactatcaacggcacacccctgaacatgatcgaccccggcgaatctgagaaatacctcggcctgcagtttgacccgtggattggaatagcaaggtccggtctctccacaaaactagatttttggcttcagcggatcgatcaagcaccacttaaacctctgcagaaactggatattctcaaaacatacaccatccctcggctgatctacatagctgaccactcagaagtgaaaagcgcactactcgaaacccttgaccagaagatccggacagcggtcaaggaatggcttcacctacctccgtgcacctgcgatgccatcctgtactcgagcacgagagacggcggtttgggcatcaccaaattggcaggactgatccccagcgtgcaggcccgtagactgcatcggatcgcacagtcatctgacgatacgatgaaatgcttcatggaaaaagagaaaatggaacagctgcataagaaattgtggattcaagctggaggggacagagagaacataccctcgatttgggaagcaccaccgtcgagtgaaccaccaaacaacgtgagcacaaattcggaatgggaagcaccgacccagaaagataaatttccaaagccttgcaattggaggaaaaacgaattcaaaaaatggaccaaattggcatcccaaggccgcggaattgtaaattttgaaagagacaaaattagtaaccattggatccaatactacagacgcatacctcacaggaaactcctcactgcactacaactcagggccaacgtttaccccacgagagaatttctagccaggggtagacaagaccaatacatcaaggcgtgtaggcactgcgatgcggacaacgaatcctgcgcccacatcatcggcaactgcccagtgacacaggacgcccgaatcaagaggcacaattacatctgcgaactgcttctcgaggaggcgaagaagaaggactgggtagtgttcaaggaaccgcacataagggattccaacaaggaactgtacaaacctgacctgatatttgtgaaggatgggcgtgcacttgtcgtggatgtgacagtacggtatgaagcagccaaatcatcgctggaggaagccgctgcagagaaagtgagaaagtacaaacacctggaaacggaagtaagacatctcacgaatgcaaaggacgttacttttgtgggctttcccctaggagcgcgggggaaatggcaccaagataactttaaacttttgactgagcttggcctctccaaatcgaggcaagtgaaaatggcagagactttttccacagtagcgctcttttcatctgtggacattgtacatatgtttgccagtagggccagaaaatctatggttatgtgataataggctgccttctgcggggcttgccttctggccatgcccttcttctctcccttgcacctgtacctcttggtctttgaataaagcctgagtaggaaggaccggtaaaaaaaaaaaaaaaaaaaaaaaaaaaaaaacgttgactaaaaaaaaaaaaaaaaaaaaaaaaaaaaaaaaaaaaaaaaaaaaaaaaaaaaaaaaaaaaaaaaaaaaaa

SEQ ID NO: 11756 - DNA, 5240 bp, synthetic construct
  source 1..5240: mol_type = other DNA
gaaataagagagaaaagaagagtaagaagaaatataagagaattcgccaccatgcctaagagaaaggtgtccagcgccgagggcgctgccaaggaagagcctaaacggagaagcgccagactgagcgccaagccccccgccaaggtggaagccaagcctaagaaggccgccgctaaggacaagagcagcgataagaaagtccagaccaagggcaagcggggcgccaaaggcaaacaggccgaggtggccaaccaggagacaaaggaagatctgcctgctgagaacggcgaaaccaagaccgaggaatctccagcttctgacgaggccggagagaaggaggccaaaagcgacagcggctctgagacacctggaacaagcgagagcgccaccccggaatccaatatcagcggctctagctgcggcagccccaacagcgccgacaccagcagcgacttcaaggacctgtggaccaagctgaaggaatgccacgaccgggaagtgcagggactccaggtgaaggtcaccaaactcaagcaagaaagaatcctggacgcccagagactggaagaattcttcaccaagaaccagcagctgagagagcagcagaaagtgctgcacgagacaatcaaggttctggaagatagactgcgggccggcctgtgcgacagatgcgccgtgaccgaggaacacatgcgcaaaaagcagcaggagttcgagaacattagacagcaaaatctgaaattgatcacagagctgatgaacgagagaaacacactgcaggaggagaacaagaagctgagcgagcagctgcaacagaagatcgagaatgatcagcaacaccaggccgctgagctggaatgtgaagaggacgtgatccccgacagcccaatcacagctttcagcttttctggcgtgaacagactgaggcggaaggaaaacccccacgtgcggtacatcgagcagacccataccaagctggaacacagcgtgtgtgccaacgagatgagaaaggtgtccaagtcctccacccatccccagcacaaccctaacgaaaatgagatcctggtggctgatacctacgaccagtctcagagccctatggccaaggcccacggcaccagctcttatacccctgataagagctccttcaacctggccaccgtggtggccgagacactgggcctgggcgtgcaggaggaaagcgagacacagggcccaatgagccctctgggagatgagctgtaccactgcctggaaggcaaccacaagaaacagccttttgagtccggctccgagactcctggaacaagcgagagcgctacacctgagggcagctatgaacaacttgcaccacaaccgtgtgtgggagaaactttacattctagcctcccacgagacagtgaactgtttgtgcctgaagaggggagcagcgagaaggagagcgaggacgcgccaaaaacatctcctccgacgcctgggaaacatggtttggaacagactggggaggaaaaagtgatggtgactgttcctgacaaaaatccaccttgtccttgctgtggtacccgggtaaactctgtgttgaatctgattgaacatctgaaagtgtcacacgggaaaaggggggtttgttttcggtgtgcaaaatgtggaaaggaaaatagtaactatcacagtgttgtttgtcattttaagaaatgcaggggtccagagacggagaaagccccagctggggagtggatttgtgaggtatgcaacagagattttacaaccaaaattggcctgggacaacacaagagattggcacacccagcagtgagaaatcaggaaaggatcgttgcttcccaaccgaaagaaacatcaaatagaggtgctcacaaaaggtgctggacaaaggaggaggaagaattactaataagactggaggctcagttcgagggaaacaaaaatattaataagcttattgcagaacacataaccaccaaaacagctaagcagatcagtgacaaaaggcgattgctgtccagaaagccagcagaggagccacgtgaggagcctggaacgtgtcatcacaccaggagagcagctgcgagcctgagaacggagcctgagatgagtcatcacgcccaggcagaggacagagataatggacctgggagacgccctctgccaggcagggcagctgccggagggagaacaatggacgagataagacgccaccctgataagggcaacggacagcagagacccaccaagcaaaaatcagaagaacagctgcaggcttactataaaaagacactagaggaacgactttcagctggggcacttaacaccttcccccgagcattcaagcaggtaatggaaggccgggatataaagctagtaatcaatcagacagcgcaggactgcttcggatgcctggaatccataagccaaataagaacggcaacccgagataaaaaggacacggtgacccgggagaaacacccaaagaaaccttttcagaagtggatgaagaagagagcaatcaaaaaaggtaattatcttcggttccagcgtttattttatcttgatagagggaaactggctaaaatcattttagatgatattgaatgcttgtcttgtgacataccactcagtgaaatttattcggtttttaaaacaagatgggaaacaactggtagctttaaaagccttggggactttaaaacttacgggaaggctgacaacactgccttcagagaattaattacggctaaagaaattgagaaaaatgtgcaggaaatgagcaaaggctcggctcccggtccagacgggattactcttggggacgtcgtaaagatggatcccgagttttcccggaccatggagattttcaatttatggttaacaactggtaaaatcccggacatggtgagggggtgcagaaccgttttgattccaaaatcatcaaagccggatcgtttgaaagacattaataactggagacctatcacgatcggttccatcttgctgagactgttctccaggattgtaacagctaggctgagcaaagcgtgccccctgaacccaaggcaaagaggctttatcagagcggcgggatgctctgaaaacttaaaactcctgcaaactataatttggtcggccaaaagagaacacagaccactgggtgttgtattcgtggacatcgccaaggcttttgacaccgtaagccaccagcacatcattcatgctttgcagcaaagagaggtggatccccacatcgtcggtctggtgagcaatatgtacgagaacatcagtacgtatatcaccacaaagaggaacacacacacagacaaaatccagatccgggttggagtaaagcagggtgacccgatgtcgccccttttatttaacctggcaatggaccctctattatgcaagctggaagagagtggcaaaggataccaccgaggacagagcagcatcacagcgatggcatttgcagacgatctggttttgctgagcgactcctgggaaaatatgaatacaaatattagcatactggagaccttctgcaatctgaccggactcaaaacacaggggcaaaagtgccacggcttttacatcaagccgacaaagaagtcttacaccatcaatgactgcgctgcctggactatcaacggcacacccctgaacatgatcgaccccggcgaatctgagaaatacctcggcctgcagtttgacccgtggattggaatagcaaggtccggtctctccacaaaactagatttttggcttcagcggatcgatcaagcaccacttaaacctctgcagaaaactgatattctcaaaacatacaccatccctcggctgatctacatagctgaccactcagaagtgaaaagcgcactactcgaaacccttgaccagaagatccggacagcggtcaaggaatggcttcacctacctccgtgcacctgcgatgccatcctgtactcgagcacgagagacggcggtttgggcatcaccaaattggcaggactgatccccagcgtgcaggcccgtagactgcatcggatcgcacagtcatctgacgatacgatgaaatgcttcatggaaaaagagaaaatggaacagctgcataagaaattgtggattcaagctggaggggacagagagaacataccctcgatttgggaagcaccaccgtcgagtgaaccaccaaacaacgtgagcacaaattcggaatgggaagcaccgacccagaaagataaatttccaaagccttgcaattggaggaaaaacgaattcaaaaaatggaccaaattggcatcccaaggccgcggaattgtaaattttgaaagagacaaaattagtaaccattggatccaatactacagacgcatacctcacaggaaactcctcactgcactacaactcagggccaacgtttaccccacgagagaatttctagccaggggtagacaagaccaatacatcaaggcgtgtaggcactgcgatgcggacaacgaatcctgcgcccacatcatcggcaactgcccagtgacacaggacgcccgaatcaagaggcacaattacatctgcgaactgcttctcgaggaggcgaagaagaaggactgggtagtgttcaaggaaccgcacataagggattccaacaaggaactgtacaaacctgacctgatatttgtgaaggatgggcgtgcacttgtcgtggatgtgacagtacggtatgaagcagccaaatcatcgctggaggaagccgctgcagagaaagtgagaaagtacaaacacctggaaacggaagtaagacatctcacgaatgcaaaggacgttacttttgtgggctttcccctaggagcgcgggggaaatggcaccaagataactttaaacttttgactgagcttggcctctccaaatcgaggcaagtgaaaatggcagagactttttccacagtagcgctcttttcatctgtggacattgtacatatgtttgccagtagggccagaaaatctatggttatgtgataataggctgccttctgcggggcttgccttctggccatgcccttcttctctcccttgcacctgtacctcttggtctttgaataaagcctgagtaggaaggaccggtaaaaaaaaaaaaaaaaaaaaaaaaaaaaaaacgttgactaaaaaaaaaaaaaaaaaaaaaaaaaaaaaaaaaaaaaaaaaaaaaaaaaaaaaaaaaaaaaaaaaaaaaa

SEQ ID NO: 11757 - DNA, 5240 bp, synthetic construct
  source 1..5240: mol_type = other DNA
gaaataagagagaaaagaagagtaagaagaaatataagagaattcgccaccatgcctaagagaaaggtgtccagcgccgagggcgctgccaaggaagagcctaaacggagaagcgccagactgagcgccaagccccccgccaaggtggaagccaagcctaagaaggccgccgctaaggacaagagcagcgataagaaagtccagaccaagggcaagcggggcgccaaaggcaaacaggccgaggtggccaaccaggagacaaaggaagatctgcctgctgagaacggcgaaaccaagaccgaggaatctccagcttctgacgaggccggagagaaggaggccaaaagcgacagcggctctgagacacctggaacaagcgagagcgccaccccggaatccaatatcagcggctctagctgcggcagccccaacagcgccgacaccagcagcgacttcaaggacctgtggaccaagctgaaggaatgccacgaccgggaagtgcagggactccaggtgaaggtcaccaaactcaagcaagaaagaatcctggacgcccagagactggaagaattcttcaccaagaaccagcagctgagagagcagcagaaagtgctgcacgagacaatcaaggttctggaagatagactgcgggccggcctgtgcgacagatgcgccgtgaccgaggaacacatgcgcaaaaagcagcaggagttcgagaacattagacagcaaaatctgaaattgatcacagagctgatgaacgagagaaacacactgcaggaggagaacaagaagctgagcgagcagctgcaacagaagatcgagaatgatcagcaacaccaggccgctgagctggaatgtgaagaggacgtgatccccgacagcccaatcacagctttcagcttttctggcgtgaacagactgaggcggaaggaaaacccccacgtgcggtacatcgagcagacccataccaagctggaacacagcgtgtgtgccaacgagatgagaaaggtgtccaagtcctccacccatccccagcacaaccctaacgaaaatgagatcctggtggctgatacctacgaccagtctcagagccctatggccaaggcccacggcaccagctcttatacccctgataagagctccttcaacctggccaccgtggtggccgagacactgggcctgggcgtgcaggaggaaagcgagacacagggcccaatgagccctctgggagatgagctgtaccactgcctggaaggcaaccacaagaaacagccttttgagtccggctccgagactcctggaacaagcgagagcgctacacctgagggcagctatgaacaacttgcaccacaaccgtgtgtgggagaaactttacattctagcctcccacgagacagtgaactgtttgtgcctgaagaggggagcagcgagaaggagagcgaggacgcgccaaaaacatctcctccgacgcctgggaaacatggtttgaggcagactggggaggaaaaagtgatggtgactgttcctgacaaaaatccaccttgtccttgctgtggtacccgggtaaactctgtgttgaatctgattgaacatctgaaagtgtcacacgggaaaaggggggtttgttttcggtgtgcaaaatgtggaaaggaaaatagtaactatcacagtgttgtttgtcattttaagaaatgcaggggtccagagacggagaaagccccagctggggagtggatttgtgaggtatgcaacagagattttacaaccaaaattggcctgggacaacacaagagattggcacacccagcagtgagaaatcaggaaaggatcgttgcttcccaaccgaaagaaacatcaaatagaggtgctcacaaaaggtgctggacaaaggaggaggaagaattactaataagactggaggctcagttcgagggaaacaaaaatattaataagcttattgcagaacacataaccaccaaaacagctaagcagatcagtgacaaaaggcgattgctgtccagaaagccagcagaggagccacgtgaggagcctggaacgtgtcatcacaccaggagagcagctgcgagcctgagaacggagcctgagatgagtcatcacgcccaggcagaggacagagataatggacctgggagacgccctctgccaggcagggcagctgccggagggagaacaatggacgagataagacgccaccctgataagggcaacggacagcagagacccaccaagcaaaaatcagaagaacagctgcaggcttactataaaaagacactagaggaacgactttcagctggggcacttaacaccttcccccgagcattcaagcaggtaatggaaggccgggatataaagctagtaatcaatcagacagcgcaggactgcttcggatgcctggaatccataagccaaataagaacggcaacccgagataaaaaggacacggtgacccgggagaaacacccaaagaaaccttttcagaagtggatgaagaagagagcaatcaaaaaaggtaattatcttcggttccagcgtttattttatcttgatagagggaaactggctaaaatcattttagatgatattgaatgcttgtcttgtgacataccactcagtgaaatttattcggtttttaaaacaagatgggaaacaactggtagctttaaaagccttggggactttaaaacttacgggaaggctgacaacactgccttcagagaattaattacggctaaagaaattgagaaaaatgtgcaggaaatgagcaaaggctcggctcccggtccagacgggattactcttggggacgtcgtaaagatggatcccgagttttcccggaccatggagattttcaatttatggttaacaactggtaaaatcccggacatggtgagggggtgcagaaccgttttgattccaaaatcatcaaagccggatcgtttgaaagacattaataactggagacctatcacgatcggttccatcttgctgagactgttctccaggattgtaacagctaggctgagcaaagcgtgccccctgaacccaaggcaaagaggctttatcagagcggcgggatgctctgaaaacttaaaactcctgcaaactataatttggtcggccaaaagagaacacagaccactgggtgttgtattcgtggacatcgccaaggcttttgacaccgtaagccaccagcacatcattcatgctttgcagcaaagagaggtggatccccacatcgtcggtctggtgagcaatatgtacgagaacatcagtacgtatatcaccacaaagaggaacacacacacagacaaaatccagatccgggttggagtaaagcagggtgacccgatgtcgccccttttatttaacctggcaatggaccctctattatgcaagctggaagagagtggcaaaggataccaccgaggacagagcagcatcacagcgatggcatttgcagacgatctggttttgctgagcgactcctgggaaaatatgaatacaaatattagcatactggagaccttctgcaatctgaccggactcaaaacacaggggcaaaagtgccacggcttttacatcaagccgacaaaggactcttacaccatcaatgactgcgctgcctggactatcaacggcacacccctgaacatgatcgaccccggcgaatctgagaaatacctcggcctgcagtttgacccgtggattggaatagcaaggtccggtctctccacaaaactagatttttggcttcagcggatcgatcaagcaccacttaaacctctgcagaaaactgatattctcaaaacatacaccatccctcggctgatctacatagctgaccactcagaagtgaaaagcgcactactcgaaacccttgaccagaagatccggacagcggtcaaggaatggcttcacctacctccgtgcacctgcgatgccatcctgtactcgagcacgagagacggcggtttgggcatcaccaaattggcaggactgatccccagcgtgcaggcccgtagactgcatcggatcgcacagtcatctgacgatacgatgaaatgcttcatggaaaaagagaaaatggaacagctgcataagaaattgtggattcaagctggaggggacagagagaacataccctcgatttgggaagcaccaccgtcgagtgaaccaccaaacaacgtgagcacaaattcggaatgggaagcaccgacccagaaagataaatttccaaagccttgcaattggaggaaaaacgaattcaaaaaatggaccaaattggcatcccaaggccgcggaattgtaaattttgaaagagacaaaattagtaaccattggatccaatactacagacgcatacctcacaggaaactcctcactgcactacaactcagggccaacgtttaccccacgagagaatttctagccaggggtagacaagaccaatacatcaaggcgtgtaggcactgcgatgcggacaacgaatcctgcgcccacatcatcggcaactgcccagtgacacaggacgcccgaatcaagaggcacaattacatctgcgaactgcttctcgaggaggcgaagaagaaggactgggtagtgttcaaggaaccgcacataagggattccaacaaggaactgtacaaacctgacctgatatttgtgaaggatgggcgtgcacttgtcgtggatgtgacagtacggtatgaagcagccaaatcatcgctggaggaagccgctgcagagaaagtgagaaagtacaaacacctggaaacggaagtaagacatctcacgaatgcaaaggacgttacttttgtgggctttcccctaggagcgcgggggaaatggcaccaagataactttaaacttttgactgagcttggcctctccaaatcgaggcaagtgaaaatggcagagactttttccacagtagcgctcttttcatctgtggacattgtacatatgtttgccagtagggccagaaaatctatggttatgtgataataggctgccttctgcggggcttgccttctggccatgcccttcttctctcccttgcacctgtacctcttggtctttgaataaagcctgagtaggaaggaccggtaaaaaaaaaaaaaaaaaaaaaaaaaaaaaaacgttgactaaaaaaaaaaaaaaaaaaaaaaaaaaaaaaaaaaaaaaaaaaaaaaaaaaaaaaaaaaaaaaaaaaaaaa

SEQ ID NO: 11758 - DNA, 5264 bp, synthetic construct
  source 1..5264: mol_type = other DNA
gaaataagagagaaaagaagagtaagaagaaatataagagaattcgccaccatggcccctaagaaaaagcggaaggtgaatatcagcggctctagctgcggcagccccaacagcgccgacaccagcagcgacttcaaggacctgtggaccaagctgaaggaatgccacgaccgggaagtgcagggactccaggtgaaggtcaccaaactcaagcaagaaagaatcctggacgcccagagactggaagaattcttcaccaagaaccagcagctgagagagcagcagaaagtgctgcacgagacaatcaaggttctggaagatagactgcgggccggcctgtgcgacagatgcgccgtgaccgaggaacacatgcgcaaaaagcagcaggagttcgagaacattagacagcaaaatctgaaattgatcacagagctgatgaacgagagaaacacactgcaggaggagaacaagaagctgagcgagcagctgcaacagaagatcgagaatgatcagcaacaccaggccgctgagctggaatgtgaagaggacgtgatccccgacagcccaatcacagctttcagcttttctggcgtgaacagactgaggcggaaggaaaacccccacgtgcggtacatcgagcagacccataccaagctggaacacagcgtgtgtgccaacgagatgagaaaggtgtccaagtcctccacccatccccagcacaaccctaacgaaaatgagatcctggtggctgatacctacgaccagtctcagagccctatggccaaggcccacggcaccagctcttatacccctgataagagctccttcaacctggccaccgtggtggccgagacactgggcctgggcgtgcaggaggaaagcgagacacagggcccaatgagccctctgggagatgagctgtaccactgcctggaaggcaaccacaagaaacagccttttgagtccggctccgagactcctggaacaagcgagagcgctacacctgagggcagccctaagagaaaggtgtccagcgccgagggcgctgccaaggaagagcctaaacggagaagcgccagactgagcgccaagccccccgccaaggtggaagccaagcctaagaaggccgccgctaaggacaagagcagcgataagaaagtccagaccaagggcaagcggggcgccaaaggcaaacaggccgaggtggccaaccaggagacaaaggaagatctgcctgctgagaacggcgaaaccaagaccgaggaatctccagcttctgacgaggccggagagaaggaggccaaaagcgacagcggctctgagacacctggaacaagcgagagcgccaccccggaatcctatgaacaacttgcaccacaaccgtgtgtgggagaaactttacattctagcctcccacgagacagtgaactgtttgtgcctgaagaggggagcagcgagaaggagagcgaggacgcgccaaaaacatctcctccgacgcctgggaaacatggtttggaacagactggggaggaaaaagtgatggtgactgttcctgacaaaaatccaccttgtccttgctgtggtacccgggtaaactctgtgttgaatctgattgaacatctgaaagtgtcacacgggaaaaggggggtttgttttcggtgtgcaaaatgtggaaaggaaaatagtaactatcacagtgttgtttgtcattttaagaaatgcaggggtccagagacggagaaagccccagctggggagtggatttgtgaggtatgcaacagagattttacaaccaaaattggcctgggacaacacaagagattggcacacccagcagtgagaaatcaggaaaggatcgttgcttcccaaccgaaagaaacatcaaatagaggtgctcacaaaaggtgctggacaaaggaggaggaagaattactaataagactggaggctcagttcgagggaaacaaaaatattaataagcttattgcagaacacataaccaccaaaacagctaagcagatcagtgacaaaaggcgattgctgtccagaaagccagcagaggagccacgtgaggagcctggaacgtgtcatcacaccaggagagcagctgcgagcctgagaacggagcctgagatgagtcatcacgcccaggcagaggacagagataatggacctgggagacgccctctgccaggcagggcagctgccggagggagaacaatggacgagataagacgccaccctgataagggcaacggacagcagagacccaccaagcaaaaatcagaagaacagctgcaggcttactataaaaagacactagaggaacgactttcagctggggcacttaacaccttcccccgagcattcaagcaggtaatggaaggccgggatataaagctagtaatcaatcagacagcgcaggactgcttcggatgcctggaatccataagccaaataagaacggcaacccgagataaaaaggacacggtgacccgggagaaacacccaaagaaaccttttcagaagtggatgaagaagagagcaatcaaaaaaggtaattatcttcggttccagcgtttattttatcttgatagagggaaactggctaaaatcattttagatgatattgaatgcttgtcttgtgacataccactcagtgaaatttattcggtttttaaaacaagatgggaaacaactggtagctttaaaagccttggggactttaaaacttacgggaaggctgacaacactgccttcagagaattaattacggctaaagaaattgagaaaaatgtgcaggaaatgagcaaaggctcggctcccggtccagacgggattactcttggggacgtcgtaaagatggatcccgagttttcccggaccatggagattttcaatttatggttaacaactggtaaaatcccggacatggtgagggggtgcagaaccgttttgattccaaaatcatcagacccggatcgtttgaaagacattaataactggagacctatcacgatcggttccatcttgctgagactgttctccaggattgtaacagctaggctgagcaaagcgtgccccctgaacccaaggcaaagaggctttatcagagcggcgggatgctctgaaaacttaaaactcctgcaaactataatttggtcggccaaaagagaacacagaccactgggtgttgtattcgtggacatcgccaaggcttttgacaccgtaagccaccagcacatcattcatgctttgcagcaaagagaggtggatccccacatcgtcggtctggtgagcaatatgtacgagaacatcagtacgtatatcaccacaaagaggaacacacacacagacaaaatccagatccgggttggagtaaagcagggtgacccgatgtcgccccttttatttaacctggcaatggaccctctattatgcaagctggaagagagtggcaaaggataccaccgaggacagagcagcatcacagcgatggcatttgcagacgatctggttttgctgagcgactcctgggaaaatatgaatacaaatattagcatactggagaccttctgcaatctgaccggactcaaaacacaggggcaaaagtgccacggcttttacatcaagccgacaaaggactcttacaccatcaatgactgcgctgcctggactatcaacggcacacccctgaacatgatcgaccccggcgaatctgagaaatacctcggcctgcagtttgacccgtggattggaatagcaaggtccggtctctccacaaaactagatttttggcttcagcggatcgatcaagcaccacttaaacctctgcagaaaactgatattctcaaaacatacaccatccctcggctgatctacatagctgaccactcagaagtgaaaagcgcactactcgaaacccttgaccagaagatccggacagcggtcaaggaatggcttcacctacctccgtgcacctgcgatgccatcctgtactcgagcacgagagacggcggtttgggcatcaccaaattggcaggactgatccccagcgtgcaggcccgtagactgcatcggatcgcacagtcatctgacgatacgatgaaatgcttcatggaaaaagagaaaatggaacagctgcataagaaattgtggattcaagctggaggggacagagagaacataccctcgatttgggaagcaccaccgtcgagtgaaccaccaaacaacgtgagcacaaattcggaatgggaagcaccgacccagaaagataaatttccaaagccttgcaattggaggaaaaacgaattcaaaaaatggaccaaattggcatcccaaggccgcggaattgtaaattttgaaagagacaaaattagtaaccattggatccaatactacagacgcatacctcacaggaaactcctcactgcactacaactcagggccaacgtttaccccacgagagaatttctagccaggggtagacaagaccaatacatcaaggcgtgtaggcactgcgatgcggacaacgaatcctgcgcccacatcatcggcaactgcccagtgacacaggacgcccgaatcaagaggcacaattacatctgcgaactgcttctcgaggaggcgaagaagaaggactgggtagtgttcaaggaaccgcacataagggattccaacaaggaactgtacaaacctgacctgatatttgtgaaggatgggcgtgcacttgtcgtggatgtgacagtacggtatgaagcagccaaatcatcgctggaggaagccgctgcagagaaagtgagaaagtacaaacacctggaaacggaagtaagacatctcacgaatgcaaaggacgttacttttgtgggctttcccctaggagcgcgggggaaatggcaccaagataactttaaacttttgactgagcttggcctctccaaatcgaggcaagtgaaaatggcagagactttttccacagtagcgctcttttcatctgtggacattgtacatatgtttgccagtagggccagaaaatctatggttatgtgataataggctgccttctgcggggcttgccttctggccatgcccttcttctctcccttgcacctgtacctcttggtctttgaataaagcctgagtaggaaggaccggtaaaaaaaaaaaaaaaaaaaaaaaaaaaaaaacgttgactaaaaaaaaaaaaaaaaaaaaaaaaaaaaaaaaaaaaaaaaaaaaaaaaaaaaaaaaaaaaaaaaaaaaaa

SEQ ID NO: 11759 - DNA, 5264 bp, synthetic construct
  source 1..5264: mol_type = other DNA
gaaataagagagaaaagaagagtaagaagaaatataagagaattcgccaccatggcccctaagaaaaagcggaaggtgaatatcagcggctctagctgcggcagccccaacagcgccgacaccagcagcgacttcaaggacctgtggaccaagctgaaggaatgccacgaccgggaagtgcagggactccaggtgaaggtcaccaaactcaagcaagaaagaatcctggacgcccagagactggaagaattcttcaccaagaaccagcagctgagagagcagcagaaagtgctgcacgagacaatcaaggttctggaagatagactgcgggccggcctgtgcgacagatgcgccgtgaccgaggaacacatgcgcaaaaagcagcaggagttcgagaacattagacagcaaaatctgaaattgatcacagagctgatgaacgagagaaacacactgcaggaggagaacaagaagctgagcgagcagctgcaacagaagatcgagaatgatcagcaacaccaggccgctgagctggaatgtgaagaggacgtgatccccgacagcccaatcacagctttcagcttttctggcgtgaacagactgaggcggaaggaaaacccccacgtgcggtacatcgagcagacccataccaagctggaacacagcgtgtgtgccaacgagatgagaaaggtgtccaagtcctccacccatccccagcacaaccctaacgaaaatgagatcctggtggctgatacctacgaccagtctcagagccctatggccaaggcccacggcaccagctcttatacccctgataagagctccttcaacctggccaccgtggtggccgagacactgggcctgggcgtgcaggaggaaagcgagacacagggcccaatgagccctctgggagatgagctgtaccactgcctggaaggcaaccacaagaaacagccttttgagtccggctccgagactcctggaacaagcgagagcgctacacctgagggcagccctaagagaaaggtgtccagcgccgagggcgctgccaaggaagagcctaaacggagaagcgccagactgagcgccaagccccccgccaaggtggaagccaagcctaagaaggccgccgctaaggacaagagcagcgataagaaagtccagaccaagggcaagcggggcgccaaaggcaaacaggccgaggtggccaaccaggagacaaaggaagatctgcctgctgagaacggcgaaaccaagaccgaggaatctccagcttctgacgaggccggagagaaggaggccaaaagcgacagcggctctgagacacctggaacaagcgagagcgccaccccggaatcctatgaacaacttgcaccacaaccgtgtgtgggagaaactttacattctagcctcccacgagacagtgaactgtttgtgcctgaagaggggagcagcgagaaggagagcgaggacgcgccaaaaacatctcctccgacgcctgggaaacatggtttgaggcagactggggaggaaaaagtgatggtgactgttcctgacaaaaatccaccttgtccttgctgtggtacccgggtaaactctgtgttgaatctgattgaacatctgaaagtgtcacacgggaaaaggggggtttgttttcggtgtgcaaaatgtggaaaggaaaatagtaactatcacagtgttgtttgtcattttaagaaatgcaggggtccagagacggagaaagccccagctggggagtggatttgtgaggtatgcaacagagattttacaaccaaaattggcctgggacaacacaagagattggcacacccagcagtgagaaatcaggaaaggatcgttgcttcccaaccgaaagaaacatcaaatagaggtgctcacaaaaggtgctggacaaaggaggaggaagaattactaataagactggaggctcagttcgagggaaacaaaaatattaataagcttattgcagaacacataaccaccaaaacagctaagcagatcagtgacaaaaggcgattgctgtccagaaagccagcagaggagccacgtgaggagcctggaacgtgtcatcacaccaggagagcagctgcgagcctgagaacggagcctgagatgagtcatcacgcccaggcagaggacagagataatggacctgggagacgccctctgccaggcagggcagctgccggagggagaacaatggacgagataagacgccaccctgataagggcaacggacagcagagacccaccaagcaaaaatcagaagaacagctgcaggcttactataaaaagacactagaggaacgactttcagctggggcacttaacaccttcccccgagcattcaagcaggtaatggaaggccgggatataaagctagtaatcaatcagacagcgcaggactgcttcggatgcctggaatccataagccaaataagaacggcaacccgagataaaaaggacacggtgacccgggagaaacacccaaagaaaccttttcagaagtggatgaagaagagagcaatcaaaaaaggtaattatcttcggttccagcgtttattttatcttgatagagggaaactggctaaaatcattttagatgatattgaatgcttgtcttgtgacataccactcagtgaaatttattcggtttttaaaacaagatgggaaacaactggtagctttaaaagccttggggactttaaaacttacgggaaggctgacaacactgccttcagagaattaattacggctaaagaaattgagaaaaatgtgcaggaaatgagcaaaggctcggctcccggtccagacgggattactcttggggacgtcgtaaagatggatcccgagttttcccggaccatggagattttcaatttatggttaacaactggtaaaatcccggacatggtgagggggtgcagaaccgttttgattccaaaatcatcaaagccggatcgtttgaaagacattaataactggagacctatcacgatcggttccatcttgctgagactgttctccaggattgtaacagctaggctgagcaaagcgtgccccctgaacccaaggcaaagaggctttatcagagcggcgggatgctctgaaaacttaaaactcctgcaaactataatttggtcggccaaaagagaacacagaccactgggtgttgtattcgtggacatcgccaaggcttttgacaccgtaagccaccagcacatcattcatgctttgcagcaaagagaggtggatccccacatcgtcggtctggtgagcaatatgtacgagaacatcagtacgtatatcaccacaaagaggaacacacacacagacaaaatccagatccgggttggagtaaagcagggtgacccgatgtcgccccttttatttaacctggcaatggaccctctattatgcaagctggaagagagtggcaaaggataccaccgaggacagagcagcatcacagcgatggcatttgcagacgatctggttttgctgagcgactcctgggaaaatatgaatacaaatattagcatactggagaccttctgcaatctgaccggactcaaaacacaggggcaaaagtgccacggcttttacatcaagccgacaaaggactcttacaccatcaatgactgcgctgcctggactatcaacggcacacccctgaacatgatcgaccccggcgaatctgagaaatacctcggcctgcagtttgacccgtggattggaatagcaaggtccggtctctccacaaaactagatttttggcttcagcggatcgatcaagcaccacttaaacctctgcagaaaactgatattctcaaaacatacaccatccctcggctgatctacatagctgaccactcagaagtgaaaagcgcactactcgaaacccttgaccagaagatccggacagcggtcaaggaatggcttcacctacctccgtgcacctgcgatgccatcctgtactcgagcacgagagacggcggtttgggcatcaccaaattggcaggactgatccccagcgtgcaggcccgtagactgcatcggatcgcacagtcatctgacgatacgatgaaatgcttcatggaaaaagagaaaatggaacagctgcataagaaattgtggattcaagctggaggggacagagagaacataccctcgatttgggaagcaccaccgtcgagtgaaccaccaaacaacgtgagcacaaattcggaatgggaagcaccgacccagaaagataaatttccaaagccttgcaattggaggaaaaacgaattcaaaaaatggaccaaattggcatcccaaggccgcggaattgtaaattttgaaagagacaaaattagtaaccattggatccaatactacagacgcatacctcacaggaaactcctcactgcactacaactcagggccaacgtttaccccacgagagaatttctagccaggggtagacaagaccaatacatcaaggcgtgtaggcactgcgatgcggacaacgaatcctgcgcccacatcatcggcaactgcccagtgacacaggacgcccgaatcaagaggcacaattacatctgcgaactgcttctcgaggaggcgaagaagaaggactgggtagtgttcaaggaaccgcacataagggattccaacaaggaactgtacaaacctgacctgatatttgtgaaggatgggcgtgcacttgtcgtggatgtgacagtacggtatgaagcagccaaatcatcgctggaggaagccgctgcagagaaagtgagaaagtacaaacacctggaaacggaagtaagacatctcacgaatgcaaaggacgttacttttgtgggctttcccctaggagcgcgggggaaatggcaccaagataactttaaacttttgactgagcttggcctctccaaatcgaggcaagtgaaaatggcagagactttttccacagtagcgctcttttcatctgtggacattgtacatatgtttgccagtagggccagaaaatctatggttatgtgataataggctgccttctgcggggcttgccttctggccatgcccttcttctctcccttgcacctgtacctcttggtctttgaataaagcctgagtaggaaggaccggtaaaaaaaaaaaaaaaaaaaaaaaaaaaaaaacgttgactaaaaaaaaaaaaaaaaaaaaaaaaaaaaaaaaaaaaaaaaaaaaaaaaaaaaaaaaaaaaaaaaaaaaaa

SEQ ID NO: 11760 - DNA, 5996 bp, synthetic construct
  source 1..5996: mol_type = other DNA
gaaataagagagaaaagaagagtaagaagaaatataagagaattcgccaccatggcccctaagaaaaagcggaaggtgggcatccacggcgtgcccgccgctgccatgcagatgcaactggaagctaatgctgataccagcgtggaagaggaaagcttcggcccccagcctattagcagactggaacagtgcggcatcaacgccaacgacgtgaagaaactggaagaggcaggcttccatacagtggaagctgtggcttacgcccctaagaaggaactgatcaacatcaagggcatcagcgaggccaaggccgataagatcctggccgaggccgccaaactggtgccaatgggctttaccaccgagacagagttccaccagaggcggagcgagatcatccagatcacaaccggctcaaaggaactcgacaagctgctgcagggcggcatcgaaaccggcagcatcaccgagatgttcggcgagtttcgcaccggcaaaacccagatttgccacaccctggccgtgacatgccagctgcctatcgatagaggtggaggcgagggcaaggccatgtacatcgacaccgagggcaccttcagacctgagcggctgctggccgttgctgaaagatacggcctgagcggatctgatgtgctggacaacgtggcctacgccagagccttcaacaccgaccaccaaacacagctgctctaccaggcctctgccatgatggtggaatctcggtacgccctgctgatcgtggatagcgccacagccctgtatagaaccgactacagcggcagaggagaactgtccgccagacagatgcacctggccagattcctgcggatgctgctgagactggctgacgagttcggcgtggccgtggtgatcaccaaccaggtggtcgcccaggtggacggcgccgctatgtttgccgctgaccccaagaaacctatcggcggcaacatcatcgcccacgccagcacaacaagactgtacctgagaaagggccggggagaaaccagaatctgtaaaatctacgacagcccttgcctgcccgaggctgaggccatgttcgccatcaatgccgacggcgtgggagatgccaaggacggcggctccggcagcgaaacccctggcacatctgagtctaatatcagcggctctagctgcggcagccccaacagcgccgacaccagcagcgacttcaaggacctgtggaccaagctgaaggaatgccacgaccgggaagtgcagggactccaggtgaaggtcaccaaactcaagcaagaaagaatcctggacgcccagagactggaagaattcttcaccaagaaccagcagctgagagagcagcagaaagtgctgcacgagacaatcaaggttctggaagatagactgcgggccggcctgtgcgacagatgcgccgtgaccgaggaacacatgcgcaaaaagcagcaggagttcgagaacattagacagcaaaatctgaaattgatcacagagctgatgaacgagagaaacacactgcaggaggagaacaagaagctgagcgagcagctgcaacagaagatcgagaatgatcagcaacaccaggccgctgagctggaatgtgaagaggacgtgatccccgacagcccaatcacagctttcagcttttctggcgtgaacagactgaggcggaaggaaaacccccacgtgcggtacatcgagcagacccataccaagctggaacacagcgtgtgtgccaacgagatgagaaaggtgtccaagtcctccacccatccccagcacaaccctaacgaaaatgagatcctggtggctgatacctacgaccagtctcagagccctatggccaaggcccacggcaccagctcttatacccctgataagagctccttcaacctggccaccgtggtggccgagacactgggcctgggcgtgcaggaggaaagcgagacacagggcccaatgagccctctgggagatgagctgtaccactgcctggaaggcaaccacaagaaacagccttttgagtccggctccgagactcctggaacaagcgagagcgctacacctgagggcagctatgaacaacttgcaccacaaccgtgtgtgggagaaactttacattctagcctcccacgagacagtgaactgtttgtgcctgaagaggggagcagcgagaaggagagcgaggacgcgccaaaaacatctcctccgacgcctgggaaacatggtttggaacagactggggaggaaaaagtgatggtgactgttcctgacaaaaatccaccttgtccttgctgtggtacccgggtaaactctgtgttgaatctgattgaacatctgaaagtgtcacacgggaaaaggggggtttgttttcggtgtgcaaaatgtggaaaggaaaatagtaactatcacagtgttgtttgtcattttaagaaatgcaggggtccagagacggagaaagccccagctggggagtggatttgtgaggtatgcaacagagattttacaaccaaaattggcctgggacaacacaagagattggcacacccagcagtgagaaatcaggaaaggatcgttgcttcccaaccgaaagaaacatcaaatagaggtgctcacaaaaggtgctggacaaaggaggaggaagaattactaataagactggaggctcagttcgagggaaacaaaaatattaataagcttattgcagaacacataaccaccaaaacagctaagcagatcagtgacaaaaggcgattgctgtccagaaagccagcagaggagccacgtgaggagcctggaacgtgtcatcacaccaggagagcagctgcgagcctgagaacggagcctgagatgagtcatcacgcccaggcagaggacagagataatggacctgggagacgccctctgccaggcagggcagctgccggagggagaacaatggacgagataagacgccaccctgataagggcaacggacagcagagacccaccaagcaaaaatcagaagaacagctgcaggcttactataaaaagacactagaggaacgactttcagctggggcacttaacaccttcccccgagcattcaagcaggtaatggaaggccgggatataaagctagtaatcaatcagacagcgcaggactgcttcggatgcctggaatccataagccaaataagaacggcaacccgagataaaaaggacacggtgacccgggagaaacacccaaagaaaccttttcagaagtggatgaagaagagagcaatcaaaaaaggtaattatcttcggttccagcgtttattttatcttgatagagggaaactggctaaaatcattttagatgatattgaatgcttgtcttgtgacatccctcttagcgagatctacagcgttttcaagaccagatgggagaccaccggcagcttcaagagcctgggcgacttcaagacatacggcaaggccgacaacaccgccttcagagagctcatcaccgccaaggagatcgagaagaatgtgcaggagatgagcaagggctccgcgccagggcccgatggaattacattaggcgatgtggtgaagatggaccccgagttcagcagaaccatggagatcttcaacctgtggctcaccaccgggaagatccccgacatggttagaggctgcagaaccgttctcatccccaagagcagcaagcccgacagactgaaggacatcaacaactggagacccatcaccatcggcagcatcctgctgagactgttctccagaatcgtgaccgccagactgtccaaggcctgccctctgaaccctagacagagaggcttcatcagagctgccggctgcagcgagaacctgaagcttctgcagaccatcatctggagcgccaagagagagcacagacccctgggcgttgtgttcgtggacatcgccaaggctttcgacactgtgagccaccagcacatcatccacgccctgcaacagcgagaggtcgaccctcacatcgtgggccttgtgagcaacatgtacgagaacatcagcacctacatcaccaccaagagaaacacccacaccgacaagatccagatacgtgtgggcgtcaagcagggcgaccctatgagccctcttctgttcaacctcgccatggaccctctgctgtgcaagctggaggagtctggcaagggataccacagaggccagagctcgattactgccatggccttcgccgacgacctggtgcttctgagcgattcttgggagaacatgaacaccaacatctccatcctcgagaccttctgcaacctcaccggcctgaaaacccagggccaaaagtgccacggcttctacatcaagcccaccaaggacagctacaccatcaacgactgcgctgcctggaccatcaatggcacccctctcaacatgatcgaccccggcgagagcgagaagtacctgggcttacagttcgacccttggatcggcatcgccagaagcggccttagcacaaagttggacttctggctccagagaatcgaccaggcccccctgaagcctcttcagaaaaccgacatcctgaaaacctacacaatccccagactcatctacatcgccgaccacagcgaggtcaagagcgcactactcgaaacccttgaccagaagatccggacagcggtcaaggaatggcttcacctacctccgtgcacctgcgatgccatcctgtactcgagcacgagagacggcggtttgggcatcaccaaattggcaggactgatccccagcgtgcaggcccgtagactgcatcggatcgcacagtcatctgacgatacgatgaaatgcttcatggaaaaagagaaaatggaacagctgcataagaaattgtggattcaagctggaggggacagagagaacataccctcgatttgggaagcaccaccgtcgagtgaaccaccaaacaacgtgagcacaaattcggaatgggaagcaccgacccagaaagataaatttccaaagccttgcaattggaggaaaaacgaattcaaaaaatggaccaaattggcatcccaaggccgcggaattgtaaattttgaaagagacaaaattagtaaccattggatccaatactacagacgcatacctcacaggaaactcctcactgcactacaactcagggccaacgtttaccccacgagagaatttctagccaggggtagacaagaccaatacatcaaggcgtgtaggcactgcgatgcggacaacgaatcctgcgcccacatcatcggcaactgcccagtgacacaggacgcccgaatcaagaggcacaattacatctgcgaactgcttctcgaggaggcgaagaagaaggactgggtagtgttcaaggaaccgcacataagggattccaacaaggaactgtacaaacctgacctgatatttgtgaaggatgggcgtgcacttgtcgtggatgtgacagtacggtatgaagcagccaaatcatcgctggaggaagccgctgcagagaaagtgagaaagtacaaacacctggaaacggaagtaagacatctcacgaatgcaaaggacgttacttttgtgggctttcccctaggagcgcgggggaaatggcaccaagataactttaaacttttgactgagcttggcctctccaaatcgaggcaagtgaaaatggcagagactttttccacagtagcgctcttttcatctgtggacattgtacatatgtttgccagtagggccagaaaatctatggttatgtgataataggctgccttctgcggggcttgccttctggccatgcccttcttctctcccttgcacctgtacctcttggtctttgaataaagcctgagtaggaaggaccggtaaaaaaaaaaaaaaaaaaaaaaaaaaaaaaacgttgactaaaaaaaaaaaaaaaaaaaaaaaaaaaaaaaaaaaaaaaaaaaaaaaaaaaaaaaaaaaaaaaaaaaaaa

SEQ ID NO: 11761 - DNA, 4439 bp, synthetic construct
  source 1..4439: mol_type = other DNA
gaaataagagagaaaagaagagtaagaagaaatataagagaattcgccaccatggcttcttgcccgaaacctggccccccggtttcagcaggggcaatgagtttggaaagtggactgaccacccactccgttctcgccatcgaacgtggtcccaattcgttggcaaattccggatcagactttgggggggggggtctggggctaccgttacgcctattgagggtatcggtcggcactcagacctcccgctccgactgggtagacctggtgtcctggagccacccaggacccacgtctaagtcccagcaggttgacctggtgtctttatttcctaaacaccgggttgacctgttatccaaaaacgaccaggtagacctggtggctcaatttttaccatctaaatttccccccaatttggcagaaaatgatttggctttgctggtgaacttagagttctacagatcggatttgcatgtgtatgagtgtgttcataaggctgcacattgggagggattaagtggtttgcctgaggtgtatgaacaacttgcaccacaaccgtgtgtgggagaaactttacattctagcctcccacgagacagtgaactgtttgtgcctgaagaggggagcagcgagaaggagagcgaggacgcgccaaaaacatctcctccgacgcctgggaaacatggtttggaacagactggggaggaaaaagtgatggtgactgttcctgacaaaaatccaccttgtccttgctgtggtacccgggtaaactctgtgttgaatctgattgaacatctgaaagtgtcacacgggaaaaggggggtttgttttcggtgtgcaaaatgtggaaaggaaaatagtaactatcacagtgttgtttgtcattttaagaaatgcaggggtccagagacggagaaagccccagctggggagtggatttgtgaggtatgcaacagagattttacaaccaaaattggcctgggacaacacaagagattggcacacccagcagtgagaaatcaggaaaggatcgttgcttcccaaccgaaagaaacatcaaatagaggtgctcacaaaaggtgctggacaaaggaggaggaagaattactaataagactggaggctcagttcgagggaaacaaaaatattaataagcttattgcagaacacataaccaccaaaacagctaagcagatcagtgacaaaaggcgattgctgtccagaaagccagcagaggagccacgtatggagcctggaacgtgtcatcacaccaggagagcagctgcgagcctgagaacggagcctgagatgagtcatcacgcccaggcagaggacagagataatggacctgggagacgccctctgccaggcagggcagctgccggagggagaacaatggacgagataagacgccaccctgataagggcaacggacagcagagacccaccaagcaaaaatcagaagaacagctgcaggcttactataaaaagacactagaggaacgactttcagctggggcacttaacaccttcccccgagcattcaagcaggtaatggaaggccgggatataaagctagtaatcaatcagacagcgcaggactgcttcggatgcctggaatccataagccaaataagaacggcaacccgagataaaaaggacacggtgacccgggagaaacacccaaagaaaccttttcagaagtggatgaagaagagagcaatcaaaaaaggtaattatcttcggttccagcgtttattttatcttgatagagggaaactggctaaaatcattttagatgatattgaatgcttgtcttgtgacataccactcagtgaaatttattcggtttttaaaacaagatgggaaacaactggtagctttaaaagccttggggactttaaaacttacgggaaggctgacaacactgccttcagagaattaattacggctaaagaaattgagaaaaatgtgcaggaaatgagcaaaggctcggctcccggtccagacgggattactcttggggacgtcgtaaagatggatcccgagttttcccggaccatggagattttcaatttatggttaacaactggtaaaatcccggacatggtgagggggtgcagaaccgttttgattccaaaatcatcaaagccggatcgtttgaaagacattaataactggagacctatcacgatcggttccatcttgctgagactgttctccaggattgtaacagctaggctgagcaaagcgtgccccctgaacccaaggcaaagaggctttatcagagcggcgggatgctctgaaaacttaaaactcctgcaaactataatttggtcggccaaaagagaacacagaccactgggtgttgtattcgtggacatcgccaaggcttttgacaccgtaagccaccagcacatcattcatgctttgcagcaaagagaggtggatccccacatcgtcggtctggtgagcaatatgtacgagaacatcagtacgtatatcaccacaaagaggaacacacacacagacaaaatccagatccgggttggagtaaagcagggtgacccgatgtcgccccttttatttaacctggcaatggaccctctattatgcaagctggaagagagtggcaaaggataccaccgaggacagagcagcatcacagcgatggcatttgcagacgatctggttttgctgagcgactcctgggaaaatatgaatacaaatattagcatactggagaccttctgcaatctgaccggactcaaaacacaggggcaaaagtgccacggcttttacatcaagccgacaaagaagtcttacaccatcaatgactgcgctgcctggactatcaacggcacacccctgaacatgatcgaccccggcgaatctgagaaatacctcggcctgcagtttgacccgtggattggaatagcaaggtccggtctctccacaaaactagatttttggcttcagcggatcgatcaagcaccacttaaacctctgcagaaactggatattctcaaaacatacaccatccctcggctgatctacatagctgaccactcagaagtgaaaagcgcactactcgaaacccttgaccagaagatccggacagcggtcaaggaatggcttcacctacctccgtgcacctgcgatgccatcctgtactcgagcacgagagacggcggtttgggcatcaccaaattggcaggactgatccccagcgtgcaggcccgtagactgcatcggatcgcacagtcatctgacgatacgatgaaatgcttcatggaaaaagagaaaatggaacagctgcataagaaattgtggattcaagctggaggggacagagagaacataccctcgatttgggaagcaccaccgtcgagtgaaccaccaaacaacgtgagcacaaattcggaatgggaagcaccgacccagaaagataaatttccaaagccttgcaattggaggaaaaacgaattcaaaaaatggaccaaattggcatcccaaggccgcggaattgtaaattttgaaagagacaaaattagtaaccattggatccaatactacagacgcatacctcacaggaaactcctcactgcactacaactcagggccaacgtttaccccacgagagaatttctagccaggggtagacaagaccaatacatcaaggcgtgtaggcactgcgatgcggacaacgaatcctgcgcccacatcatcggcaactgcccagtgacacaggacgcccgaatcaagaggcacaattacatctgcgaactgcttctcgaggaggcgaagaagaaggactgggtagtgttcaaggaaccgcacataagggattccaacaaggaactgtacaaacctgacctgatatttgtgaaggatgggcgtgcacttgtcgtggatgtgacagtacggtatgaagcagccaaatcatcgctggaggaagccgctgcagagaaagtgagaaagtacaaacacctggaaacggaagtaagacatctcacgaatgcaaaggacgttacttttgtgggctttcccctaggagcgcgggggaaatggcaccaagataactttaaacttttgactgagcttggcctctccaaatcgaggcaagtgaaaatggcagagactttttccacagtagcgctcttttcatctgtggacattgtacatatgtttgccagtagggccagaaaatctatggttatgtgataataggctgccttctgcggggcttgccttctggccatgcccttcttctctcccttgcacctgtacctcttggtctttgaataaagcctgagtaggaaggaccggtaaaaaaaaaaaaaaaaaaaaaaaaaaaaaaacgttgactaaaaaaaaaaaaaaaaaaaaaaaaaaaaaaaaaaaaaaaaaaaaaaaaaaaaaaaaaaaaaaaaaaaaaa

SEQ ID NO: 11762 - DNA, 4439 bp, synthetic construct
  source 1..4439: mol_type = other DNA
gaaataagagagaaaagaagagtaagaagaaatataagagaattcgccaccatggcttcttgcccgaaacctggccccccggtttcagcaggggcaatgagtttggaaagtggactgaccacccactccgttctcgccatcgaacgtggtcccaattcgttggcaaattccggatcagactttgggggggggggtctggggctaccgttacgcctattgagggtatcggtcggcactcagacctcccgctccgactgggtagacctggtgtcctggagccacccaggacccacgtctaagtcccagcaggttgacctggtgtctttatttcctaaacaccgggttgacctgttatccaaaaacgaccaggtagacctggtggctcaatttttaccatctaaatttccccccaatttggcagaaaatgatttggctttgctggtgaacttagagttctacagatcggatttgcatgtgtatgagtgtgttcataaggctgcacattgggagggattaagtggtttgcctgaggtgtatgaacaacttgcaccacaaccgtgtgtgggagaaactttacattctagcctcccacgagacagtgaactgtttgtgcctgaagaggggagcagcgagaaggagagcgaggacgcgccaaaaacatctcctccgacgcctgggaaacatggtttggaacagactggggaggaaaaagtgatggtgactgttcctgacaaaaatccaccttgtccttgctgtggtacccgggtaaactctgtgttgaatctgattgaacatctgaaagtgtcacacgggaaaaggggggtttgttttcggtgtgcaaaatgtggaaaggaaaatagtaactatcacagtgttgtttgtcattttaagaaatgcaggggtccagagacggagaaagccccagctggggagtggatttgtgaggtatgcaacagagattttacaaccaaaattggcctgggacaacacaagagattggcacacccagcagtgagaaatcaggaaaggatcgttgcttcccaaccgaaagaaacatcaaatagaggtgctcacaaaaggtgctggacaaaggaggaggaagaattactaataagactggaggctcagttcgagggaaacaaaaatattaataagcttattgcagaacacataaccaccaaaacagctaagcagatcagtgacaaaaggcgattgctgtccagaaagccagcagaggagccacgtatggagcctggaacgtgtcatcacaccaggagagcagctgcgagcctgagaacggagcctgagatgagtcatcacgcccaggcagaggacagagataatggacctgggagacgccctctgccaggcagggcagctgccggagggagaacaatggacgagataagacgccaccctgataagggcaacggacagcagagacccaccaagcaaaaatcagaagaacagctgcaggcttactataaaaagacactagaggaacgactttcagctggggcacttaacaccttcccccgagcattcaagcaggtaatggaaggccgggatataaagctagtaatcaatcagacagcgcaggactgcttcggatgcctggaatccataagccaaataagaacggcaacccgagataaaaaggacacggtgacccgggagaaacacccaaagaaaccttttcagaagtggatgaagaagagagcaatcaaaaaaggtaattatcttcggttccagcgtttattttatcttgatagagggaaactggctaggatcattttagatgatattgaatgcttgtcttgtgacataccactcagtgaaatttattcggtttttaaaacaagatgggaaacaactggtagctttaaaagccttggggactttaaaacttacgggaaggctgacaacactgccttcagagaattaattacggctaaagaaattgagaaaaatgtgcaggaaatgagcaaaggctcggctcccggtccagacgggattactcttggggacgtcgtaaagatggatcccgagttttcccggaccatggagattttcaatttatggttaacaactggtaaaatcccggacatggtgagggggtgcagaaccgttttgattccaaaatcatcaaagccggatcgtttgaaagacattaataactggagacctatcacgatcggttccatcttgctgagactgttctccaggattgtaacagctaggctgagcaaagcgtgccccctgaacccaaggcaaagaggctttatcagagcggcgggatgctctgaaaacttaaaactcctgcaaactataatttggtcggccaaaagagaacacagaccactgggtgttgtattcgtggacatcgccaaggcttttgacaccgtaagccaccagcacatcattcatgctttgcagcaaagagaggtggatccccacatcgtcggtctggtgagcaatatgtacgagaacatcagtacgtatatcaccacaaagaggaacacacacacagacaaaatccagatccgggttggagtaaagcagggtgacccgatgtcgccccttttatttaacctggcaatggaccctctattatgcaagctggaagagagtggcaaaggataccaccgaggacagagcagcatcacagcgatggcatttgcagacgatctggttttgctgagcgactcctgggaaaatatgaatacaaatattagcatactggagaccttctgcaatctgaccggactcaaaacacaggggcaaaagtgccacggcttttacatcaagccgacaaagaagtcttacaccatcaatgactgcgctgcctggactatcaacggcacacccctgaacatgatcgaccccggcgaatctgagaaatacctcggcctgcagtttgacccgtggattggaatagcaaggtccggtctctccacaaaactagatttttggcttcagcggatcgatcaagcaccacttaaacctctgcagaaaactgatattctcaaaacatacaccatccctcggctgatctacatagctgaccactcagaagtgaaaagcgcactactcgaaacccttgaccagaagatccggacagcggtcaaggaatggcttcacctacctccgtgcacctgcgatgccatcctgtactcgagcacgagagacggcggtttgggcatcaccaaattggcaggactgatccccagcgtgcaggcccgtagactgcatcggatcgcacagtcatctgacgatacgatgaaatgcttcatggaaaaagagaaaatggaacagctgcataagaaattgtggattcaagctggaggggacagagagaacataccctcgatttgggaagcaccaccgtcgagtgaaccaccaaacaacgtgagcacaaattcggaatgggaagcaccgacccagaaagataaatttccaaagccttgcaattggaggaaaaacgaattcaaaaaatggaccaaattggcatcccaaggccgcggaattgtaaattttgaaagagacaaaattagtaaccattggatccaatactacagacgcatacctcacaggaaactcctcactgcactacaactcagggccaacgtttaccccacgagagaatttctagccaggggtagacaagaccaatacatcaaggcgtgtaggcactgcgatgcggacaacgaatcctgcgcccacatcatcggcaactgcccagtgacacaggacgcccgaatcaagaggcacaattacatctgcgaactgcttctcgaggaggcgaagaagaaggactgggtagtgttcaaggaaccgcacataagggattccaacaaggaactgtacaaacctgacctgatatttgtgaaggatgggcgtgcacttgtcgtggatgtgacagtacggtatgaagcagccaaatcatcgctggaggaagccgctgcagagaaagtgagaaagtacaaacacctggaaacggaagtaagacatctcacgaatgcaaaggacgttacttttgtgggctttcccctaggagcgcgggggaaatggcaccaagataactttaaacttttgactgagcttggcctctccaaatcgaggcaagtgaaaatggcagagactttttccacagtagcgctcttttcatctgtggacattgtacatatgtttgccagtagggccagaaaatctatggttatgtgataataggctgccttctgcggggcttgccttctggccatgcccttcttctctcccttgcacctgtacctcttggtctttgaataaagcctgagtaggaaggaccggtaaaaaaaaaaaaaaaaaaaaaaaaaaaaaaacgttgactaaaaaaaaaaaaaaaaaaaaaaaaaaaaaaaaaaaaaaaaaaaaaaaaaaaaaaaaaaaaaaaaaaaaaa

SEQ ID NO: 11763 - DNA, 4439 bp, synthetic construct
  source 1..4439: mol_type = other DNA
gaaataagagagaaaagaagagtaagaagaaatataagagaattcgccaccatggcttcttgcccgaaacctggccccccggtttcagcaggggcaatgagtttggaaagtggactgaccacccactccgttctcgccatcgaacgtggtcccaattcgttggcaaattccggatcagactttgggggggggggtctggggctaccgttacgcctattgagggtatcggtcggcactcagacctcccgctccgactgggtagacctggtgtcctggagccacccaggacccacgtctaagtcccagcaggttgacctggtgtctttatttcctaaacaccgggttgacctgttatccaaaaacgaccaggtagacctggtggctcaatttttaccatctaaatttccccccaatttggcagaaaatgatttggctttgctggtgaacttagagttctacagatcggatttgcatgtgtatgagtgtgttcataaggctgcacattgggagggattaagtggtttgcctgaggtgtatgaacaacttgcaccacaaccgtgtgtgggagaaactttacattctagcctcccacgagacagtgaactgtttgtgcctgaagaggggagcagcgagaaggagagcgaggacgcgccaaaaacatctcctccgacgcctgggaaacatggtttggaacagactggggaggaaaaagtgatggtgactgttcctgacaaaaatccaccttgtccttgctgtggtacccgggtaaactctgtgttgaatctgattgaacatctgaaagtgtcacacgggaaaaggagagtttgttttcggtgtgcaaaatgtggaaaggaaaatagtaactatcacagtgttgtttgtcattttaagaaatgcaggggtccagagacggagaaagccccagctggggagtggatttgtgaggtatgcaacagagattttacaaccaaaattggcctgggacaacacaagagattggcacacccagcagtgagaaatcaggaaaggatcgttgcttcccaaccgaaagaaacatcaaatagaggtgctcacaaaaggtgctggacaaaggaggaggaagaattactaataagactggaggctcagttcgagggaaacaaaaatattaataagcttattgcagaacacataaccaccaaaacagctaagcagatcagtgacaaaaggcgattgctgtccagaaagccagcagaggagccacgtatggagcctggaacgtgtcatcacaccaggagagcagctgcgagcctgagaacggagcctgagatgagtcatcacgcccaggcagaggacagagataatggacctgggagacgccctctgccaggcagggcagctgccggagggagaacaatggacgagataagacgccaccctgataagggcaacggacagcagagacccaccaagcaaaaatcagaagaacagctgcaggcttactataaaaagacactagaggaacgactttcagctggggcacttaacaccttcccccgagcattcaagcaggtaatggaaggccgggatataaagctagtaatcaatcagacagcgcaggactgcttcggatgcctggaatccataagccaaataagaacggcaacccgagataaaaaggacacggtgacccgggagaaacacccaaagaaaccttttcagaagtggatgaagaagagagcaatcaaaaaaggtaattatcttcggttccagcgtttattttatcttgatagagggaaactggctaaaatcattttagatgatattgaatgcttgtcttgtgacataccactcagtgaaatttattcggtttttaaaacaagatgggaaacaactggtagctttaaaagccttggggactttaaaacttacgggaaggctgacaacactgccttcagagaattaattacggctaaagaaattgagaaaaatgtgcaggaaatgagcaaaggctcggctcccggtccagacgggattactcttggggacgtcgtaaagatggatcccgagttttcccggaccatggagattttcaatttatggttaacaactggtaaaatcccggacatggtgagggggtgcagaaccgttttgattccaaaatcatcaaagccggatcgtttgaaagacattaataactggagacctatcacgatcggttccatcttgctgagactgttctccaggattgtaacagctaggctgagcaaagcgtgccccctgaacccaaggcaaagaggctttatcagagcggcgggatgctctgaaaacttaaaactcctgcaaactataatttggtcggccaaaagagaacacagaccactgggtgttgtattcgtggacatcgccaaggcttttgacaccgtaagccaccagcacatcattcatgctttgcagcaaagagaggtggatccccacatcgtcggtctggtgagcaatatgtacgagaacatcagtacgtatatcaccacaaagaggaacacacacacagacaaaatccagatccgggttggagtaaagcagggtgacccgatgtcgccccttttatttaacctggcaatggaccctctattatgcaagctggaagagagtggcaaaggataccaccgaggacagagcagcatcacagcgatggcatttgcagacgatctggttttgctgagcgactcctgggaaaatatgaatacaaatattagcatactggagaccttctgcaatctgaccggactcaaaacacaggggcaaaagtgccacggcttttacatcaagccgacaaagaagtcttacaccatcaatgactgcgctgcctggactatcaacggcacacccctgaacatgatcgaccccggcgaatctgagaaatacctcggcctgcagtttgacccgtggattggaatagcaaggtccggtctctccacaaaactagatttttggcttcagcggatcgatcaagcaccacttaaacctctgcagaaaactgatattctcaaaacatacaccatccctcggctgatctacatagctgaccactcagaagtgaaaagcgcactactcgaaacccttgaccagaagatccggacagcggtcaaggaatggcttcacctacctccgtgcacctgcgatgccatcctgtactcgagcacgagagacggcggtttgggcatcaccaaattggcaggactgatccccagcgtgcaggcccgtagactgcatcggatcgcacagtcatctgacgatacgatgaaatgcttcatggaaaaagagaaaatggaacagctgcataagaaattgtggattcaagctggaggggacagagagaacataccctcgatttgggaagcaccaccgtcgagtgaaccaccaaacaacgtgagcacaaattcggaatgggaagcaccgacccagaaagataaatttccaaagccttgcaattggaggaaaaacgaattcaaaaaatggaccaaattggcatcccaaggccgcggaattgtaaattttgaaagagacaaaattagtaaccattggatccaatactacagacgcatacctcacaggaaactcctcactgcactacaactcagggccaacgtttaccccacgagagaatttctagccaggggtagacaagaccaatacatcaaggcgtgtaggcactgcgatgcggacaacgaatcctgcgcccacatcatcggcaactgcccagtgacacaggacgcccgaatcaagaggcacaattacatctgcgaactgcttctcgaggaggcgaagaagaaggactgggtagtgttcaaggaaccgcacataagggattccaacaaggaactgtacaaacctgacctgatatttgtgaaggatgggcgtgcacttgtcgtggatgtgacagtacggtatgaagcagccaaatcatcgctggaggaagccgctgcagagaaagtgagaaagtacaaacacctggaaacggaagtaagacatctcacgaatgcaaaggacgttacttttgtgggctttcccctaggagcgcgggggaaatggcaccaagataactttaaacttttgactgagcttggcctctccaaatcgaggcaagtgaaaatggcagagactttttccacagtagcgctcttttcatctgtggacattgtacatatgtttgccagtagggccagaaaatctatggttatgtgataataggctgccttctgcggggcttgccttctggccatgcccttcttctctcccttgcacctgtacctcttggtctttgaataaagcctgagtaggaaggaccggtaaaaaaaaaaaaaaaaaaaaaaaaaaaaaaacgttgactaaaaaaaaaaaaaaaaaaaaaaaaaaaaaaaaaaaaaaaaaaaaaaaaaaaaaaaaaaaaaaaaaaaaaa

SEQ ID NO: 11764 - DNA, 4439 bp, synthetic construct
  source 1..4439: mol_type = other DNA
gaaataagagagaaaagaagagtaagaagaaatataagagaattcgccaccatggcttcttgcccgaaacctggccccccggtttcagcaggggcaatgagtttggaaagtggactgaccacccactccgttctcgccatcgaacgtggtcccaattcgttggcaaattccggatcagactttgggggggggggtctggggctaccgttacgcctattgagggtatcggtcggcactcagacctcccgctccgactgggtagacctggtgtcctggagccacccaggacccacgtctaagtcccagcaggttgacctggtgtctttatttcctaaacaccgggttgacctgttatccaaaaacgaccaggtagacctggtggctcaatttttaccatctaaatttccccccaatttggcagaaaatgatttggctttgctggtgaacttagagttctacagatcggatttgcatgtgtatgagtgtgttcataaggctgcacattgggagggattaagtggtttgcctgaggtgtatgaacaacttgcaccacaaccgtgtgtgggagaaactttacattctagcctcccacgagacagtgaactgtttgtgcctgaagaggggagcagcgagaaggagagcgaggacgcgccaaaaacatctcctccgacgcctgggaaacatggtttggaacagactggggaggaaaaagtgatggtgactgttcctgacaaaaatccaccttgtccttgctgtggtacccgggtaaactctgtgttgaatctgattgaacatctgaaagtgtcacacgggaaaaggggggtttgttttcggtgtgcaaaatgtggaaaggaaaatagtaactatcacagtgttgtttgtcattttaagaaatgcaggggtccagagacggagaaagccccagctggggagtggatttgtgaggtatgcaacagagattttacaaccaaaattggcctgggacaacacaagagattggcacacccagcagtgagaaatcaggaaaggatcgttgcttcccaaccgaaagaaacatcaaatagaggtgctcacaaaaggtgctggacaaaggaggaggaagaattactaataagactggaggctcagttcgagggaaacaaaaatattaataagcttattgcagaacacataaccaccaaaacagctaagcagatcagtgacaaaaggcgattgctgtccagaaagccagcagaggagccacgtatggagcctggaacgtgtcatcacaccaggagagcagctgcgagcctgagaacggagcctgagatgagtcatcacgcccaggcagaggacagagataatggacctgggagacgccctctgccaggcagggcagctgccggagggagaacaatggacgagataagacgccaccctgataagggcaacggacagcagagacccaccaagcaaaaatcagaagaacagctgcaggcttactataaaaagacactagaggaacgactttcagctggggcacttaacaccttcccccgagcattcaagcaggtaatggaaggccgggatataaagctagtaatcaatcagacagcgcaggactgcttcggatgcctggaatccataagccaaataagaacggcaacccgagataaaaaggacacggtgacccgggagaaacacccaaagaaaccttttcagaagtggatgaagaagagagcaatcaaaaaaggtaattatcttcggttccagcgtttattttatcttgatagagggaaactggctaaaatcattttagatgatattgaatgcttgtcttgtgacataccactcagtgaaatttattcggtttttaaaacaagatgggaaacaactggtagctttaaaagccttggggactttaaaacttacgggaaggctgacaacactgccttcagagaattaattacggctaaagaaattgagaaaaatgtgcaggaaatgagcaaaggctcggctcccggtccagacgggattactcttggggacgtcgtaaagatggatcccgagttttcccggaccatggagattttcaatttatggttaacaactggtaaaatcccggacatggtgagggggtgcagaaccgttttgattccaaaatcatcaaagccggatcgtttgaaagacattaataactggagacctatcacgatcggttccatcttgctgagactgttctccaggattgtaacagctaggctgagcaaagcgtgccccctgaacccaaggcaaagaggctttatcagagcggcgggatgctctgaaaacttaaaactcctgcaaactataatttggtcggccaaaagagaacacagaccactgggtgttgtattcgtggacatcgccaaggcttttgacaccgtaagccaccagcacatcattcatgctttgcagcaaagagaggtggatccccacatcgtcggtctggtgagcaatatgtacgagaacatcagtacgtatatcaccacaaagaggaacacacacacagacaaaatccagatccgggttggagtaaagcagggtgacccgatgtcgccccttttatttaacctggcaatggaccctctattatgcaagctggaagagagtggcaaaggataccaccgaggacagagcagcatcacagcgatggcatacgcagacgatctggttttgctgagcgactcctgggaaaatatgaatacaaatattagcatactggagaccttctgcaatctgaccggactcaaaacacaggggcaaaagtgccacggcttttacatcaagccgacaaagaagtcttacaccatcaatgactgcgctgcctggactatcaacggcacacccctgaacatgatcgaccccggcgaatctgagaaatacctcggcctgcagtttgacccgtggattggaatagcaaggtccggtctctccacaaaactagatttttggcttcagcggatcgatcaagcaccacttaaacctctgcagaaaactgatattctcaaaacatacaccatccctcggctgatctacatagctgaccactcagaagtgaaaagcgcactactcgaaacccttgaccagaagatccggacagcggtcaaggaatggcttcacctacctccgtgcacctgcgatgccatcctgtactcgagcacgagagacggcggtttgggcatcaccaaattggcaggactgatccccagcgtgcaggcccgtagactgcatcggatcgcacagtcatctgacgatacgatgaaatgcttcatggaaaaagagaaaatggaacagctgcataagaaattgtggattcaagctggaggggacagagagaacataccctcgatttgggaagcaccaccgtcgagtgaaccaccaaacaacgtgagcacaaattcggaatgggaagcaccgacccagaaagataaatttccaaagccttgcaattggaggaaaaacgaattcaaaaaatggaccaaattggcatcccaaggccgcggaattgtaaattttgaaagagacaaaattagtaaccattggatccaatactacagacgcatacctcacaggaaactcctcactgcactacaactcagggccaacgtttaccccacgagagaatttctagccaggggtagacaagaccaatacatcaaggcgtgtaggcactgcgatgcggacaacgaatcctgcgcccacatcatcggcaactgcccagtgacacaggacgcccgaatcaagaggcacaattacatctgcgaactgcttctcgaggaggcgaagaagaaggactgggtagtgttcaaggaaccgcacataagggattccaacaaggaactgtacaaacctgacctgatatttgtgaaggatgggcgtgcacttgtcgtggatgtgacagtacggtatgaagcagccaaatcatcgctggaggaagccgctgcagagaaagtgagaaagtacaaacacctggaaacggaagtaagacatctcacgaatgcaaaggacgttacttttgtgggctttcccctaggagcgcgggggaaatggcaccaagataactttaaacttttgactgagcttggcctctccaaatcgaggcaagtgaaaatggcagagactttttccacagtagcgctcttttcatctgtggacattgtacatatgtttgccagtagggccagaaaatctatggttatgtgataataggctgccttctgcggggcttgccttctggccatgcccttcttctctcccttgcacctgtacctcttggtctttgaataaagcctgagtaggaaggaccggtaaaaaaaaaaaaaaaaaaaaaaaaaaaaaaacgttgactaaaaaaaaaaaaaaaaaaaaaaaaaaaaaaaaaaaaaaaaaaaaaaaaaaaaaaaaaaaaaaaaaaaaaa

SEQ ID NO: 11765 - DNA, 4647 bp, synthetic construct
  source 1..4647: mol_type = other DNA
ggaaataagagagaaaagaagagtaagaagaaatataagagaattcgccaccatggccaaacggacagccgacggaagcgagttcgagtcaccaaagaagaagcggaaagtctctggcggctcaagggtgtcccctagagaatacagatcttctcaggaatccgcccaggaggccagcaccatcacaagcctgacacacagccaatttgacctgagcgtggacggcgaaatcctgcctgtgcccagcgacctggacgccgacgctccagccctggaacctgctctggatgacggcgccacccacaccctgcccagcacaaccggcaacctggccgccgtgtctgactgggttatgagcaccgtgccagtcgcccctcctcggcggagacgcggcagaatcctgaccgtgacatgcgacgagagagagggcaatatcacccctatggccagcgtgcggttcttccgggccgagctttgtcctgtggtgcaggaaaccgctgaaaccagagataccgccatgagcctgcaggcccctccatctacagccacagagcctaaccacccccccatttctttcggtgcttccagcgagacattccccatcaccttcggcgatttcaacgagggagaaatcgagagcctcagcagcgagctgctgacatttggcgacttcctgcctggcgaggtggacgatctgaccgacagcgattggtccacctgcagcgacaccgatgatgagctgagactggacagagccggcggaagcggctctgagacacctggaacaagcgagagcgccaccccggaatccctgttcgttccggaagagggctctagcgagaaggagagcgaggacgctcctaagaccagccctcctacccctggcaaacacggcctggagcaaacaggcgaggagaaggtcatggtgaccgtgcccgacaagaaccctccctgtccttgctgtggcacaagagtcaacagcgtgctgaacctcatcgagcacctgaaggtgtcccacggcaagagaggcgtgtgcttcagatgcgccaagtgcggcaaggagaacagcaactaccacagcgtcgtgtgccacttcaagaagtgcagaggccctgagaccgagaaggctcccgctggcgaatggatttgcgaggtgtgcaacagagacttcaccaccaagatcggcctgggccagcacaagcggttagctcaccctgctgtgagaaaccaggagagaatcgtggccagccagcccaaggagacaagcaacaggggcgctcacaagagatgctggaccaaggaggaagaggagctgctcatcagactggaggctcagttcgagggcaacaagaacatcaataagcttatcgccgagcacatcaccacaaagaccgccaagcagatcagcgacaagaggagactgctgtccagaaagcccgccgaggagcctagagaggaacctggtacatgtcaccacaccagaagagccgccgctagcctgagaaccgagcccgaaatgtctcaccacgctcaggccgaggacagagacaacggccctggcaggagacctcttcccggcagagctgctgctggaggcagaaccatggacgagatcaggagacaccccgataagggcaacggccagcagagacccacaaagcagaagtccgaggaacagctccaggcctactacaagaaaaccctggaggagagactgtccgcgggagctctgaacaccttccctagagccttcaaacaagtcatggagggcagagacatcaagctggtgatcaaccagaccgcccaggactgcttcggctgccttgagtctatcagccagatcaggaccgccacacgggataagaaggacaccgtcaccagagagaagcaccccaagaagcccttccagaaatggatgaagaagagggccatcaagaagggcaattacctgagattccagaggctgttctacctggacagaggcaagctggccaagatcatcctggacgacatcgagtgcctgagctgcgacatccctctgagcgagatctacagcgtgttcaagaccagatgggagaccaccggcagcttcaagtctctgggcgacttcaagacatacggcaaggccgacaacaccgccttcagagagctcatcaccgctaaggagatcgagaagaacgtgcaggagatgagcaagggcagcgctcctggccccgatggaattacactgggcgatgtggtgaagatggaccccgagttcagcagaacaatggagatcttcaacctgtggctcaccacaggcaagatccccgacatggtgagaggctgcagaaccgtgcttatccccaagagcagcaagcccgacagactgaaggatatcaacaactggagacccatcaccatcggcagcatcctgctgcggctgttcagccggattgtgaccgctagactgagcaaagcctgtcccctgaaccccagacagagaggcttcatcagagccgctggctgcagcgagaacctgaagctgctccagacaatcatctggagcgccaagagagagcacagacccctgggcgttgttttcgtggacatcgccaaggccttcgacaccgtgtcccatcagcacattatccacgccctgcagcagagggaggtcgaccctcatattgtgggcctggtgtccaacatgtacgagaacatctccacctatattacgaccaagagaaacacccacacagacaagatccagatccgggtcggcgtcaagcagggcgatcctatgtctcctctgctgttcaacctcgccatggaccctctgctctgcaagctcgaggagtctggaaagggctaccatagaggccaatcatcgatcaccgccatggccttcgccgacgacctggtgcttttaagcgacagctgggagaacatgaacaccaacatctctatcctggagacattctgcaaccttaccggcctgaaaacccagggccagaagtgtcatggcttctacatcaaacccaccaaggacagctacaccatcaacgactgcgccgcctggacaatcaacggcacccctctcaacatgatcgaccccggcgagtctgagaagtacctgggcctgcagttcgatccctggatcggcatcgctagaagcggcttgagcaccaagctggacttttggctccaacgcatagaccaggcccccctgaagcctcttcagaaaaccgacattttgaaaacttatacgatccccagactcatctacatcgccgaccactccgaggtcaagagcgctctgctggaaaccctggaccagaaaatcagaaccgccgtcaaggaatggctgcacctgcccccttgcacatgcgacgctatcctgtacagcagcaccagggacggcggcttaggaatcaccaagttagccggcctcatccccagcgtgcaggctaggagactccacagaatcgcccagagcagcgacgacaccatgaagtgcttcatggagaaggaaaagatggagcagctgcacaagaagctgtggatccaagcgggcggagatcgtgagaacattcccagcatctgggaggcccctcccagctcagaacctcccaataacgtgtccaccaattctgaatgggaggctcccacccagaaggataagtttcccaagccctgcaactggcggaagaacgagttcaaaaaatggacaaagctggctagccagggcaggggcatcgtgaacttcgaaagggacaagattagcaaccactggatccagtactacagaagaatcccccacagaaagctcctcaccgccctccagttacgtgcaaacgtgtacccaaccagagaattcctggccagaggcagacaggaccagtacatcaaggcctgccggcactgcgatgccgataacgagagctgtgctcacatcatcggcaactgccccgtcacccaggacgccagaatcaagagacacaactacatctgcgagttacttctggaggaagccaagaagaaggattgggttgtgttcaaggagccccacatcagagactccaacaaggagctgtacaagccagacctcatcttcgtgaaggacgctagagccctggtggtggacgtcaccgtcagatacgaggctgctaagtccagccttgaggaggctgccgccgagaaagtgcggaagtacaagcacctggaaacagaggtcagacacctcaccaacgccaaggacgttaccttcgtgggcttccccctaggtgctagaggcaaatggcaccaggacaacttcaagctgcttaccgagctgggcctctccaagagccgacaggttaagatggccgagaccttcagcaccgtcgccctgttctcttctgtggacattgtgcacatgttcgcctccagagccagaaagagcatggtgatgtgataataggctgccttctgcggggcttgccttctggccatgcccttcttctctcccttgcacctgtacctcttggtctttgaataaagcctgagtaggaaggaccggtaaaaaaaaaaaaaaaaaaaaaaaaaaaaaaacgttgactaaaaaaaaaaaaaaaaaaaaaaaaaaaaaaaaaaaaaaaaaaaaaaaaaaaaaaaaaaaaaaaaaaaaaa

SEQ ID NO: 11766 - DNA, 5190 bp, synthetic construct
  source 1..5190: mol_type = other DNA
ggaaataagagagaaaagaagagtaagaagaaatataagagaattcgccaccatggctagctgccctaagcctggacctcctgtgtctgctggcgctatgagcctggagagcggacttaccacccactctgtgctggccatcgagagaggccccaactctctggccaactctggcagcgatttcggcggaggaggacttggcctgcctctgagacttctgagagtttctgtgggcacccagaccagcagaagcgactgggtcgaccttgtgagctggagccaccctggtcctacaagcaagagccagcaggtcgatctggtgagcctgttccccaagcacagagtcgacctgctgagcaagaacgaccaggtcgacttggtggcccagttcctgcctagcaagttccctcccaacctggctgagaacgacttagccctgctggtgaacctggagttctatcgttccgacctgcacgtgtacgagtgcgtgcacttcgctgcccattgggagggcttaagcggccttcctgaggtgtacgaacagctggctccccagccctgtgtaggcgagacattacacagcagcctgcccagagacagcgagctgttcgttccggaagagggctctagcgagaaggagagcgaggacgctcctaagaccagccctcctacccctggcaaacacggcctggagcaaacaggcgaggagaaggtcatggtgaccgtgcccgacaagaaccctccctgtccttgctgtggcacaagagtcaacagcgtgctgaacctcatcgagcacctgaaggtgtcccacggcaagagaggcgtgtgcttcagatgcgccaagtgcggcaaggagaacagcaactaccacagcgtcgtgtgccacttcaagaagtgcagaggccctgagaccgagaaggctcccgctggcgaatggatttgcgaggtgtgcaacagagacttcaccaccaagatcggcctgggccagcacaagcggttagctcaccctgctgtgagaaaccaggagagaatcgtggccagccagcccaaggagacaagcaacaggggcgctcacaagagatgctggaccaaggaggaagaggagctgctcatcagactggaggctcagttcgagggcaacaagaacatcaataagcttatcgccgagcacatcaccacaaagaccgccaagcagatcagcgacaagaggagactgctgtccagaaagcccgccgaggagcctagagaggaacctggtacatgtcaccacaccagaagagccgccgctagcctgagaaccgagcccgaaatgtctcaccacgctcaggccgaggacagagacaacggccctggcaggagacctcttcccggcagagctgctgctggaggcagaaccatggacgagatcaggagacaccccgataagggcaacggccagcagagacccacaaagcagaagtccgaggaacagctccaggcctactacaagaaaaccctggaggagagactgtccgcgggagctctgaacaccttccctagagccttcaaacaagtcatggagggcagagacatcaagctggtgatcaaccagaccgcccaggactgcttcggctgccttgagtctatcagccagatcaggaccgccacacgggataagaaggacaccgtcaccagagagaagcaccccaagaagcccttccagaaatggatgaagaagagggccatcaagaagggcaattacctgagattccagaggctgttctacctggacagaggcaagctggccaagatcatcctggacgacatcgagtgcctgagctgcgacatccctctgagcgagatctacagcgtgttcaagaccagatgggagaccaccggcagcttcaagtctctgggcgacttcaagacatacggcaaggccgacaacaccgccttcagagagctcatcaccgctaaggagatcgagaagaacgtgcaggagatgagcaagggcagcgctcctggccccgatggaattacactgggcgatgtggtgaagatggaccccgagttcagcagaacaatggagatcttcaacctgtggctcaccacaggcaagatccccgacatggtgagaggctgcagaaccgtgcttatccccaagagcagcaagcccgacagactgaaggatatcaacaactggagacccatcaccatcggcagcatcctgctgcggctgttcagccggattgtgaccgctagactgagcaaagcctgtcccctgaaccccagacagagaggcttcatcagagccgctggctgcagcgagaacctgaagctgctccagacaatcatctggagcgccaagagagagcacagacccctgggcgttgttttcgtggacatcgccaaggccttcgacaccgtgtcccatcagcacattatccacgccctgcagcagagggaggtcgaccctcatattgtgggcctggtgtccaacatgtacgagaacatctccacctatattacgaccaagagaaacacccacacagacaagatccagatccgggtcggcgtcaagcagggcgatcctatgtctcctctgctgttcaacctcgccatggaccctctgctctgcaagctcgaggagtctggaaagggctaccatagaggccaatcatcgatcaccgccatggccttcgccgacgacctggtgcttttaagcgacagctgggagaacatgaacaccaacatctctatcctggagacattctgcaaccttaccggcctgaaaacccagggccagaagtgtcatggcttctacatcaaacccaccaaggacagctacaccatcaacgactgcgccgcctggacaatcaacggcacccctctcaacatgatcgaccccggcgagtctgagaagtacctgggcctgcagttcgatccctggatcggcatcgctagaagcggcttgagcaccaagctggacttttggctccaacgcatagaccaggcccccctgaagcctcttcagaaaaccgacattttgaaaacttatacgatccccagactcatctacatcgccgaccactccgaggtcaagagcgctctgctggaaaccctggaccagaaaatcagaaccgccgtcaaggaatggctgcacctgcccccttgcacatgcgacgctatcctgtacagcagcaccagggacggcggcttaggaatcaccaagttagccggcctcatccccagcgtgcaggctaggagactccacagaatcgcccagagcagcgacgacaccatgaagtgcttcatggagaaggaaaagatggagcagctgcacaagaagctgtggatccaagcgggcggagatcgtgagaacattcccagcatctgggaggcccctcccagctcagaacctcccaataacgtgtccaccaattctgaatgggaggctcccacccagaaggataagtttcccaagccctgcaactggcggaagaacgagttcaaaaaatggacaaagctggctagccagggcaggggcatcgtgaacttcgaaagggacaagattagcaaccactggatccagtactacagaagaatcccccacagaaagctcctcaccgccctccagttacgtgcaaacgtgtacccaaccagagaattcctggccagaggcagacaggaccagtacatcaaggcctgccggcactgcgatgccgataacgagagctgtgctcacatcatcggcaactgccccgtcacccaggacgccagaatcaagagacacaactacatctgcgagttacttctggaggaagccaagaagaaggattgggttgtgttcaaggagccccacatcagagactccaacaaggagctgtacaagccagacctcatcttcgtgaaggacgctagagccctggtggtggacgtcaccgtcagatacgaggctgctaagtccagccttgaggaggctgccgccgagaaagtgcggaagtacaagcacctggaaacagaggtcagacacctcaccaacgccaaggacgttaccttcgtgggcttccccctaggtgctagaggcaaatggcaccaggacaacttcaagctgcttaccgagctgggcctctccaagagccgacaggttaagatggccgagaccttcagcaccgtcgccctgttctcttctgtggacattgtgcacatgttcgcctccagagccagaaagagcatggtgatgagcggctctgagacacctggaacaagcgagagcgccaccccggaaagggtgtcccctagagaatacagatcttctcaggaatccgcccaggaggccagcaccatcacaagcctgacacacagccaatttgacctgagcgtggacggcgaaatcctgcctgtgcccagcgacctggacgccgacgctccagccctggaacctgctctggatgacggcgccacccacaccctgcccagcacaaccggcaacctggccgccgtgtctgactgggttatgagcaccgtgccagtcgcccctcctcggcggagacgcggcagaatcctgaccgtgacatgcgacgagagagagggcaatatcacccctatggccagcgtgcggttcttccgggccgagctttgtcctgtggtgcaggaaaccgctgaaaccagagataccgccatgagcctgcaggcccctccatctacagccacagagcctaaccacccccccatttctttcggtgcttccagcgagacattccccatcaccttcggcgatttcaacgagggagaaatcgagagcctcagcagcgagctgctgacatttggcgacttcctgcctggcgaggtggacgatctgaccgacagcgattggtccacctgcagcgacaccgatgatgagctgagactggacagagccggcggatctggcggctcaaaacggacagccgacggaagcgagttcgagtcaccaaagaagaagcggaaagtctgataataggctgccttctgcggggcttgccttctggccatgcccttcttctctcccttgcacctgtacctcttggtctttgaataaagcctgagtaggaaggaccggtaaaaaaaaaaaaaaaaaaaaaaaaaaaaaaacgttgactaaaaaaaaaaaaaaaaaaaaaaaaaaaaaaaaaaaaaaaaaaaaaaaaaaaaaaaaaaaaaaaaaaaaaa

SEQ ID NO: 11767 - DNA, 5955 bp, synthetic construct
  source 1..5955: mol_type = other DNA
ggaaataagagagaaaagaagagtaagaagaaatataagagaattcgccaccatggccaaacggacagccgacggaagcgagttcgagtcaccaaagaagaagcggaaagtctctggcggctcaggctgcgtgtccatcatcggccggctgcacgtgaaccagcggggctcaggcagcgccagcatcacagcctacgctcagcagacaagaggcctgctgggcgccatcgtggtgagcatgaccggcagagatagaaccgagcaggccggcgaggtgcagatcctgagcaccgtgtcccagagcttcctcggcacaaccatcagcggcgtgctgtggacagtgtaccacggcgccggcaacaagaccctggccggcctgcgaggccctgtgactcagatgtactctagcgccgagggcgatctggtcggctggcctagcccacccggcacaaaaagcctggaaccctgcaagtgcggcgccgtggacctgtacctggtgacccggaacgccgacgttatccccgccagacggagaggcgacaagagaggagccctactttctccaagacctattagcaccctgaagggctctagcggaggtccagtgctttgtcctagaggacacgtggtgggactgttcagagccgccgtgtgcagcagaggcgtcgccaaatctattgattttatccctgtcgagacactggatgtggtgaccagatctcctacctttagcgacaacagcacccctccggcagtgccacagacctaccaagtgggctacctgcacgcccctaccggcagcggcaagagcaccaaggtgcccgtggcctatgccgcccaaggctacaaggtgctggtgctgaatccttctgtggccgctaccctgggcttcggcgcctatctgagcaaggcccacggaattaaccctaatatccggaccggagtgcggacagtgatgacaggggaagccatcacatacagcacctacggcaagttcctggccgacggcggatgtgccagcggtgcctacgacatcatcatctgcgacgagtgtcacgccgtcgatgctaccagtatcctgggcatcggcaccgtgctggaccaggccgagacagccggggtgcggctgaccgtcctggccaccgccacccctcccggctccgttactacaccccaccctgatatcgaggaagtgggcctgggcagagaaggcgagatccctttctacggcagagctatccccctgagctgcatcaagggaggacgccacctgatcttctgccacagcaagaagaaatgtgacgagctggccgctgccctgcggggcatgggcctgaacgccgtggcctactaccggggcctggacgtgagcatcatccccgcccagggcgacgtggtagtggtcgcaaccgacgctctgatgaccggctatacaggcgattttgacagcgtgatcgactgcaatgtggccgtgacccaggccgtggactttagcctggaccctaccttcaccatcaccacccagacagtgcctcaggatgctgtttccagaagccagaggagaggcagaacaggcagaggcagacagggcacataccgttacgtgtctacaggcgagagagccagcggcatgttcgattctgtggtgctgtgcgagtgctacgacgccggcgctgcatggtacgacctgacacctgctgaaacaaccgtgcggctgagagcctacttcaacacccctggcctccctgtttgtcaggaccacctggaattctgggaggccgtgttcaccggactcacccacatcgacgcgcatttcctgtcccaaaccaaacaggccggcgaaaacttcgcctacctggtcgcctaccaggcaaccgtctgcgctagagccaaagcccctcctccaagctgggatgccatgtggaagtgcctggcccggctgaagcccaccttggccggccccacccctctgctgtacagactgggacctatcaccaacgaggtgacactgacccatcctggcaccaagtacatcgccacctgcatgcaggctgacctggaagtgatgaccagcggctctgagacacctggaacaagcgagagcgccaccccggaatccctgttcgttccggaagagggctctagcgagaaggagagcgaggacgctcctaagaccagccctcctacccctggcaaacacggcctggagcaaacaggcgaggagaaggtcatggtgaccgtgcccgacaagaaccctccctgtccttgctgtggcacaagagtcaacagcgtgctgaacctcatcgagcacctgaaggtgtcccacggcaagagaggcgtgtgcttcagatgcgccaagtgcggcaaggagaacagcaactaccacagcgtcgtgtgccacttcaagaagtgcagaggccctgagaccgagaaggctcccgctggcgaatggatttgcgaggtgtgcaacagagacttcaccaccaagatcggcctgggccagcacaagcggttagctcaccctgctgtgagaaaccaggagagaatcgtggccagccagcccaaggagacaagcaacaggggcgctcacaagagatgctggaccaaggaggaagaggagctgctcatcagactggaggctcagttcgagggcaacaagaacatcaataagcttatcgccgagcacatcaccacaaagaccgccaagcagatcagcgacaagaggagactgctgtccagaaagcccgccgaggagcctagagaggaacctggtacatgtcaccacaccagaagagccgccgctagcctgagaaccgagcccgaaatgtctcaccacgctcaggccgaggacagagacaacggccctggcaggagacctcttcccggcagagctgctgctggaggcagaaccatggacgagatcaggagacaccccgataagggcaacggccagcagagacccacaaagcagaagtccgaggaacagctccaggcctactacaagaaaaccctggaggagagactgtccgcgggagctctgaacaccttccctagagccttcaaacaagtcatggagggcagagacatcaagctggtgatcaaccagaccgcccaggactgcttcggctgccttgagtctatcagccagatcaggaccgccacacgggataagaaggacaccgtcaccagagagaagcaccccaagaagcccttccagaaatggatgaagaagagggccatcaagaagggcaattacctgagattccagaggctgttctacctggacagaggcaagctggccaagatcatcctggacgacatcgagtgcctgagctgcgacatccctctgagcgagatctacagcgtgttcaagaccagatgggagaccaccggcagcttcaagtctctgggcgacttcaagacatacggcaaggccgacaacaccgccttcagagagctcatcaccgctaaggagatcgagaagaacgtgcaggagatgagcaagggcagcgctcctggccccgatggaattacactgggcgatgtggtgaagatggaccccgagttcagcagaacaatggagatcttcaacctgtggctcaccacaggcaagatccccgacatggtgagaggctgcagaaccgtgcttatccccaagagcagcaagcccgacagactgaaggatatcaacaactggagacccatcaccatcggcagcatcctgctgcggctgttcagccggattgtgaccgctagactgagcaaagcctgtcccctgaaccccagacagagaggcttcatcagagccgctggctgcagcgagaacctgaagctgctccagacaatcatctggagcgccaagagagagcacagacccctgggcgttgttttcgtggacatcgccaaggccttcgacaccgtgtcccatcagcacattatccacgccctgcagcagagggaggtcgaccctcatattgtgggcctggtgtccaacatgtacgagaacatctccacctatattacgaccaagagaaacacccacacagacaagatccagatccgggtcggcgtcaagcagggcgatcctatgtctcctctgctgttcaacctcgccatggaccctctgctctgcaagctcgaggagtctggaaagggctaccatagaggccaatcatcgatcaccgccatggccttcgccgacgacctggtgcttttaagcgacagctgggagaacatgaacaccaacatctctatcctggagacattctgcaaccttaccggcctgaaaacccagggccagaagtgtcatggcttctacatcaaacccaccaaggacagctacaccatcaacgactgcgccgcctggacaatcaacggcacccctctcaacatgatcgaccccggcgagtctgagaagtacctgggcctgcagttcgatccctggatcggcatcgctagaagcggcttgagcaccaagctggacttttggctccaacgcatagaccaggcccccctgaagcctcttcagaaaaccgacattttgaaaacttatacgatccccagactcatctacatcgccgaccactccgaggtcaagagcgctctgctggaaaccctggaccagaaaatcagaaccgccgtcaaggaatggctgcacctgcccccttgcacatgcgacgctatcctgtacagcagcaccagggacggcggcttaggaatcaccaagttagccggcctcatccccagcgtgcaggctaggagactccacagaatcgcccagagcagcgacgacaccatgaagtgcttcatggagaaggaaaagatggagcagctgcacaagaagctgtggatccaagcgggcggagatcgtgagaacattcccagcatctgggaggcccctcccagctcagaacctcccaataacgtgtccaccaattctgaatgggaggctcccacccagaaggataagtttcccaagccctgcaactggcggaagaacgagttcaaaaaatggacaaagctggctagccagggcaggggcatcgtgaacttcgaaagggacaagattagcaaccactggatccagtactacagaagaatcccccacagaaagctcctcaccgccctccagttacgtgcaaacgtgtacccaaccagagaattcctggccagaggcagacaggaccagtacatcaaggcctgccggcactgcgatgccgataacgagagctgtgctcacatcatcggcaactgccccgtcacccaggacgccagaatcaagagacacaactacatctgcgagttacttctggaggaagccaagaagaaggattgggttgtgttcaaggagccccacatcagagactccaacaaggagctgtacaagccagacctcatcttcgtgaaggacgctagagccctggtggtggacgtcaccgtcagatacgaggctgctaagtccagccttgaggaggctgccgccgagaaagtgcggaagtacaagcacctggaaacagaggtcagacacctcaccaacgccaaggacgttaccttcgtgggcttccccctaggtgctagaggcaaatggcaccaggacaacttcaagctgcttaccgagctgggcctctccaagagccgacaggttaagatggccgagaccttcagcaccgtcgccctgttctcttctgtggacattgtgcacatgttcgcctccagagccagaaagagcatggtgatgtgataataggctgccttctgcggggcttgccttctggccatgcccttcttctctcccttgcacctgtacctcttggtctttgaataaagcctgagtaggaaggaccggtaaaaaaaaaaaaaaaaaaaaaaaaaaaaaaacgttgactaaaaaaaaaaaaaaaaaaaaaaaaaaaaaaaaaaaaaaaaaaaaaaaaaaaaaaaaaaaaaaaaaaaaaa

SEQ ID NO: 11768 - DNA, 6501 bp, synthetic construct
  source 1..6501: mol_type = other DNA
ggaaataagagagaaaagaagagtaagaagaaatataagagaattcgccaccatggccaaacggacagccgacggaagcgagttcgagtcaccaaagaagaagcggaaagtctctggcggctcactgttcgtggtccggccaggcagaaagaagaatgagctggaggccttcttcatcgaaaacgagcctgagaaacttagccagatgcaaaacctgaaagctgatagaatctacagattcatcatgcgagaaggcagactgtttaaggtgctggagggatctcagtaccgcaaccccaaggaaatcgagaagctcctgagacagagcagaatcgtgctggtgaacgccgacgagtgggaggactacttcaagagacggctgcagaacaaacgcgtggagaaagccgagctgtgtagactgtgtctgctggaagggaggatcaccgtgctgacagaaggcaatagaatcaagtaccacaacgagtacatctgcgagcggtgcgccgaggacgagctgaagcgggaactgagattccggttcaagtctatcgcaatgttcgaccaggccaagaagctgctggagagattccgggacctggacaaggtgctgtacgcctttgaccccagatttgatcctacaaagcaccctgagatcaccaagtgggacgagctgaaggccaaacatgtgaaggtggagaagatcaaggtggatgagctgcctgtaccagagaagttcaaggaagtgctgaagtccgagggcgtgagagagctgctgcctgtgcaaagcctggccgtgaaaaacggcctcctggacggcgagaacctgctcgtggtgtccgccacagccagcggcaagacactgattggagagctcgccggcgtgcccaaagccatgcagggcaaaaagctcctgtttttagtgcccctggtggcactggccaaccagaagtacgaggacttcaagaggcggtacagcaagctgggactgagagtcgctatccgggtgggcatgtctagaatcaagaccaaggacgagctggttgtggtggacaccggcatcgacgccgacatcattgtgggcacctacgagggaatcgactacctgctgcgggccggccggaaaatcggcaacgtgggaaccatcgtgatcgacgagatccacaccctggatgatgaagagagaggccctagactggatggcctgatcgccagactgcggaaactgtaccctaaggctcagttcatcggactgtccgctacagtgggcaatcctgatgaactggccaaggaacttggcctgaagctggttctctatgatgaaagacctgtggacctggagaggcacattatcatcgtgcgaaacgaatcagagaaatggcggcacatcgctaatctgtgcagagccgaagccatgcggaaatccaagcaaggctacaagggccagtctatcgtctttacattcagcagaaagcgaacccacgagctggcagcctacctgaccagcaagggcctgaaggccaaaccatatcacagcggcctgccttacaagcagcggaagctgaccgagatggaattcctggcccagagactggacgtggtggtgaccaccgccgccctgggcgccggagttgactttccagccagccaggtgatcttcgagagcctggctatgggcaacaagtggctgagcgtgcgggaattccaccagatgctgggcagagccggccggcctctgtaccatgaaaagggcaaggtgtacctgctggtcgagcccggcagaaaatacagcgcccagatggaaggaacagaggacgaggtggccttcaagctgttgacagctcctattgaacctgtgcaagtggaatggagcgacgaactggagcaggacaacgtgctggctcacagctgcgtgttcaacagactggacgtgatcgaggaggtgcagagcatgtgtctgggcgccaaccagtctgctgagaaggtgctggagaagctggaagaattcgactttgtgaagatgaaaagacccatcgtggaagtgaccccttacggcagggccgtgtccatgagcttcctgctgcccaaggaagccaccttcatcagaggcaacctgggaaagagagaggccagatggatcgctgtgaagctgctgcccttcgagaacatctatctgagcggaaccctgcagcgggaactggagggcgccgtgcgggggagactgagcgctaatgtgttcagcccaagcttcgcctccatcctggaagaactggataaggtgatccccgagctgagtcctaacgcggccgaacggctgttcacaatctaccaggagtttttcatgtgccctgaagaagattgcaccgagtacgctatggagagagtctctaatctgatcatcgagctacgcagaagcggcaagcaccctacccagatcgccgaacacttcagaaaggtgtacggccttattgtgtaccctggcgacgtgttcacctggctggacggcatcgttcggaaactagaggccatcgaaagaatcgcccgagtgtttagagtcagaaagaccgaggaaggagccaagatcctgaagagagagatcgaggagggccggatgatcagaagcggctctgagacacctggaacaagcgagagcgccaccccggaatccctgttcgttccggaagagggctctagcgagaaggagagcgaggacgctcctaagaccagccctcctacccctggcaaacacggcctggagcaaacaggcgaggagaaggtcatggtgaccgtgcccgacaagaaccctccctgtccttgctgtggcacaagagtcaacagcgtgctgaacctcatcgagcacctgaaggtgtcccacggcaagagaggcgtgtgcttcagatgcgccaagtgcggcaaggagaacagcaactaccacagcgtcgtgtgccacttcaagaagtgcagaggccctgagaccgagaaggctcccgctggcgaatggatttgcgaggtgtgcaacagagacttcaccaccaagatcggcctgggccagcacaagcggttagctcaccctgctgtgagaaaccaggagagaatcgtggccagccagcccaaggagacaagcaacaggggcgctcacaagagatgctggaccaaggaggaagaggagctgctcatcagactggaggctcagttcgagggcaacaagaacatcaataagcttatcgccgagcacatcaccacaaagaccgccaagcagatcagcgacaagaggagactgctgtccagaaagcccgccgaggagcctagagaggaacctggtacatgtcaccacaccagaagagccgccgctagcctgagaaccgagcccgaaatgtctcaccacgctcaggccgaggacagagacaacggccctggcaggagacctcttcccggcagagctgctgctggaggcagaaccatggacgagatcaggagacaccccgataagggcaacggccagcagagacccacaaagcagaagtccgaggaacagctccaggcctactacaagaaaaccctggaggagagactgtccgcgggagctctgaacaccttccctagagccttcaaacaagtcatggagggcagagacatcaagctggtgatcaaccagaccgcccaggactgcttcggctgccttgagtctatcagccagatcaggaccgccacacgggataagaaggacaccgtcaccagagagaagcaccccaagaagcccttccagaaatggatgaagaagagggccatcaagaagggcaattacctgagattccagaggctgttctacctggacagaggcaagctggccaagatcatcctggacgacatcgagtgcctgagctgcgacatccctctgagcgagatctacagcgtgttcaagaccagatgggagaccaccggcagcttcaagtctctgggcgacttcaagacatacggcaaggccgacaacaccgccttcagagagctcatcaccgctaaggagatcgagaagaacgtgcaggagatgagcaagggcagcgctcctggccccgatggaattacactgggcgatgtggtgaagatggaccccgagttcagcagaacaatggagatcttcaacctgtggctcaccacaggcaagatccccgacatggtgagaggctgcagaaccgtgcttatccccaagagcagcaagcccgacagactgaaggatatcaacaactggagacccatcaccatcggcagcatcctgctgcggctgttcagccggattgtgaccgctagactgagcaaagcctgtcccctgaaccccagacagagaggcttcatcagagccgctggctgcagcgagaacctgaagctgctccagacaatcatctggagcgccaagagagagcacagacccctgggcgttgttttcgtggacatcgccaaggccttcgacaccgtgtcccatcagcacattatccacgccctgcagcagagggaggtcgaccctcatattgtgggcctggtgtccaacatgtacgagaacatctccacctatattacgaccaagagaaacacccacacagacaagatccagatccgggtcggcgtcaagcagggcgatcctatgtctcctctgctgttcaacctcgccatggaccctctgctctgcaagctcgaggagtctggaaagggctaccatagaggccaatcatcgatcaccgccatggccttcgccgacgacctggtgcttttaagcgacagctgggagaacatgaacaccaacatctctatcctggagacattctgcaaccttaccggcctgaaaacccagggccagaagtgtcatggcttctacatcaaacccaccaaggacagctacaccatcaacgactgcgccgcctggacaatcaacggcacccctctcaacatgatcgaccccggcgagtctgagaagtacctgggcctgcagttcgatccctggatcggcatcgctagaagcggcttgagcaccaagctggacttttggctccaacgcatagaccaggcccccctgaagcctcttcagaaaaccgacattttgaaaacttatacgatccccagactcatctacatcgccgaccactccgaggtcaagagcgctctgctggaaaccctggaccagaaaatcagaaccgccgtcaaggaatggctgcacctgcccccttgcacatgcgacgctatcctgtacagcagcaccagggacggcggcttaggaatcaccaagttagccggcctcatccccagcgtgcaggctaggagactccacagaatcgcccagagcagcgacgacaccatgaagtgcttcatggagaaggaaaagatggagcagctgcacaagaagctgtggatccaagcgggcggagatcgtgagaacattcccagcatctgggaggcccctcccagctcagaacctcccaataacgtgtccaccaattctgaatgggaggctcccacccagaaggataagtttcccaagccctgcaactggcggaagaacgagttcaaaaaatggacaaagctggctagccagggcaggggcatcgtgaacttcgaaagggacaagattagcaaccactggatccagtactacagaagaatcccccacagaaagctcctcaccgccctccagttacgtgcaaacgtgtacccaaccagagaattcctggccagaggcagacaggaccagtacatcaaggcctgccggcactgcgatgccgataacgagagctgtgctcacatcatcggcaactgccccgtcacccaggacgccagaatcaagagacacaactacatctgcgagttacttctggaggaagccaagaagaaggattgggttgtgttcaaggagccccacatcagagactccaacaaggagctgtacaagccagacctcatcttcgtgaaggacgctagagccctggtggtggacgtcaccgtcagatacgaggctgctaagtccagccttgaggaggctgccgccgagaaagtgcggaagtacaagcacctggaaacagaggtcagacacctcaccaacgccaaggacgttaccttcgtgggcttccccctaggtgctagaggcaaatggcaccaggacaacttcaagctgcttaccgagctgggcctctccaagagccgacaggttaagatggccgagaccttcagcaccgtcgccctgttctcttctgtggacattgtgcacatgttcgcctccagagccagaaagagcatggtgatgtgataataggctgccttctgcggggcttgccttctggccatgcccttcttctctcccttgcacctgtacctcttggtctttgaataaagcctgagtaggaaggaccggtaaaaaaaaaaaaaaaaaaaaaaaaaaaaaaacgttgactaaaaaaaaaaaaaaaaaaaaaaaaaaaaaaaaaaaaaaaaaaaaaaaaaaaaaaaaaaaaaaaaaaaaaa

SEQ ID NO: 11769 - DNA, 4440 bp, synthetic construct
  source 1..4440: mol_type = other DNA
ggaaataagagagaaaagaagagtaagaagaaatataagagaattcgccaccatggctagctgccctaagcctggacctcctgtgtctgctggcgctatgagcctggagagcggacttaccacccactctgtgctggccatcgagagaggccccaactctctggccaactctggcagcgatttcggcggaggaggacttggcctgcctctgagacttctgagagtttctgtgggcacccagaccagcagaagcgactgggtcgaccttgtgagctggagccaccctggtcctacaagcaagagccagcaggtcgatctggtgagcctgttccccaagcacagagtcgacctgctgagcaagaacgaccaggtcgacttggtggcccagttcctgcctagcaagttccctcccaacctggctgagaacgacttagccctgctggtgaacctggagttctatcgttccgacctgcacgtgtacgagtgcgtgcacttcgctgcccattgggagggcttaagcggccttcctgaggtgtacgaacagctggctccccagccctgtgtaggcgagacattacacagcagcctgcccagagacagcgagctgttcgttccggaagagggctctagcgagaaggagagcgaggacgctcctaagaccagccctcctacccctggcaaacacggcctggagcaaacaggcgaggagaaggtcatggtgaccgtgcccgacaagaaccctccctgtccttgctgtggcacaagagtcaacagcgtgctgaacctcatcgagcacctgaaggtgtcccacggcaagagaggcgtgtgcttcagatgcgccaagtgcggcaaggagaacagcaactaccacagcgtcgtgtgccacttcaagaagtgcagaggccctgagaccgagaaggctcccgctggcgaatggatttgcgaggtgtgcaacagagacttcaccaccaagatcggcctgggccagcacaagcggttagctcaccctgctgtgagaaaccaggagagaatcgtggccagccagcccaaggagacaagcaacaggggcgctcacaagagatgctggaccaaggaggaagaggagctgctcatcagactggaggctcagttcgagggcaacaagaacatcaataagcttatcgccgagcacatcaccacaaagaccgccaagcagatcagcgacaagaggagactgctgtccagaaagcccgccgaggagcctagagaggaacctggtacatgtcaccacaccagaagagccgccgctagcctgagaaccgagcccgaaatgtctcaccacgctcaggccgaggacagagacaacggccctggcaggagacctcttcccggcagagctgctgctggaggcagaaccatggacgagatcaggagacaccccgataagggcaacggccagcagagacccacaaagcagaagtccgaggaacagctccaggcctactacaagaaaaccctggaggagagactgtccgcgggagctctgaacaccttccctagagccttcaaacaagtcatggagggcagagacatcaagctggtgatcaaccagaccgcccaggactgcttcggctgccttgagtctatcagccagatcaggaccgccacacgggataagaaggacaccgtcaccagagagaagcaccccaagaagcccttccagaaatggatgaagaagagggccatcaagaagggcaattacctgagattccagaggctgttctacctggacagaggcaagctggccaagatcatcctggacgacatcgagtgcctgagctgcgacatccctctgagcgagatctacagcgtgttcaagaccagatgggagaccaccggcagcttcaagtctctgggcgacttcaagacatacggcaaggccgacaacaccgccttcagagagctcatcaccgctaaggagatcgagaagaacgtgcaggagatgagcaagggcagcgctcctggccccgatggaattacactgggcgatgtggtgaagatggaccccgagttcagcagaacaatggagatcttcaacctgtggctcaccacaggcaagatccccgacatggtgagaggctgcagaaccgtgcttatccccaagagcagcaagcccgacagactgaaggatatcaacaactggagacccatcaccatcggcagcatcctgctgcggctgttcagccggattgtgaccgctagactgagcaaagcctgtcccctgaaccccagacagagaggcttcatcagagccgctggctgcagcgagaacctgaagctgctccagacaatcatctggagcgccaagagagagcacagacccctgggcgttgttttcgtggacatcgccaaggccttcgacaccgtgtcccatcagcacattatccacgccctgcagcagagggaggtcgaccctcatattgtgggcctggtgtccaacatgtacgagaacatctccacctatattacgaccaagagaaacacccacacagacaagatccagatccgggtcggcgtcaagcagggcgatcctatgtctcctctgctgttcaacctcgccatggaccctctgctctgcaagctcgaggagtctggaaagggctaccatagaggccaatcatcgatcaccgccatggccttcgccgacgacctggtgcttttaagcgacagctgggagaacatgaacaccaacatctctatcctggagacattctgcaaccttaccggcctgaaaacccagggccagaagtgtcatggcttctacatcaaacccaccaaggacagctacaccatcaacgactgcgccgcctggacaatcaacggcacccctctcaacatgatcgaccccggcgagtctgagaagtacctgggcctgcagttcgatccctggatcggcatcgctagaagcggcttgagcaccaagctggacttttggctccaacgcatagaccaggcccccctgaagcctcttcagaaaaccgacattttgaaaacttatacgatccccagactcatctacatcgccgaccactccgaggtcaagagcgctctgctggaaaccctggaccagaaaatcagaaccgccgtcaaggaatggctgcacctgcccccttgcacatgcgacgctatcctgtacagcagcaccagggacggcggcttaggaatcaccaagttagccggcctcatccccagcgtgcaggctaggagactccacagaatcgcccagagcagcgacgacaccatgaagtgcttcatggagaaggaaaagatggagcagctgcacaagaagctgtggatccaagcgggcggagatcgtgagaacattcccagcatctgggaggcccctcccagctcagaacctcccaataacgtgtccaccaattctgaatgggaggctcccacccagaaggataagtttcccaagccctgcaactggcggaagaacgagttcaaaaaatggacaaagctggctagccagggcaggggcatcgtgaacttcgaaagggacaagattagcaaccactggatccagtactacagaagaatcccccacagaaagctcctcaccgccctccagttacgtgcaaacgtgtacccaaccagagaattcctggccagaggcagacaggaccagtacatcaaggcctgccggcactgcgatgccgataacgagagctgtgctcacatcatcggcaactgccccgtcacccaggacgccagaatcaagagacacaactacatctgcgagttacttctggaggaagccaagaagaaggattgggttgtgttcaaggagccccacatcagagactccaacaaggagctgtacaagccagacctcatcttcgtgaaggacgctagagccctggtggtggacgtcaccgtcagatacgaggctgctaagtccagccttgaggaggctgccgccgagaaagtgcggaagtacaagcacctggaaacagaggtcagacacctcaccaacgccaaggacgttaccttcgtgggcttccccctaggtgctagaggcaaatggcaccaggacaacttcaagctgcttaccgagctgggcctctccaagagccgacaggttaagatggccgagaccttcagcaccgtcgccctgttctcttctgtggacattgtgcacatgttcgcctccagagccagaaagagcatggtgatgtgataataggctgccttctgcggggcttgccttctggccatgcccttcttctctcccttgcacctgtacctcttggtctttgaataaagcctgagtaggaaggaccggtaaaaaaaaaaaaaaaaaaaaaaaaaaaaaaacgttgactaaaaaaaaaaaaaaaaaaaaaaaaaaaaaaaaaaaaaaaaaaaaaaaaaaaaaaaaaaaaaaaaaaaaaa

SEQ ID NO: 11770 - DNA, 5036 bp, synthetic construct
  source 1..5036: mol_type = other DNA
gaaataagagagaaaagaagagtaagaagaaatataagagaattcgccaccatggcccctaagaaaaagcggaaggtgcccacactgctgggcttccacaccgccagcggcaagaaggtgaagatcgccaaggaatccctggataaggtgaaaaacctgttcgacgagaaggagcagggcggaagcggaggcggcaatatcagcggctctagctgcggcagccccaacagcgccgacaccagcagcgacttcaaggacctgtggaccaagctgaaggaatgccacgaccgggaagtgcagggactccaggtgaaggtcaccaaactcaagcaagaaagaatcctggacgcccagagactggaagaattcttcaccaagaaccagcagctgagagagcagcagaaagtgctgcacgagacaatcaaggttctggaagatagactgcgggccggcctgtgcgacagatgcgccgtgaccgaggaacacatgcgcaaaaagcagcaggagttcgagaacattagacagcaaaatctgaaattgatcacagagctgatgaacgagagaaacacactgcaggaggagaacaagaagctgagcgagcagctgcaacagaagatcgagaatgatcagcaacaccaggccgctgagctggaatgtgaagaggacgtgatccccgacagcccaatcacagctttcagcttttctggcgtgaacagactgaggcggaaggaaaacccccacgtgcggtacatcgagcagacccataccaagctggaacacagcgtgtgtgccaacgagatgagaaaggtgtccaagtcctccacccatccccagcacaaccctaacgaaaatgagatcctggtggctgatacctacgaccagtctcagagccctatggccaaggcccacggcaccagctcttatacccctgataagagctccttcaacctggccaccgtggtggccgagacactgggcctgggcgtgcaggaggaaagcgagacacagggcccaatgagccctctgggagatgagctgtaccactgcctggaaggcaaccacaagaaacagccttttgagtccggctccgagactcctggaacaagcgagagcgctacacctgagggcagctatgaacaacttgcaccacaaccgtgtgtgggagaaactttacattctagcctcccacgagacagtgaactgtttgtgcctgaagaggggagcagcgagaaggagagcgaggacgcgccaaaaacatctcctccgacgcctgggaaacatggtttggaacagactggggaggaaaaagtgatggtgactgttcctgacaaaaatccaccttgtccttgctgtggtacccgggtaaactctgtgttgaatctgattgaacatctgaaagtgtcacacgggaaaaggggggtttgttttcggtgtgcaaaatgtggaaaggaaaatagtaactatcacagtgttgtttgtcattttaagaaatgcaggggtccagagacggagaaagccccagctggggagtggatttgtgaggtatgcaacagagattttacaaccaaaattggcctgggacaacacaagagattggcacacccagcagtgagaaatcaggaaaggatcgttgcttcccaaccgaaagaaacatcaaatagaggtgctcacaaaaggtgctggacaaaggaggaggaagaattactaataagactggaggctcagttcgagggaaacaaaaatattaataagcttattgcagaacacataaccaccaaaacagctaagcagatcagtgacaaaaggcgattgctgtccagaaagccagcagaggagccacgtgaggagcctggaacgtgtcatcacaccaggagagcagctgcgagcctgagaacggagcctgagatgagtcatcacgcccaggcagaggacagagataatggacctgggagacgccctctgccaggcagggcagctgccggagggagaacaatggacgagataagacgccaccctgataagggcaacggacagcagagacccaccaagcaaaaatcagaagaacagctgcaggcttactataaaaagacactagaggaacgactttcagctggggcacttaacaccttcccccgagcattcaagcaggtaatggaaggccgggatataaagctagtaatcaatcagacagcgcaggactgcttcggatgcctggaatccataagccaaataagaacggcaacccgagataaaaaggacacggtgacccgggagaaacacccaaagaaaccttttcagaagtggatgaagaagagagcaatcaaaaaaggtaattatcttcggttccagcgtttattttatcttgatagagggaaactggctaaaatcattttagatgatattgaatgcttgtcttgtgacatccctcttagcgagatctacagcgttttcaagaccagatgggagaccaccggcagcttcaagagcctgggcgacttcaagacatacggcaaggccgacaacaccgccttcagagagctcatcaccgccaaggagatcgagaagaatgtgcaggagatgagcaagggctccgcgccagggcccgatggaattacattaggcgatgtggtgaagatggaccccgagttcagcagaaccatggagatcttcaacctgtggctcaccaccgggaagatccccgacatggttagaggctgcagaaccgttctcatccccaagagcagcaagcccgacagactgaaggacatcaacaactggagacccatcaccatcggcagcatcctgctgagactgttctccagaatcgtgaccgccagactgtccaaggcctgccctctgaaccctagacagagaggcttcatcagagctgccggctgcagcgagaacctgaagcttctgcagaccatcatctggagcgccaagagagagcacagacccctgggcgttgtgttcgtggacatcgccaaggctttcgacactgtgagccaccagcacatcatccacgccctgcaacagcgagaggtcgaccctcacatcgtgggccttgtgagcaacatgtacgagaacatcagcacctacatcaccaccaagagaaacacccacaccgacaagatccagatacgtgtgggcgtcaagcagggcgaccctatgagccctcttctgttcaacctcgccatggaccctctgctgtgcaagctggaggagtctggcaagggataccacagaggccagagctcgattactgccatggccttcgccgacgacctggtgcttctgagcgattcttgggagaacatgaacaccaacatctccatcctcgagaccttctgcaacctcaccggcctgaaaacccagggccaaaagtgccacggcttctacatcaagcccaccaaggacagctacaccatcaacgactgcgctgcctggaccatcaatggcacccctctcaacatgatcgaccccggcgagagcgagaagtacctgggcttacagttcgacccttggatcggcatcgccagaagcggccttagcacaaagttggacttctggctccagagaatcgaccaggcccccctgaagcctcttcagaaaaccgacatcctgaaaacctacacaatccccagactcatctacatcgccgaccacagcgaggtcaagagcgcactactcgaaacccttgaccagaagatccggacagcggtcaaggaatggcttcacctacctccgtgcacctgcgatgccatcctgtactcgagcacgagagacggcggtttgggcatcaccaaattggcaggactgatccccagcgtgcaggcccgtagactgcatcggatcgcacagtcatctgacgatacgatgaaatgcttcatggaaaaagagaaaatggaacagctgcataagaaattgtggattcaagctggaggggacagagagaacataccctcgatttgggaagcaccaccgtcgagtgaaccaccaaacaacgtgagcacaaattcggaatgggaagcaccgacccagaaagataaatttccaaagccttgcaattggaggaaaaacgaattcaaaaaatggaccaaattggcatcccaaggccgcggaattgtaaattttgaaagagacaaaattagtaaccattggatccaatactacagacgcatacctcacaggaaactcctcactgcactacaactcagggccaacgtttaccccacgagagaatttctagccaggggtagacaagaccaatacatcaaggcgtgtaggcactgcgatgcggacaacgaatcctgcgcccacatcatcggcaactgcccagtgacacaggacgcccgaatcaagaggcacaattacatctgcgaactgcttctcgaggaggcgaagaagaaggactgggtagtgttcaaggaaccgcacataagggattccaacaaggaactgtacaaacctgacctgatatttgtgaaggatgggcgtgcacttgtcgtggatgtgacagtacggtatgaagcagccaaatcatcgctggaggaagccgctgcagagaaagtgagaaagtacaaacacctggaaacggaagtaagacatctcacgaatgcaaaggacgttacttttgtgggctttcccctaggagcgcgggggaaatggcaccaagataactttaaacttttgactgagcttggcctctccaaatcgaggcaagtgaaaatggcagagactttttccacagtagcgctcttttcatctgtggacattgtacatatgtttgccagtagggccagaaaatctatggttatgtgataataggctgccttctgcggggcttgccttctggccatgcccttcttctctcccttgcacctgtacctcttggtctttgaataaagcctgagtaggaaggaccggtaaaaaaaaaaaaaaaaaaaaaaaaaaaaaaacgttgactaaaaaaaaaaaaaaaaaaaaaaaaaaaaaaaaaaaaaaaaaaaaaaaaaaaaaaaaaaaaaaaaaaaaaa

SEQ ID NO: 11771 - DNA, 5342 bp, synthetic construct
  source 1..5342: mol_type = other DNA
gaaataagagagaaaagaagagtaagaagaaatataagagaattcgccaccatggcccctaagaaaaagcggaaggtggagagcacagtgggccctgcctgccctcctggcagaaccgtcaccaagagaccttgggccctggccgaagatacccctcgcggccccgacagccctccaaagcggcccagacccaacagcctgcccctgaccacaacattcagacctctgcctccacctccacagacaaccagcgccgtggaccccagcagccacagccctgtgaaccccccccgggaccagcacgccaccgacaccgccgacgagaaacctcgggccgcttctcctgctctgagcgacgcctctggacctcccacccctgacatccccctgtccccaggcggaacacacgccagagatcctgatgctgatcctgattctcctgacctggactccagcggctctgagacacctggaacaagcgagagcgccaccccggaatccaatatcagcggctctagctgcggcagccccaacagcgccgacaccagcagcgacttcaaggacctgtggaccaagctgaaggaatgccacgaccgggaagtgcagggactccaggtgaaggtcaccaaactcaagcaagaaagaatcctggacgcccagagactggaagaattcttcaccaagaaccagcagctgagagagcagcagaaagtgctgcacgagacaatcaaggttctggaagatagactgcgggccggcctgtgcgacagatgcgccgtgaccgaggaacacatgcgcaaaaagcagcaggagttcgagaacattagacagcaaaatctgaaattgatcacagagctgatgaacgagagaaacacactgcaggaggagaacaagaagctgagcgagcagctgcaacagaagatcgagaatgatcagcaacaccaggccgctgagctggaatgtgaagaggacgtgatccccgacagcccaatcacagctttcagcttttctggcgtgaacagactgaggcggaaggaaaacccccacgtgcggtacatcgagcagacccataccaagctggaacacagcgtgtgtgccaacgagatgagaaaggtgtccaagtcctccacccatccccagcacaaccctaacgaaaatgagatcctggtggctgatacctacgaccagtctcagagccctatggccaaggcccacggcaccagctcttatacccctgataagagctccttcaacctggccaccgtggtggccgagacactgggcctgggcgtgcaggaggaaagcgagacacagggcccaatgagccctctgggagatgagctgtaccactgcctggaaggcaaccacaagaaacagccttttgagtccggctccgagactcctggaacaagcgagagcgctacacctgagggcagctatgaacaacttgcaccacaaccgtgtgtgggagaaactttacattctagcctcccacgagacagtgaactgtttgtgcctgaagaggggagcagcgagaaggagagcgaggacgcgccaaaaacatctcctccgacgcctgggaaacatggtttggaacagactggggaggaaaaagtgatggtgactgttcctgacaaaaatccaccttgtccttgctgtggtacccgggtaaactctgtgttgaatctgattgaacatctgaaagtgtcacacgggaaaaggggggtttgttttcggtgtgcaaaatgtggaaaggaaaatagtaactatcacagtgttgtttgtcattttaagaaatgcaggggtccagagacggagaaagccccagctggggagtggatttgtgaggtatgcaacagagattttacaaccaaaattggcctgggacaacacaagagattggcacacccagcagtgagaaatcaggaaaggatcgttgcttcccaaccgaaagaaacatcaaatagaggtgctcacaaaaggtgctggacaaaggaggaggaagaattactaataagactggaggctcagttcgagggaaacaaaaatattaataagcttattgcagaacacataaccaccaaaacagctaagcagatcagtgacaaaaggcgattgctgtccagaaagccagcagaggagccacgtgaggagcctggaacgtgtcatcacaccaggagagcagctgcgagcctgagaacggagcctgagatgagtcatcacgcccaggcagaggacagagataatggacctgggagacgccctctgccaggcagggcagctgccggagggagaacaatggacgagataagacgccaccctgataagggcaacggacagcagagacccaccaagcaaaaatcagaagaacagctgcaggcttactataaaaagacactagaggaacgactttcagctggggcacttaacaccttcccccgagcattcaagcaggtaatggaaggccgggatataaagctagtaatcaatcagacagcgcaggactgcttcggatgcctggaatccataagccaaataagaacggcaacccgagataaaaaggacacggtgacccgggagaaacacccaaagaaaccttttcagaagtggatgaagaagagagcaatcaaaaaaggtaattatcttcggttccagcgtttattttatcttgatagagggaaactggctaaaatcattttagatgatattgaatgcttgtcttgtgacatccctcttagcgagatctacagcgttttcaagaccagatgggagaccaccggcagcttcaagagcctgggcgacttcaagacatacggcaaggccgacaacaccgccttcagagagctcatcaccgccaaggagatcgagaagaatgtgcaggagatgagcaagggctccgcgccagggcccgatggaattacattaggcgatgtggtgaagatggaccccgagttcagcagaaccatggagatcttcaacctgtggctcaccaccgggaagatccccgacatggttagaggctgcagaaccgttctcatccccaagagcagcaagcccgacagactgaaggacatcaacaactggagacccatcaccatcggcagcatcctgctgagactgttctccagaatcgtgaccgccagactgtccaaggcctgccctctgaaccctagacagagaggcttcatcagagctgccggctgcagcgagaacctgaagcttctgcagaccatcatctggagcgccaagagagagcacagacccctgggcgttgtgttcgtggacatcgccaaggctttcgacactgtgagccaccagcacatcatccacgccctgcaacagcgagaggtcgaccctcacatcgtgggccttgtgagcaacatgtacgagaacatcagcacctacatcaccaccaagagaaacacccacaccgacaagatccagatacgtgtgggcgtcaagcagggcgaccctatgagccctcttctgttcaacctcgccatggaccctctgctgtgcaagctggaggagtctggcaagggataccacagaggccagagctcgattactgccatggccttcgccgacgacctggtgcttctgagcgattcttgggagaacatgaacaccaacatctccatcctcgagaccttctgcaacctcaccggcctgaaaacccagggccaaaagtgccacggcttctacatcaagcccaccaaggacagctacaccatcaacgactgcgctgcctggaccatcaatggcacccctctcaacatgatcgaccccggcgagagcgagaagtacctgggcttacagttcgacccttggatcggcatcgccagaagcggccttagcacaaagttggacttctggctccagagaatcgaccaggcccccctgaagcctcttcagaaaaccgacatcctgaaaacctacacaatccccagactcatctacatcgccgaccacagcgaggtcaagagcgcactactcgaaacccttgaccagaagatccggacagcggtcaaggaatggcttcacctacctccgtgcacctgcgatgccatcctgtactcgagcacgagagacggcggtttgggcatcaccaaattggcaggactgatccccagcgtgcaggcccgtagactgcatcggatcgcacagtcatctgacgatacgatgaaatgcttcatggaaaaagagaaaatggaacagctgcataagaaattgtggattcaagctggaggggacagagagaacataccctcgatttgggaagcaccaccgtcgagtgaaccaccaaacaacgtgagcacaaattcggaatgggaagcaccgacccagaaagataaatttccaaagccttgcaattggaggaaaaacgaattcaaaaaatggaccaaattggcatcccaaggccgcggaattgtaaattttgaaagagacaaaattagtaaccattggatccaatactacagacgcatacctcacaggaaactcctcactgcactacaactcagggccaacgtttaccccacgagagaatttctagccaggggtagacaagaccaatacatcaaggcgtgtaggcactgcgatgcggacaacgaatcctgcgcccacatcatcggcaactgcccagtgacacaggacgcccgaatcaagaggcacaattacatctgcgaactgcttctcgaggaggcgaagaagaaggactgggtagtgttcaaggaaccgcacataagggattccaacaaggaactgtacaaacctgacctgatatttgtgaaggatgggcgtgcacttgtcgtggatgtgacagtacggtatgaagcagccaaatcatcgctggaggaagccgctgcagagaaagtgagaaagtacaaacacctggaaacggaagtaagacatctcacgaatgcaaaggacgttacttttgtgggctttcccctaggagcgcgggggaaatggcaccaagataactttaaacttttgactgagcttggcctctccaaatcgaggcaagtgaaaatggcagagactttttccacagtagcgctcttttcatctgtggacattgtacatatgtttgccagtagggccagaaaatctatggttatgtgataataggctgccttctgcggggcttgccttctggccatgcccttcttctctcccttgcacctgtacctcttggtctttgaataaagcctgagtaggaaggaccggtaaaaaaaaaaaaaaaaaaaaaaaaaaaaaaacgttgactaaaaaaaaaaaaaaaaaaaaaaaaaaaaaaaaaaaaaaaaaaaaaaaaaaaaaaaaaaaaaaaaaaaaaa

SEQ ID NO: 11772 - DNA, 5144 bp, synthetic construct; identical to SEQ ID NO: 10629
  source 1..5144: mol_type = other DNA

SEQ ID NO: 11773 - DNA, 5407 bp, synthetic construct
  source 1..5407: mol_type = other DNA
ggtctagttacaactgggcatcgctgcagagatcgcacctcctcgtggtcccgctggtagcccttcgaagggtgactaagtcgatctctgccccaggtacggagccgttgggactcaccagtccaacgtaactcctgcctaaattcggtgaaacaaattcctcggtaaaaagccccatgggaactgcactaacaccgctcctgacgaagttcgccacgcgctacgagatgggtaccacgcctgaagaagtggcgaacacgctcaagcagacctgtttcaagggccaggtcaatgattcgcagatggtcgccctgctgatcgtggcagaccagtacaagcttaaccccttcaccaaggagttgtacgcattccccgacaagaacaacggcatcgtgccggttgttggtgtggatggctgggctcggatcatcaacgagaacccacagttcgatggcatggaattctcaatggaccagcagggaaccgaatgcacctgcaagatctatcggaaggaccgcagccatgccatcagcgcgactgagtacatggccgagtgcaagcggaacacccagccttggcagtcccatccgcgccggatgcttcgccacaaggcaatgatccagtgcgcacgcctcgcgttcgggttcgccggcatatacgaccaggacgaggccgagcggatcgttgaacgagacgtcactcccgcagagcagtacgaggacgtcagcgaggcgatctgcctgatcaaggactccccaacaatggaggacttgcaggcagcattcagcaatgcctggaaagcctataagacaaagggcgcgcgcgaccagcttacggcggccaaggaccagcggaagaaagaattgctggacgcccctatagacgttgaattcgaggagaccggcgatgatcgagcagcgtctggaggatctagcggaggatcctctggcagcgagacaccaggaacaagcgagtcagcaacaccagagagcagtggcggcagcagcggcggcagcagcatggcttcttgcccgaaacctggccccccggtttcagcaggggcaatgagtttggaaagtggactgaccacccactccgttctcgccatcgaacgtggtcccaattcgttggcaaattccggatcagactttgggggggggggtctggggctaccgttacgcctattgagggtatcggtcggcactcagacctcccgctccgactgggtagacctggtgtcctggagccacccaggacccacgtctaagtcccagcaggttgacctggtgtctttatttcctaaacaccgggttgacctgttatccaaaaacgaccaggtagacctggtggctcaatttttaccatctaaatttccccccaatttggcagaaaatgatttggctttgctggtgaacttagagttctacagatcggatttgcatgtgtatgagtgtgttcataaggctgcacattgggagggattaagtggtttgcctgaggtgtatgaacaacttgcaccacaaccgtgtgtgggagaaactttacattctagcctcccacgagacagtgaactgtttgtgcctgaagaggggagcagcgagaaggagagcgaggacgcgccaaaaacatctcctccgacgcctgggaaacatggtttggaacagactggggaggaaaaagtgatggtgactgttcctgacaaaaatccaccttgtccttgctgtggtacccgggtaaactctgtgttgaatctgattgaacatctgaaagtgtcacacgggaaaaggagggtttgttttcggtgtgcaaaatgtggaaaggaaaatagtaactatcacagtgttgtttgtcattttccaaaatgcaggggtccagagacggagaaagccccagctggggagtggatttgtgaggtatgcaacagagattttacaaccaaaattggcctgggacaacacaagagattggcacacccagcagtgagaaatcaggaaaggatcgttgcttcccaaccgaaagaaacatcaaatagaggtgctcacaaaaggtgctggacaaaggaggaggaagaattactaataagactggaggctcagttcgagggacacaaaaatattaataagcttattgcagaacacataaccaccaaaacagctaagcagatcagtgacaaaaggcgattgctgtccagaaagccagcagaggagccacgtatggagcctggaacgtgtcatcacaccaggagagcagctgcgagcctgagaacggagcctgagatgagtcatcacgcccaggcagaggacagagataatggacctgggagacgccctctgccaggcaggcccgctgccggagggagaacaatggacgagataagacgccaccctgataagggcaacggacagcagagacccaccaagcaaaaatcagaagaacagctgcaggcttactataaaaagacactagaggaacgactttcagctggggcacttaacaccttcccccgagcattcaagcaggtaatggaaggccgggatataaagctagtaatcaatcagacagcgcaggactgcttcggatgcctggaatccataagccaaataagaacggcaacccgagataaaaagtacacgggcacccgggagaaacacccaaagaggccttttcagaagtggatgaaggacagagcaatcaaaaaaggtaattatcttcggttccagcgtttattttatcttgatagagggaaactggctaaaatcattttagatgatattgaatgcttgtcttgtgacataccactcagtgaaatttattcggtttttaaaacaagatgggaaacaactggtagctttaaaagccttggggactttaaaacttacgggaaggctgacaacactgccttcagagaattaattacggctaaagaaattgagaaaaatgtgcaggaaatgagcaaaggctcggctcccggtccagacgggattactcttggggacgtcgtaaagatggatcccgagttttccctgaccatggagattttcaatttatggttaacaactggtaaaatcccggacatggtgagggggtgcagaaccgttttgattccaaaatcatcaaagccggatcgtttgaaagacattaataactggagacctatcacgatcggttccatcttgctgagactgttctccaggattgtaacagctaggctgagcaaagcgtgccccctgaacccaaggcaaagaggctttatcagagcggcgggatgctctgaaaacttaaaactcctgcaaactataatttggtcggccaaaagagaacacagaccactgggtgttgtattcgtggacatcgccaaggcttttgacaccgtaagccaccagcacatcattcatgctttgcagcaaagagaggtggatccccacatcgtcggtctggtgagcaatatgtacgagaacatcagtacgtatatcaccacaaagaggaacacacacacagacaaaatccagatccgggttggagtaaagcagggtgacccgatgtcgccccttttatttaacctggcaatggaccctctattatgcaagctggaagagagtggcaaaggataccaccgaggacagagcagcatcacagcgatggcatttgcagacgatctggttttgctgagcgactcctgggaaaatatgaatacaaatattagcatactggagaccttctgcaatctgaccggactcaaaacacaggggcaaaagtgccacggcttttacatcaagccgacaaaggactcttacaccatcaatgactgcgctgcctggactatcaacggcacacccctgaacatgatcgaccccggcgaatctgagaaatacctcggcctgcagtttgacccgtggattggaatagcaaggtccggtctctccacaaaactagatgagtggcttcagcggatcgatcaagcaccacttaaacctctgcagaaaactgatattctcaaaacatacaccatccctcggctgatctacatagctgaccactcagaagtgaaagccgcactactcgaaacccttgaccagaagatccggacagcggtcaaggaatggcttcacctacctccgtgcacctgcgatgccatcctgtactcgagcacgagagacggcggtttgggcatcaccaaattggcaggactgatccccagcgtgcaggcccgtagactgcatcggatcgcacagtcatctgacgatacgatgaaatgcttcatggaaaaagagaggatggaacagctgcataagaaattgtggattcaagctggaggggacagagagaacataccctcgatttgggaagcaccaccgtcgagtgaaccaccaaacaacgtgagcacaaattcggaatgggaagcaccgacccagaaacccaaatttccaaagccttgcaattggaggaaaaacgaattcaaaaaatggaccaaattggcatcccaaggccgcggaattgtaaattttgaaagagacaaaattagtaaccattggatccaatactacagacgcatacctcacaggaaactcctcactgcactacaactcagggccaacgtttaccccacgagagaatttctagccaggggtagacaagaccaatacatcaaggcgtgtaggcactgcgatgcggacattgaatcctgcgcccacatcatcggcaactgcccagtgacacaggacgcccgaatcaagaggcacaattacatctgcgaactgcttctcgaggaggcgaagaagaaggactgggtagtgttcaaggaaccgcacataagggattccaacaaggaactgtacaaacctgacctgatatttgtgaaggatggccgtgcacttgtcgtggatgtgacagtacggtatgaagcagccaaatcatcgctggaggaagccgctgcagagaaagtgagaaagtacaaacacctggaaacggaagtaagacatctcacgaatgcaaaggacgttacttttgtgggctttcccctaggagcgcgggggaaatggcaccaagataactttaaacttttgactgagcttggcctctccaaatcgaggcaagtgaaaatggcagagactttttccacagtagcgctcttttcatctgtggacattgtacatatgtttgccagtagggccagaaaatctatggttatgtgataataggctgccttctgcggggcttgccttctggccatgcccttcttctctcccttgcacctgtacctcttggtctttgaataaagcctgagtaggaaggaccggtaaaaaaaaaaaaaaaaaaaaaaaaaaaaaaacgttgactaaaaaaaaaaaaaaaaaaaaaaaaaaaaaaaaaaaaaaaaaaaaaaaaaaaaaaaaaaaaaaaaaaaaaa

SEQ ID NO: 11774 - DNA, 5407 bp, synthetic construct
  source 1..5407: mol_type = other DNA
ggtctagttacaactgggcatcgctgcagagatcgcacctcctcgtggtcccgctggtagcccttcgaagggtgactaagtcgatctctgccccaggtacggagccgttgggactcaccagtccaacgtaactcctgcctaaattcggtgaaacaaattcctcggtaaaaagccccatgggaactgcactaacaccgctcctgacgaagttcgccacgcgctacgagatgggtaccacgcctgaagaagtggcgaacacgctcaagcagacctgtttcaagggccaggtcaatgattcgcagatggtcgccctgctgatcgtggcagaccagtacaagcttaaccccttcaccaaggagttgtacgcattccccgacaagaacaacggcatcgtgccggttgttggtgtggatggctgggctcggatcatcaacgagaacccacagttcgatggcatggaattctcaatggaccagcagggaaccgaatgcacctgcaagatctatcggaaggaccgcagccatgccatcagcgcgactgagtacatggccgagtgcaagcggaacacccagccttggcagtcccatccgcgccggatgcttcgccacaaggcaatgatccagtgcgcacgcctcgcgttcgggttcgccggcatatacgaccaggacgaggccgagcggatcgttgaacgagacgtcactcccgcagagcagtacgaggacgtcagcgaggcgatctgcctgatcaaggactccccaacaatggaggacttgcaggcagcattcagcaatgcctggaaagcctataagacaaagggcgcgcgcgaccagcttacggcggccaaggaccagcggaagaaagaattgctggacgcccctatagacgttgaattcgaggagaccggcgatgatcgagcagcgtctggaggatctagcggaggatcctctggcagcgagacaccaggaacaagcgagtcagcaacaccagagagcagtggcggcagcagcggcggcagcagcatggcttcttgcccgaaacctggccccccggtttcagcaggggcaatgagtttggaaagtggactgaccacccactccgttctcgccatcgaacgtggtcccaattcgttggcaaattccggatcagactttgggggggggggtctggggctaccgttacgcctattgagggtatcggtcggcactcagacctcccgctccgactgggtagacctggtgtcctggagccacccaggacccacgtctaagtcccagcaggttgacctggtgtctttatttcctaaacaccgggttgacctgttatccaaaaacgaccaggtagacctggtggctcaatttttaccatctaaatttccccccaatttggcagaaaatgatttggctttgctggtgaacttagagttctacagatcggatttgcatgtgtatgagtgtgttcataaggctgcacattgggagggattaagtggtttgcctgaggtgtatgaacaacttgcaccacaaccgtgtgtgggagaaactttacattctagcctcccacgagacagtgaactgtttgtgcctgaagaggggagcagcgagaaggagagcgaggacgcgccaaaaacatctcctccgacgcctgggaaacatggtttggaacagactggggaggaaaaagtgatggtgactgttcctgacaaaaatccaccttgtccttgctgtggtacccgggtaaactctgtgttgaatctgattgaacatctgaaagtgtcacacgggaaaaggggggtttgttttcggtgtgcaaaatgtggaaaggaaaatagtaactatcacagtgttgtttgtcattttaagaaatgcaggggtccagagacggagaaagccccagctggggagtggatttgtgaggtatgcaacagagattttacaaccaaaattggcctgggacaacacaagagattggcacacccagcagtgagaaatcaggaaaggatcgttgcttcccaaccgaaagaaacatcaaatagaggtgctcacaaaaggtgctggacaaaggaggaggaagaattactaataagactggaggctcagttcgagggacacaaaaatattaataagcttattgcagaacacataaccaccaaaacagctaagcagatcagtgacaaaaggcgattgctgtccagaaagccagcagaggagccacgtgaggagcctggaacgtgtcatcacaccaggagagcagctgcgagcctgagaacggagcctgagatgagtcatcacgcccaggcagaggacagagataatggacctgggagacgccctctgccaggcagggcagctgccggagggagaacaatggacgagataagacgccaccctgataagggcaacggacagcagagacccaccaagcaaaaatcagaagaacagctgcaggcttactataaaaagacactagaggaacgactttcagctggggcacttaacaccttcccccgagcattcaagcaggtaatggaaggccgggatataaagctagtaatcaatcagacagcgcaggactgcttcggatgcctggaatccataagccaaataagaacggcaacccgagataaaaagtacacggtgacccgggagaaacacccaaagaggccttttcagaagtggatgaagaagagagcaatcaaaaaaggtaattatcttcggttccagcgtttattttatcttgatagagggaaactggctaaaatcattttagatgatattgaatgcttgtcttgtgacataccactcagtgaaatttattcggtttttaaaacaagatgggaaacaactggtagctttaaaagccttggggactttaaaacttacgggaaggctgacaacactgccttcagagaattaattacggctaaagaaattgagaaaaatgtgcaggaaatgagcaaaggctcggctcccggtccagacgggattactcttggggacgtcgtaaagatggatcccgagttttccctgaccatggagattttcaatttatggttaacaactggtaaaatcccggacatggtgagggggtgcagaaccgttttgattccaaaatcatcaaagccggatcgtttgaaagacattaataactggagacctatcacgatcggttccatcttgctgagactgttctccaggattgtaacagctaggctgagcaaagcgtgccccctgaacccaaggcaaagaggctttatcagagcggcgggatgctctgaaaacttaaaactcctgcaaactataatttggtcggccaaaagagaacacagaccactgggtgttgtattcgtggacatcgccaaggcttttgacaccgtaagccaccagcacatcattcatgctttgcagcaaagagaggtggatccccacatcgtcggtctggtgagcaatatgtacgagaacatcagtacgtatatcaccacaaagaggaacacacacacagacaaaatccagatccgggttggagtaaagcagggtgacccgatgtcgccccttttatttaacctggcaatggaccctctattatgcaagctggaagagagtggcaaaggataccaccgaggacagagcagcatcacagcgatggcatttgcagacgatctggttttgctgagcgactcctgggaaaatatgaatacaaatattagcatactggagaccttctgcaatctgaccggactcaaaacacaggggcaaaagtgccacggcttttacatcaagccgacaaaggactcttacaccatcaatgactgcgctgcctggactatcaacggcacacccctgaacatgatcgaccccggcgaatctgagaaatacctcggcctgcagtttgacccgtggattggaatagcaaggtccggtctctccacaaaactagatgagtggcttcagcggatcgatcaagcaccacttaaacctctgcagaaaactgatattctcaaaacatacaccatccctcggctgatctacatagctgaccactcagaagtgaaagccgcactactcgaaacccttgaccagaagatccggacagcggtcaaggaatggcttcacctacctccgtgcacctgcgatgccatcctgtactcgagcacgagagacggcggtttgggcatcaccaaattggcaggactgatccccagcgtgcaggcccgtagactgcatcggatcgcacagtcatctgacgatacgatgaaatgcttcatggaaaaagagaggatggaacagctgcataagaaattgtggattcaagctggaggggacagagagaacataccctcgatttgggaagcaccaccgtcgagtgaaccaccaaacaacgtgagcacaaattcggaatgggaagcaccgacccagaaacccaaatttccaaagccttgcaattggaggaaaaacgaattcaaaaaatggaccaaattggcatcccaaggccgcggaattgtaaattttgaaagagacaaaattagtaaccattggatccaatactacagacgcatacctcacaggaaactcctcactgcactacaactcagggccaacgtttaccccacgagagaatttctagccaggggtagacaagaccaatacatcaaggcgtgtaggcactgcgatgcggacattgaatcctgcgcccacatcatcggcaactgcccagtgacacaggacgcccgaatcaagaggcacaattacatctgcgaactgcttctcgaggaggcgaagaagaaggactgggtagtgttcaaggaaccgcacataagggattccaacaaggaactgtacaaacctgacctgatatttgtgaaggatgcccgtgcacttgtcgtggatgtgacagtacggtatgaagcagccaaatcatcgctggaggaagccgctgcagagaaagtgagaaagtacaaacacctggaaacggaagtaagacatctcacgaatgcaaaggacgttacttttgtgggctttcccctaggagcgcgggggaaatggcaccaagataactttaaacttttgactgagcttggcctctccaaatcgaggcaagtgaaaatggcagagactttttccacagtagcgctcttttcatctgtggacattgtacatatgtttgccagtagggccagaaaatctatggttatgtgataataggctgccttctgcggggcttgccttctggccatgcccttcttctctcccttgcacctgtacctcttggtctttgaataaagcctgagtaggaaggaccggtaaaaaaaaaaaaaaaaaaaaaaaaaaaaaaacgttgactaaaaaaaaaaaaaaaaaaaaaaaaaaaaaaaaaaaaaaaaaaaaaaaaaaaaaaaaaaaaaaaaaaaaaa

SEQ ID NO: 11775 - DNA, 4439 bp, synthetic construct
  source 1..4439: mol_type = other DNA
gaaataagagagaaaagaagagtaagaagaaatataagagaattcgccaccatggcttcttgcccgaaacctggccccccggtttcagcaggggcaatgagtttggaaagtggactgaccacccactccgttctcgccatcgaacgtggtcccaattcgttggcaaattccggatcagactttgggggggggggtctggggctaccgttacgcctattgagggtatcggtcggcactcagacctcccgctccgactgggtagacctggtgtcctggagccacccaggacccacgtctaagtcccagcaggttgacctggtgtctttatttcctaaacaccgggttgacctgttatccaaaaacgaccaggtagacctggtggctcaatttttaccatctaaatttccccccaatttggcagaaaatgatttggctttgctggtgaacttagagttctacagatcggatttgcatgtgtatgagggcgttcataaggctgcacattgggagggattaagtggtttgcctgaggtgtatgaacaacttgcaccacaaccgtgtgtgggagaaactttacattctagcctcccacgagacagtgaactgtttgtgcctgaagaggggagcagcgagaaggagagcgaggacgcgccaaaaacatctcctccgacgcctgggaaacatggtttgagacagactggggaggaaaaagtgatggtgactgttcctgacaaaaatccaccttgtccttgctgtggtacccgggtaaactctgtgttgaatctgattgaacatctgaaagtgtcacacgggaaaaggggggtttgttttcggtgtgcaaaatgtggaaaggaaaatagtaactatcacagtgttgtttgtcattttaagaaatgcaggggtccagagacggagaaagccccagctggggagtggatttgtgaggtatgcaacagagattttacaaccaaaattggcctgggacaacacaagagattggcacacccagcagtgagaaatcaggaaaggatcgttgcttcccaaccgaaagaaacatcaaatagaggtgctcacaaaaggtgctggacaaaggaggaggaagaattactaataagactggaggctcagttcgagggaaacaaaaatattaataagcttattgcagaacacataaccaccaaaacagctaagcagatcagtgacaaaaggcgattgctgtccagaaagccagcagaggagccacgtatggagcctggaacgtgtcatcacaccaggagagcagctgcgagcctgagaacggagcctgagatgagtcatcacgcccaggcagaggacagagataatggacctgggagacgccctctgccaggcagggcagctgccggagggagaacaatggacgagataagacgccaccctgataagggcaacggacagcagagacccaccaagcaaaaatcagaagaacagctgcaggcttactataaaaagacactagaggaacgactttcagctggggcacttaacaccttcccccgagcattcaagcaggtaatggaaggccgggatataaagctagtaatcaatcagacagcgcaggactgcttcggatgcctggaatccataagccaaataagaacggcaacccgagataaaaagtacacggtgacccgggagaaacacccaaagaaaccttttcagaagtggatgaagaagagagcaatcaaaaaaggtaattatcttcggttccagcgtttattttatcttgatagagggaaactggctaaaatcattttagatgatattgaatgcttgtcttgtgacataccactcagtgaaatttattcggtttttaaaacaagatgggaaacaactggtagctttaaaagccttggggactttaaaacttacgggaaggctgacaacactgccttcagagaattaattacggctaaagaaattgagaaaaatgtgcaggaaatgagcaaaggctcggctcccggtccagacgggattactcttggggacgtcgtaaagatggatcccgagttttcccggaccatggagattttcaatttatggttaacaactggtaaaatcccggacatggtgagggggtgcagaaccgttttgattccaaaatcatcagacccggatcgtttgaaagacattaataactggagacctatcacgatcggttccatcttgctgagactgttctccaggattgtaacagctaggctgagcaaagcgtgccccctgaacccaaggcaaagaggctttatcagagcggcgggatgctctgaaaacttaaaactcctgcaaactataatttggtcggccaaaagagaacacagaccactgggtgttgtattcgtggacatcgccaaggcttttgacaccgtaagccaccagcacatcattcatgctttgcagcaaagagaggtggatccccacatcgtcggtctggtgagcaatatgtacgagaacatcagtacgtatatcaccacaaagaggaacacacacacagacaaaatccagatccgggttggagtaaagcagggtgacccgatgtcgccccttttatttaacctggcaatggaccctctattatgcaagctggaagagagtggcaaaggataccaccgaggacagagcagcatcacagcgatggcatttgcagacgatctggttttgctgagcgactcctgggaaaatatgaatacaaatattaagatactggagaccttctgcaatctgaccggactcaaaacacaggggcaaaagtgccacggcttttacatcaagccgacaaagaagtcttacaccatcaatgactgcgctgcctggactatcaacggcacacccctgaacatgatcgaccccggcgaatctgagaaatacctcggcctgcagtttgacccgtggattggaatagcaaggtccggtctctccacaaaactagatttttggcttcagcggatcgatcaagcaccacttaaacctctgcagaaactggatattctcaaaacatacaccatccctcggctgatctacatagctgaccactcagaagtgaaaagcgcactactcgaaacccttgaccagaagatccggacagcggtcaaggaatggcttcacctacctccgtgcacctgcgatgccatcctgtactcgagcacgagagacggcggtttgggcatcaccaaattggcaggactgatccccagcgtgcaggcccgtagactgcatcggatcgcacagtcatctgacgatacgatgaaatgcttcatggaaaaagagaaaatggaacagctgcataagaaattgtggattcaagctggaggggacagagagaacataccctcgatttgggaagcaccaccgtcgagtgaaccaccaaacaacgtgagcacaaattcggaatgggaagcaccgacccagaaagataaatttccaaagccttgcaattggaggaaaaacgaattcaaaaaatggaccaaattggcatcccaaggccgcggaattgtaaattttgaaagagacaaaattagtaaccattggatccaatactacagacgcatacctcacaggaaactcctcactgcactacaactcagggccaacgtttaccccacgagagaatttctagccaggggtagacaagaccaatacatcaaggcgtgtaggcactgcgatgcggacaacgaatcctgcgcccacatcatcggcaactgcccagtgacacaggacgcccgaatcaagaggcacaataagatctgcgaactgcttctcgaggaggcgaagaagaaggactgggtagtgttcaaggaaccgcacataagggattccaacaaggaactgtacaaacctgacctgatatttgtgaaggatgggcgtgcacttgtcgtggatgtgacagtacggtatgaagcagccaaatcatcgctggaggaagccgctgcagagaaagtgagaaagtacaaacacctggaaacggaagtaagacatctcacgaatgcaaaggacgttacttttgtgggctttcccctaggagcgcgggggaaatggcaccaagataactttaaacttttgactgagcttggcctctccaaatcgaggcaagtgaaaatggcagagactttttccacagtagcgctcttttcatctgtggacattgtacatatgtttgccagtagggccagaaaatctatggttatgtgataataggctgccttctgcggggcttgccttctggccatgcccttcttctctcccttgcacctgtacctcttggtctttgaataaagcctgagtaggaaggaccggtaaaaaaaaaaaaaaaaaaaaaaaaaaaaaaacgttgactaaaaaaaaaaaaaaaaaaaaaaaaaaaaaaaaaaaaaaaaaaaaaaaaaaaaaaaaaaaaaaaaaaaaaa

SEQ ID NO: 11776 - DNA, 4564 bp, synthetic construct
  source 1..4564: mol_type = other DNA
ggtctagttacaactgggcatcgctgcagagatcgcacctcctcgtggtcccgctggtagcccttcgaagggtgactaagtcgatctctgccccaggtacggagccgttgggactcaccagtccaacgtaactcctgcctaaattcggtgaaacaaattcctcggtaaaaagccccatggcttcttgcccgaaacctggccccccggtttcagcaggggcaatgagtttggaaagtggactgaccacccactccgttctcgccatcgaacgtggtcccaattcgttggcaaattccggatcagactttgggggggggggtctggggctaccgttacgcctattgagggtatcggtcggcactcagacctcccgctccgactgggtagacctggtgtcctggagccacccaggacccacgtctaagtcccagcaggttgacctggtgtctttatttcctaaacaccgggttgacctgttatccaaaaacgaccaggtagacctggtggctcaatttttaccatctaaatttccccccaatttggcagaaaatgatttggctttgctggtgaacttagagttctacagatcggatttgcatgtgtatgagggcgttcataaggctgcacattgggagggattaagtggtttgcctgaggtgtatgaacaacttgcaccacaaccgtgtgtgggagaaactttacattctagcctcccacgagacagtgaactgtttgtgcctgaagaggggagcagcgagaaggagagcgaggacgcgccaaaaacatctcctccgacgcctgggaaacatggtttggaacagactggggaggaaaaagtgatggtgactgttcctgacaaaaatccaccttgtccttgctgtggtacccgggtaaactctgtgttgaatctgattgaacatctgaaagtgtcacacgggaaaaggggggtttgttttcggtgtgcaaaatgtggaaaggaaaatagtaactatcacagtgttgtttgtcattttaagaaatgcaggggtccagagacggagaaagccccagctggggagtggatttgtgaggtatgcaacagagattttacaaccaaaattggcctgggacaacacaagagaagggcacacccagcagtgagaaatcaggaaaggatcgttgcttcccaaccgaaagaaacatcaaatagaggtgctcacaaaaggtgctggacaaaggaggaggaagaattactaataagactggaggctcagttcgagggaaacaaaaatattaataagcttattgcagaacacataaccaccaaaacagctaagcagatcagtgacaaaaggcgattgctgtccagaaagccagcagaggagccacgtgagatgcctggaacgtgtcatcacaccaggagagcagctgcgagcctgagaacggagcctgagatgagtcatcacgcccaggcagaggacagagataatggacctgggagacgccctctgccaggcagggcagctgccggagggagaacaatggacgagataagacgccaccctgataagggcaacggacagcagagacccaccaagcaaaaatcagaagaacagctgcaggcttactataaaaagacactagaggaacgactttcagctggggcacttaacaccttcccccgagcattcaagcaggtaatggaaggccgggatataaagctagtaatcaatcagacagcgcaggactacttcggatgcctggaatccataagccaaataagaacggcaacccgagataaaaaggacacggtgacccggaagaaacacccaaagaaaccttttcagaagtggatgaagaagagagcaatcaaaaaaggtaattatcttcggttccagcgtttatttcaccttgatagagggaaactggctaaaatcattttagatgatattgaatgcttgtcttgtgacataccactcagtgaaatttattcggtttttaaaacaagatgggaaacaactggtagctttaaaagccttggggactttaaaacttacgggaaggctgacaacactgccttcagagacttaattacggctaaagaaattgagaaaaatgtgcaggaaatgagcaaaggctcggctcccggtccagacgggattactcttggggacgtcgtaaagatggatcccgagggctcccggaccatggagattttcaatttatggttaacaactggtaaaatcccggacatggtgagggggtgcagaaccgttttgattccaaaatcatcagacccggatcgtttgaaagacattaataactggagacctatcacgatcggttccatcttgctgagactgttctccaggattgtaacagctaggctgagcaaagcgtgccccctgaacccaaggcaaagaggctttatcagagcggcgggatgctctgaaaacttaaaactcctgcaaactataatttggtcggccaaaagagaacacagaccactgggtgttgtattcgtggacatcgccaaggcttttgacaccgtaagccaccagcacatcattcatgctttgcagcaaagagaggtggatccccacatcgtcggtctggtgagcaatatgtacgagaacatcagtacgtatatcaccacaaagaggaacacacacacagacaaaatccagatccgggttggagtaaagcagggtgacccgatgtcgccccttttatttaacctggcaatggaccctctattatgcaagctggaagagagtggcaaaggataccaccgaggacagagcagcatcacagcgatggcatttgcagacgatctggttttgctgagcgactcctgggaaggcatgaatacaaatattagcatactggagaccttctgcaatctgaccggactcaaaacacaggggcaaaagtgccacggcttttacatcaagccgacaaagaagtcttacaccatcaatgactgcgctgcctggactatcaacggcacacccctgaacatgatcgaccccggcgaatctgagaaatacctcggcctgcagtttgacccgtggattggaatagcaaggtccggtctctccacaaaactagatttttggcttcagcggatcgatcaagcaccacttaaacctctgcagaaactggatattctcaaaacatacaccatccctcggctgatctacatagctgaccactcagaagtgaaaactgcactactcgaaacccttgaccagaagatccggacagcggtcaaggaatggcttcacctacctccgtgcacctgcgatgccatcctgtactcgagcacgagagacggcggtttgggcatcaccaaattggcaggactgatccccagcgtgcaggcccgtagactgcatcggatcgcacagtcatctgacgagacgatgaaatgcttcatggaaaaagagaaaatggaacagctgcataagaaattgtggattcaagctggaggggacagagagaacataccctcgatttgggaagcaccaccgtcgagtgaaccaccaaacaacgtgagcacaaattcggaatgggaagcaccgacccagaaagataaatttccaaagccttgcaattggaggaaaaacgaattcaaaaaatggaccaaattggcatcccaaggccgcggaattgtaaattttgaaagagacaaaattagtaaccattggatccaatactacagacgcatacctcacaggaaactcctcactgcactacaactcagggccaacgtttaccccacgagagaatttctagccaggggtagacaagaccaatacatcaaggcgtgtaggcactgcgatgcggacattgaatcctgcgcccacatcatcggcaactgcccagtgacacaggacgcccgaatcaagaggcacaataagatctgcgaactgcttctcgaggaggcgaagaagaaggactgggtagtgttcaaggaaccgcacataagggattccaacaaggaactgtacaaacctgacctgatatttgtgaaggatgcccgtgcacttgtcgtggatgtgacagtacggtatgaagcagccaaatcatcgctggaggaagccgctgcagagaaagtgagaaagtacaaacacctggaaacggaagtaagacatctcacgaatgcaaaggacgttacttttgtgggctttcccctaggagcgcgggggaaatggcaccaagataactttaaacttttgactgagcttggcctctccaaatcgaggcaagtgaaaatggcagagactttttccacagtagcgctcttttcatctgtggacattgtacatatgtttgccagtagggccagaaaatctatggttatgtgataataggctgccttctgcggggcttgccttctggccatgcccttcttctctcccttgcacctgtacctcttggtctttgaataaagcctgagtaggaaggaccggtaaaaaaaaaaaaaaaaaaaaaaaaaaaaaaacgttgactaaaaaaaaaaaaaaaaaaaaaaaaaaaaaaaaaaaaaaaaaaaaaaaaaaaaaaaaaaaaaaaaaaaaaa

SEQ ID NO: 11777 - DNA, 4564 bp, synthetic construct
  source 1..4564: mol_type = other DNA
ggtctagttacaactgggcatcgctgcagagatcgcacctcctcgtggtcccgctggtagcccttcgaagggtgactaagtcgatctctgccccaggtacggagccgttgggactcaccagtccaacgtaactcctgcctaaattcggtgaaacaaattcctcggtaaaaagccccatggcttcttgcccgaaacctggccccccggtttcagcaggggcaatgagtttggaaagtggactgaccacccactccgttctcgccatcgaacgtggtcccaattcgttggcaaattccggatcagactttgggggggggggtctggggctaccgttacgcctattgagggtatcggtcggcactcagacctcccgctccgactgggtagacctggtgtcctggagccacccaggacccacgtctaagtcccagcaggttgacctggtgtctttatttcctaaacaccgggttgacctgttatccaaaaacgaccaggtagacctggtggctcaatttttaccatctaaatttccccccaatttggcagaaaatgatttggctttgctggtgaacttagagttctacagatcggatttgcatgtgtatgagggcgttcataaggctgcacattgggagggattaagtggtttgcctgaggtgtatgaacaacttgcaccacaaccgtgtgtgggagaaactttacattctagcctcccacgagacagtgaactgtttgtgcctgaagaggggagcagcgagaaggagagcgaggacgcgccaaaaacatctcctccgacgcctgggaaacatggtaagaggcagactggggaggaaaaagtgatggtgactgttcctgacaaaaatccaccttgtccttgctgtggtacccgggtaaactctgtgttgaatctgattgaacatctgaaagtgtcacacgggaaaaggagggtttgttttcggtgtgcaaaatgtggaaaggaaaatagtaactatcacagtgttgtttgtcattttaagaaatgcaggggtccagagacggagaaagccccagctggggagtggatttgtgaggtatgcaacagagattttacaaccaaaattggcctgggacaacacaagagattggcacacccagcagtgagaaatcaggaaaggatcgttgcttcccaaccgaaagaaacatcaaatagaggtgctcacaaaaggtgctggacaaaggaggaggaagaattactaataagactggaggctcagttcgagggaaacaaaaatattaataagcttattgcagaacacataaccaccaaaacagctaagcagatcagtgacaaaaggcgattgctgtccagaaagccagcagaggagccacgtgaggagcctggaacgtgtcatcacaccaggagagcagctgcgagcctgagaacggagcctgagatgagtcatcacgcccaggcagaggacagagataatggacctgggagacgccctctgccaggcagggcagctgccggagggagaacaatggacgagataagacgccaccctgataagggcaacggacagcagagacccaccaagcaaaaatcagaagaacagctgcaggcttactataaaaagacactagaggaacgactttcagctggggcacttaacaccttcccccgagcattcaagcaggtaatggaaggccgggatataaagctagtaatcaatcagacagcgcaggactacttcggatgcctggaatccataagccaaataagaacggcaacccgagataaaaagtacacggtgacccggaagaaacacccaaagaaaccttttcagaagtggatgaagaagagagcaatcaaaaaaggtaattatcttcggttccagcgtttattttatcttgatagagggaaactggctaaaatcattttagatgatattgaatgcttgtcttgtgacataccactcagtgaaatttattcggtttttaaaacaagatgggaaacaactggtagctttaaaagccttggggactttaaaacttacgggaaggctgacaacactgccttcagagaattaattacggctaaagaaattgagaaaaatgtgcaggaaatgagcaaaggctcggctcccggtccagacgggattactcttggggacgtcgtaaagatggatcccgagggctcccggaccatggagattttcaatttatggttaacaactggtaaaatcccggacatggtgagggggtgcagaaccgttttgattccaaaatcatcagacccggatcgtttgaaagacattaataactggagacctatcacgatcggttccatcttgctgagactgttctccaggattgtaacagctaggctgagcaaagcgtgccccctgaacccaaggcaaagaggctttatcagagcggcgggatgctctgaaaacttaaaactcctgcaaactataatttggtcggccaaaagagaacacagaccactgggtgttgtattcgtggacatcgccaaggcttttgacaccgtaagccaccagcacatcattcatgctttgcagcaaagagaggtggatccccacatcgtcggtctggtgagcaatatgtacgagaacatcagtacgtatatcaccacaaagaggaacacacacacagacaaaatccagatccgggttggagtaaagcagggtgacccgatgtcgccccttttatttaacctggcaatggaccctctattatgcaagctggaagagagtggcaaaggataccaccgaggacagagcagcatcacagcgatggcatttgcagacgatctggttttgctgagcgactcctgggaaggcatgaatacaaatattagcatactggagaccttctgcaatctgaccggactcaaaacacaggggcaaaagtgccacggcttttacatcaagccgacaaagaagtcttacaccatcaatgactgcgctgcctggactatcaacggcacacccctgaacatgatcgaccccggcgaatctgagaaatacctcggcctgcagtttgacccgtggattggaatagcaaggtccggtctctccacaaaactagatttttggcttcagcggatcgatcaagcaccacttaaacctctgcagaaactggatattctcaaaacatacaccatccctcggctgatctacatagctgaccactcagaagtgaaaactgcactactcgaaacccttgaccagaagatccggacagcggtcaaggaatggcttcacctacctccgtgcacctgcgatgccatcctgtactcgagcacgagagacggcggtttgggcatcaccaaattggcaggactgatccccagcgtgcaggcccgtagactgcatcggatcgcacagtcatctgacgatacgatgaaatgcttcatggaaaaagagaaaatggaacagctgcataagaaattgtggattcaagctggaggggacagagagaacataccctcgatttgggaagcaccaccgtcgagtgaaccaccaaacaacgtgagcacaaattcggaatgggaagcaccgacccagaaagataaatttccaaagccttgcaattggaggaaaaacgaattcaaaaaatggaccaaattggcatcccaaggccgcggaattgtaaattttgaaagagacaaaattagtaaccattggatccaatactacagacgcatacctcacaggaaactcctcactgcactacaactcagggccaacgtttaccccacgagagaatttctagccaggggtagacaagaccaatacatcaaggcgtgtaggcactgcgatgcggacattgaatcctgcgcccacatcatcggcaactgcccagtgacacaggacgcccgaatcaagaggcacaataagatctgcgaactgcttctcgaggaggcgaagaagaaggactgggtagtgttcaaggaaccgcacataagggattccaacaaggaactgtacaaacctgacctgatatttgtgaaggatggccgtgcacttgtcgtggatgtgacagtacggtatgaagcagccaaatcatcgctggaggaagccgctgcagagaaagtgagaaagtacaaacacctggaaacggaagtaagacatctcacgaatgcaaaggacgttacttttgtgggctttcccctaggagcgcgggggaaatggcaccaagataactttaaacttttgactgagcttggcctctccaaatcgaggcaagtgaaaatggcagagactttttccacagtagcgctcttttcatctgtggacattgtacatatgtttgccagtagggccagaaaatctatggttatgtgataataggctgccttctgcggggcttgccttctggccatgcccttcttctctcccttgcacctgtacctcttggtctttgaataaagcctgagtaggaaggaccggtaaaaaaaaaaaaaaaaaaaaaaaaaaaaaaacgttgactaaaaaaaaaaaaaaaaaaaaaaaaaaaaaaaaaaaaaaaaaaaaaaaaaaaaaaaaaaaaaaaaaaaaaa

SEQ ID NO: 11778 - DNA, 4564 bp, synthetic construct
  source 1..4564: mol_type = other DNA
ggtctagttacaactgggcatcgctgcagagatcgcacctcctcgtggtcccgctggtagcccttcgaagggtgactaagtcgatctctgccccaggtacggagccgttgggactcaccagtccaacgtaactcctgcctaaattcggtgaaacaaattcctcggtaaaaagccccatggcttcttgcccgaaacctggccccccggtttcagcaggggcaatgagtttggaaagtggactgaccacccactccgttctcgccatcgaacgtggtcccaattcgttggcaaattccggatcagactttgggggggggggtctggggctaccgttacgcctattgagggtatcggtcggcactcagacctcccgctccgactgggtagacctggtgtcctggagccacccaggacccacgtctaagtcccagcaggttgacctggtgtctttatttcctaaacaccgggttgacctgttatccaaaaacgaccaggtagacctggtggctcaatttttaccatctaaatttccccccaatttggcagaaaatgatttggctttgctggtgaacttagagttctacagatcggatttgcatgtgtatgagtgtgttcataaggctgcacattgggagggattaagtggtttgcctgaggtgtatgaacaacttgcaccacaaccgtgtgtgggagaaactttacattctagcctcccacgagacagtgaactgtttgtgcctgaagaggggagcagcgagaaggagagcgaggacgcgccaaaaacatctcctccgacgcctgggaaacatggtttggaacagactggggaggaaaaagtgatggtgactgttcctgacaaaaatccaccttgtccttgctgtggtacccgggtaaactctgtgttgaatctgattgaacatctgaaagtgtcacacgggaaaaggagggtttgttttcggtgtgcaaaatgtggaaaggaaaatagtaactatcacagtgttgtttgtcattttccaaaatgcaggggtccagagacggagaaagccccagctggggagtggatttgtgaggtatgcaacagagattttacaaccaaaattggcctgggacaacacaagagattggcacacccagcagtgagaaatcaggaaaggatcgttgcttcccaaccgaaagaaacatcaaatagaggtgctcacaaaaggtgctggacaaaggaggaggaagaattactaataagactggaggctcagttcgagggacacaaaaatattaataagcttattgcagaacacataaccaccaaaacagctaagcagatcagtgacaaaaggcgattgctgtccagaaagccagcagaggagccacgtatggagcctggaacgtgtcatcacaccaggagagcagctgcgagcctgagaacggagcctgagatgagtcatcacgcccaggcagaggacagagataatggacctgggagacgccctctgccaggcaggcccgctgccggagggagaacaatggacgagataagacgccaccctgataagggcaacggacagcagagacccaccaagcaaaaatcagaagaacagctgcaggcttactataaaaagacactagaggaacgactttcagctggggcacttaacaccttcccccgagcattcaagcaggtaatggaaggccgggatataaagctagtaatcaatcagacagcgcaggactgcttcggatgcctggaatccataagccaaataagaacggcaacccgagataaaaagtacacggtgacccgggagaaacacccaaagaggccttttcagaagtggatgaaggacagagcaatcaaaaaaggtaattatcttcggttccagcgtttattttatcttgatagagggaaactggctaaaatcattttagatgatattgaatgcttgtcttgtgacataccactcagtgaaatttattcggtttttaaaacaagatgggaaacaactggtagctttaaaagccttggggactttaaaacttacgggaaggctgacaacactgccttcagagaattaattacggctaaagaaattgagaaaaatgtgcaggaaatgagcaaaggctcggctcccggtccagacgggattactcttggggacgtcgtaaagatggatcccgagttttccctgaccatggagattttcaatttatggttaacaactggtaaaatcccggacatggtgagggggtgcagaaccgttttgattccaaaatcatcaaagccggatcgtttgaaagacattaataactggagacctatcacgatcggttccatcttgctgagactgttctccaggattgtaacagctaggctgagcaaagcgtgccccctgaacccaaggcaaagaggctttatcagagcggcgggatgctctgaaaacttaaaactcctgcaaactataatttggtcggccaaaagagaacacagaccactgggtgttgtattcgtggacatcgccaaggcttttgacaccgtaagccaccagcacatcattcatgctttgcagcaaagagaggtggatccccacatcgtcggtctggtgagcaatatgtacgagaacatcagtacgtatatcaccacaaagaggaacacacacacagacaaaatccagatccgggttggagtaaagcagggtgacccgatgtcgccccttttatttaacctggcaatggaccctctattatgcaagctggaagagagtggcaaaggataccaccgaggacagagcagcatcacagcgatggcatttgcagacgatctggttttgctgagcgactcctgggaaaatatgaatacaaatattagcatactggagaccttctgcaatctgaccggactcaaaacacaggggcaaaagtgccacggcttttacatcaagccgacaaaggactcttacaccatcaatgactgcgctgcctggactatcaacggcacacccctgaacatgatcgaccccggcgaatctgagaaatacctcggcctgcagtttgacccgtggattggaatagcaaggtccggtctctccacaaaactagatgagtggcttcagcggatcgatcaagcaccacttaaacctctgcagaaaactgatattctcaaaacatacaccatccctcggctgatctacatagctgaccactcagaagtgaaagccgcactactcgaaacccttgaccagaagatccggacagcggtcaaggaatggcttcacctacctccgtgcacctgcgatgccatcctgtactcgagcacgagagacggcggtttgggcatcaccaaattggcaggactgatccccagcgtgcaggcccgtagactgcatcggatcgcacagtcatctgacgatacgatgaaatgcttcatggaaaaagagaggatggaacagctgcataagaaattgtggattcaagctggaggggacagagagaacataccctcgatttgggaagcaccaccgtcgagtgaaccaccaaacaacgtgagcacaaattcggaatgggaagcaccgacccagaaacccaaatttccaaagccttgcaattggaggaaaaacgaattcaaaaaatggaccaaattggcatcccaaggccgcggaattgtaaattttgaaagagacaaaattagtaaccattggatccaatactacagacgcatacctcacaggaaactcctcactgcactacaactcagggccaacgtttaccccacgagagaatttctagccaggggtagacaagaccaatacatcaaggcgtgtaggcactgcgatgcggacattgaatcctgcgcccacatcatcggcaactgcccagtgacacaggacgcccgaatcaagaggcacaattacatctgcgaactgcttctcgaggaggcgaagaagaaggactgggtagtgttcaaggaaccgcacataagggattccaacaaggaactgtacaaacctgacctgatatttgtgaaggatggccgtgcacttgtcgtggatgtgacagtacggtatgaagcagccaaatcatcgctggaggaagccgctgcagagaaagtgagaaagtacaaacacctggaaacggaagtaagacatctcacgaatgcaaaggacgttacttttgtgggctttcccctaggagcgcgggggaaatggcaccaagataactttaaacttttgactgagcttggcctctccaaatcgaggcaagtgaaaatggcagagactttttccacagtagcgctcttttcatctgtggacattgtacatatgtttgccagtagggccagaaaatctatggttatgtgataataggctgccttctgcggggcttgccttctggccatgcccttcttctctcccttgcacctgtacctcttggtctttgaataaagcctgagtaggaaggaccggtaaaaaaaaaaaaaaaaaaaaaaaaaaaaaaacgttgactaaaaaaaaaaaaaaaaaaaaaaaaaaaaaaaaaaaaaaaaaaaaaaaaaaaaaaaaaaaaaaaaaaaaaa

SEQ ID NO: 11779 - DNA, 6245 bp, synthetic construct
  source 1..6245: mol_type = other DNA
ggtctagttacaactgggcatcgctgcagagatcgcacctcctcgtggtcccgctggtagcccttcgaagggtgactaagtcgatctctgccccaggtacggagccgttgggactcaccagtccaacgtaactcctgcctaaattcggtgaaacaaattcctcggtaaaaagccccatggcttcttgcccgaaacctggccccccggtttcagcaggggcaatgagtttggaaagtggactgaccacccactccgttctcgccatcgaacgtggtcccaattcgttggcaaattccggatcagactttgggggggggggtctggggctaccgttacgcctattgagggtatcggtcggcactcagacctcccgctccgactgggtagacctggtgtcctggagccacccaggacccacgtctaagtcccagcaggttgacctggtgtctttatttcctaaacaccgggttgacctgttatccaaaaacgaccaggtagacctggtggctcaatttttaccatctaaatttccccccaatttggcagaaaatgatttggctttgctggtgaacttagagttctacagatcggatttgcatgtgtatgagtgtgttcataaggctgcacattgggagggattaagtggtttgcctgaggtgtatgaacaacttgcaccacaaccgtgtgtgggagaaactttacattctagcctcccacgagacagtgaactgtttgtgcctgaagaggggagcagcgagaaggagagcgaggacgcgccaaaaacatctcctccgacgcctgggaaacatggtttggaacagactggggaggaaaaagtgatggtgactgttcctgacaaaaatccaccttgtccttgctgtggtacccgggtaaactctgtgttgaatctgattgaacatctgaaagtgtcacacgggaaaaggggggtttgttttcggtgtgcaaaatgtggaaaggaaaatagtaactatcacagtgttgtttgtcattttaagaaatgcaggggtccagagacggagaaagccccagctggggagtggatttgtgaggtatgcaacagagattttacaaccaaaattggcctgggacaacacaagagattggcacacccagcagtgagaaatcaggaaaggatcgttgcttcccaaccgaaagaaacatcaaatagaggtgctcacaaaaggtgctggacaaaggaggaggaagaattactaataagactggaggctcagttcgagggaaacaaaaatattaataagcttattgcagaacacataaccaccaaaacagctaagcagatcagtgacaaaaggcgattgctgtccagaaagccagcagaggagccacgtgaggagcctggaacgtgtcatcacaccaggagagcagctgcgagcctgagaacggagcctgagatgagtcatcacgcccaggcagaggacagagataatggacctgggagacgccctctgccaggcagggcagctgccggagggagaacaatggacgagataagacgccaccctgataagggcaacggacagcagagacccaccaagcaaaaatcagaagaacagctgcaggcttactataaaaagacactagaggaacgactttcagctggggcacttaacaccttcccccgagcattcaagcaggtaatggaaggccgggatataaagctagtaatcaatcagacagcgcaggactgcttcggatgcctggaatccataagccaaataagaacggcaacccgagataaaaaggacacggtgacccgggagaaacacccaaagaaaccttttcagaagtggatgaagaagagagcaatcaaaaaaggtaattatcttcggttccagcgtttattttatcttgatagagggaaactggctaaaatcattttagatgatattgaatgcttgtcttgtgacataccactcagtgaaatttattcggtttttaaaacaagatgggaaacaactggtagctttaaaagccttggggactttaaaacttacgggaaggctgacaacactgccttcagagaattaattacggctaaagaaattgagaaaaatgtgcaggaaatgagcaaaggctcggctcccggtccagacgggattactcttggggacgtcgtaaagatggatcccgagttttcccggaccatggagattttcaatttatggttaacaactggtaaaatcccggacatggtgagggggtgcagaaccgttttgattatcctggacaccgactacatcaccgaggacggcaagcccgtgatcaggatcttcaagaaggagaacggcgagttcaagatcgagtacgacaggaccttcgagccctacctgtacgccctgctgaaggacgacagcgccatcgaggaggtgaagaagatcaccgccgagaggcacggcaccgtggtgaccgtgaagagggtggagaaggtgcagaagaagttcctgggcaggcccgtggaggtgtggaagctgtacttcacccacccccaggacgtgcccgccatcatggacaagatcagggagcaccccgccgtgatcgacatctacgagtacgacatccccttcgccatcaggtacctgatcgacaagggcctggtgcccatggagggcgacgaggagctgaagctgctggccttcgacatcgagaccctgtaccacgagggcgaggagttcgccgagggccccatcctgatgatcagctacgccgacgaggagggcgccagggtgatcacctggaagaacgtggacctgccctacgtggacgtggtgagcaccgagagggagatgatcaagaggttcctgagggtggtgaaggagaaggaccccgacgtgctgatcacctacaacggcgacaacttcgacttcgcctacctgaagaagaggtgcgagaagctgggcatcaacttcgccctgggcagggacggcagcgagcccaagatccagaggatgggcgacaggttcgccgtggaggtgaagggcaggatccacttcgacctgtaccccgtgatcaggaggaccatcaacctgcccacctacaccctggaggccgtgtacgaggccgtgttcggccagcccaaggagaaggtgtacgccgaggagatcaccaccgcctgggagaccggcgagaacctggagagggtggccaggtacagcatggaggacgccaaggtgacctacgagctgggcaaggagttcctgcccatggaggcccagctgagcaggctgatcggccagagcctgtgggacgtgagcaggagcagcaccggcaacctggtggagtggttcctgctgaggaaggcctacgagaggaacgagctggcccccaacaagcccgacgagaaggagctggccaggaggcaccagagccacgagggcggctacatcaaggagcccgagaggggcctgtgggagaacatcgtgtacctggacttcaggagcctgtaccccagcatcatcatcacccacaacgtgagccccgacaccctgaacagggagggctgcaaggagtacgacgtggccccccaggtgggccacaggttctgcaaggacttccccggcttcatccccagcctgctgggcgacctgctggaggagaggcagaagatcaagaagaggatgaaggccaccatcgaccccatcgagaggaagctgctggactacaggcagagggccatcaagatcctggccaacagcctgtacggctactacggctacgccagggccaggtggtactgcaaggagtgcgccgagagcgtgatcgcctggggcagggagtacctgaccatgaccatcaaggagatcgaggagaagtacggcttcaaggtgatctacagcgacaccgacggcttcttcgccaccatccccggcgccgacgccgagaccgtgaagaagaaggccatggagttcctgaagtacatcaacgccaagctgcccggcgccctggagctggagtacgagggcttctacaagaggggcctgttcgtgaccaagaagaagtacgccgtgatcgacgaggagggcaagatcaccaccaggggcctggagatcgtgaggagggactggagcgagatcgccaaggagacccaggccagggtgctggaggccctgctgaaggacggcgacgtggagaaggccgtgaggatcgtgaaggaggtgaccgagaagctgagcaagtacgaggtgccccccgagaagctggtgatccacaagcagatcaccagggacctgaaggactacaaggccaccggcccccacgtggccgtggccaagaggctggccgccaggggcgtgaagatcaggcccggcaccgtgatcagctacatcgtgctgaagggcagcggcaggatcgtggacagggccatccccttcgacgagttcgaccccaccaagcacaagtacgacgccgagtactacatcgagaagcaggtgctgcccgccgtggagaggatcctgagggccttcggctacaggaaggaggacctgaggtaccagaaaaccaggcaggtgggcctgagcgccaggctgaagcccaagggcacccagtttgacccgtggattggaatagcaaggtccggtctctccacaaaactagatttttggcttcagcggatcgatcaagcaccacttaaacctctgcagaaaactgatattctcaaaacatacaccatccctcggctgatctacatagctgaccactcagaagtgaaaagcgcactactcgaaacccttgaccagaagatccggacagcggtcaaggaatggcttcacctacctccgtgcacctgcgatgccatcctgtactcgagcacgagagacggcggtttgggcatcaccaaattggcaggactgatccccagcgtgcaggcccgtagactgcatcggatcgcacagtcatctgacgatacgatgaaatgcttcatggaaaaagagaaaatggaacagctgcataagaaattgtggattcaagctggaggggacagagagaacataccctcgatttgggaagcaccaccgtcgagtgaaccaccaaacaacgtgagcacaaattcggaatgggaagcaccgacccagaaagataaatttccaaagccttgcaattggaggaaaaacgaattcaaaaaatggaccaaattggcatcccaaggccgcggaattgtaaattttgaaagagacaaaattagtaaccattggatccaatactacagacgcatacctcacaggaaactcctcactgcactacaactcagggccaacgtttaccccacgagagaatttctagccaggggtagacaagaccaatacatcaaggcgtgtaggcactgcgatgcggacaacgaatcctgcgcccacatcatcggcaactgcccagtgacacaggacgcccgaatcaagaggcacaattacatctgcgaactgcttctcgaggaggcgaagaagaaggactgggtagtgttcaaggaaccgcacataagggattccaacaaggaactgtacaaacctgacctgatatttgtgaaggatgcccgtgcacttgtcgtggatgtgacagtacggtatgaagcagccaaatcatcgctggaggaagccgctgcagagaaagtgagaaagtacaaacacctggaaacggaagtaagacatctcacgaatgcaaaggacgttacttttgtgggctttcccctaggagcgcgggggaaatggcaccaagataactttaaacttttgactgagcttggcctctccaaatcgaggcaagtgaaaatggcagagactttttccacagtagcgctcttttcatctgtggacattgtacatatgtttgccagtagggccagaaaatctatggttatgtgataataggctgccttctgcggggcttgccttctggccatgcccttcttctctcccttgcacctgtacctcttggtctttgaataaagcctgagtaggaaggaccggtagacatgataagatacattgatgagtttggacaaaccacaactagaatgcagtgaaaaaaatgctttatttgtgaaatttgtgatgctattgctttatttgtaaccattataagctgcaataaacaagttaacaacaacaaaaaaaaaaaaaaaaaaaaaaaaaaaaaaacgttgactaaaaaaaaaaaaaaaaaaaaaaaaaaaaaaaaaaaaaaaaaaaaaaaaaaaaaaaaaaaaaaaaaaaaaa

SEQ ID NO: 11780 - DNA, 6725 bp, synthetic construct
  source 1..6725: mol_type = other DNA
ggtctagttacaactgggcatcgctgcagagatcgcacctcctcgtggtcccgctggtagcccttcgaagggtgactaagtcgatctctgccccaggtacggagccgttgggactcaccagtccaacgtaactcctgcctaaattcggtgaaacaaattcctcggtaaaaagccccatggcccctaagaaaaagcggaaggtgaatatcagcggctctagctgcggcagccccaacagcgccgacaccagcagcgacttcaaggacctgtggaccaagctgaaggaatgccacgaccgggaagtgcagggactccaggtgaaggtcaccaaactcaagcaagaaagaatcctggacgcccagagactggaagaattcttcaccaagaaccagcagctgagagagcagcagaaagtgctgcacgagacaatcaaggttctggaagatagactgcgggccggcctgtgcgacagatgcgccgtgaccgaggaacacatgcgcaaaaagcagcaggagttcgagaacattagacagcaaaatctgaaattgatcacagagctgatgaacgagagaaacacactgcaggaggagaacaagaagctgagcgagcagctgcaacagaagatcgagaatgatcagcaacaccaggccgctgagctggaatgtgaagaggacgtgatccccgacagcccaatcacagctttcagcttttctggcgtgaacagactgaggcggaaggaaaacccccacgtgcggtacatcgagcagacccataccaagctggaacacagcgtgtgtgccaacgagatgagaaaggtgtccaagtcctccacccatccccagcacaaccctaacgaaaatgagatcctggtggctgatacctacgaccagtctcagagccctatggccaaggcccacggcaccagctcttatacccctgataagagctccttcaacctggccaccgtggtggccgagacactgggcctgggcgtgcaggaggaaagcgagacacagggcccaatgagccctctgggagatgagctgtaccactgcctggaaggcaaccacaagaaacagccttttgagtccggctccgagactcctggaacaagcgagagcgctacacctgagggcagctatgaacaacttgcaccacaaccgtgtgtgggagaaactttacattctagcctcccacgagacagtgaactgtttgtgcctgaagaggggagcagcgagaaggagagcgaggacgcgccaaaaacatctcctccgacgcctgggaaacatggtttggaacagactggggaggaaaaagtgatggtgactgttcctgacaaaaatccaccttgtccttgctgtggtacccgggtaaactctgtgttgaatctgattgaacatctgaaagtgtcacacgggaaaaggggggtttgttttcggtgtgcaaaatgtggaaaggaaaatagtaactatcacagtgttgtttgtcattttaagaaatgcaggggtccagagacggagaaagccccagctggggagtggatttgtgaggtatgcaacagagattttacaaccaaaattggcctgggacaacacaagagattggcacacccagcagtgagaaatcaggaaaggatcgttgcttcccaaccgaaagaaacatcaaatagaggtgctcacaaaaggtgctggacaaaggaggaggaagaattactaataagactggaggctcagttcgagggaaacaaaaatattaataagcttattgcagaacacataaccaccaaaacagctaagcagatcagtgacaaaaggcgattgctgtccagaaagccagcagaggagccacgtgaggagcctggaacgtgtcatcacaccaggagagcagctgcgagcctgagaacggagcctgagatgagtcatcacgcccaggcagaggacagagataatggacctgggagacgccctctgccaggcagggcagctgccggagggagaacaatggacgagataagacgccaccctgataagggcaacggacagcagagacccaccaagcaaaaatcagaagaacagctgcaggcttactataaaaagacactagaggaacgactttcagctggggcacttaacaccttcccccgagcattcaagcaggtaatggaaggccgggatataaagctagtaatcaatcagacagcgcaggactgcttcggatgcctggaatccataagccaaataagaacggcaacccgagataaaaaggacacggtgacccgggagaaacacccaaagaaaccttttcagaagtggatgaagaagagagcaatcaaaaaaggtaattatcttcggttccagcgtttattttatcttgatagagggaaactggctaaaatcattttagatgatattgaatgcttgtcttgtgacataccactcagtgaaatttattcggtttttaaaacaagatgggaaacaactggtagctttaaaagccttggggactttaaaacttacgggaaggctgacaacactgccttcagagaattaattacggctaaagaaattgagaaaaatgtgcaggaaatgagcaaaggctcggctcccggtccagacgggattactcttggggacgtcgtaaagatggatcccgagttttcccggaccatggagattttcaatttatggttaacaactggtaaaatcccggacatggtgagggggtgcagaaccgttttgattatcctggacaccgactacatcaccgaggacggcaagcccgtgatcaggatcttcaagaaggagaacggcgagttcaagatcgagtacgacaggaccttcgagccctacctgtacgccctgctgaaggacgacagcgccatcgaggaggtgaagaagatcaccgccgagaggcacggcaccgtggtgaccgtgaagagggtggagaaggtgcagaagaagttcctgggcaggcccgtggaggtgtggaagctgtacttcacccacccccaggacgtgcccgccatcatggacaagatcagggagcaccccgccgtgatcgacatctacgagtacgacatccccttcgccatcaggtacctgatcgacaagggcctggtgcccatggagggcgacgaggagctgaagctgctggccttcgacatcgagaccctgtaccacgagggcgaggagttcgccgagggccccatcctgatgatcagctacgccgacgaggagggcgccagggtgatcacctggaagaacgtggacctgccctacgtggacgtggtgagcaccgagagggagatgatcaagaggttcctgagggtggtgaaggagaaggaccccgacgtgctgatcacctacaacggcgacaacttcgacttcgcctacctgaagaagaggtgcgagaagctgggcatcaacttcgccctgggcagggacggcagcgagcccaagatccagaggatgggcgacaggttcgccgtggaggtgaagggcaggatccacttcgacctgtaccccgtgatcaggaggaccatcaacctgcccacctacaccctggaggccgtgtacgaggccgtgttcggccagcccaaggagaaggtgtacgccgaggagatcaccaccgcctgggagaccggcgagaacctggagagggtggccaggtacagcatggaggacgccaaggtgacctacgagctgggcaaggagttcctgcccatggaggcccagctgagcaggctgatcggccagagcctgtgggacgtgagcaggagcagcaccggcaacctggtggagtggttcctgctgaggaaggcctacgagaggaacgagctggcccccaacaagcccgacgagaaggagctggccaggaggcaccagagccacgagggcggctacatcaaggagcccgagaggggcctgtgggagaacatcgtgtacctggacttcaggagcctgtaccccagcatcatcatcacccacaacgtgagccccgacaccctgaacagggagggctgcaaggagtacgacgtggccccccaggtgggccacaggttctgcaaggacttccccggcttcatccccagcctgctgggcgacctgctggaggagaggcagaagatcaagaagaggatgaaggccaccatcgaccccatcgagaggaagctgctggactacaggcagagggccatcaagatcctggccaacagcctgtacggctactacggctacgccagggccaggtggtactgcaaggagtgcgccgagagcgtgatcgcctggggcagggagtacctgaccatgaccatcaaggagatcgaggagaagtacggcttcaaggtgatctacagcgacaccgacggcttcttcgccaccatccccggcgccgacgccgagaccgtgaagaagaaggccatggagttcctgaagtacatcaacgccaagctgcccggcgccctggagctggagtacgagggcttctacaagaggggcctgttcgtgaccaagaagaagtacgccgtgatcgacgaggagggcaagatcaccaccaggggcctggagatcgtgaggagggactggagcgagatcgccaaggagacccaggccagggtgctggaggccctgctgaaggacggcgacgtggagaaggccgtgaggatcgtgaaggaggtgaccgagaagctgagcaagtacgaggtgccccccgagaagctggtgatccacaagcagatcaccagggacctgaaggactacaaggccaccggcccccacgtggccgtggccaagaggctggccgccaggggcgtgaagatcaggcccggcaccgtgatcagctacatcgtgctgaagggcagcggcaggatcgtggacagggccatccccttcgacgagttcgaccccaccaagcacaagtacgacgccgagtactacatcgagaagcaggtgctgcccgccgtggagaggatcctgagggccttcggctacaggaaggaggacctgaggtaccagaaaaccaggcaggtgggcctgagcgccaggctgaagcccaagggcacccagtttgacccgtggattggaatagcaaggtccggtctctccacaaaactagatttttggcttcagcggatcgatcaagcaccacttaaacctctgcagaaaactgatattctcaaaacatacaccatccctcggctgatctacatagctgaccactcagaagtgaaaagcgcactactcgaaacccttgaccagaagatccggacagcggtcaaggaatggcttcacctacctccgtgcacctgcgatgccatcctgtactcgagcacgagagacggcggtttgggcatcaccaaattggcaggactgatccccagcgtgcaggcccgtagactgcatcggatcgcacagtcatctgacgatacgatgaaatgcttcatggaaaaagagaaaatggaacagctgcataagaaattgtggattcaagctggaggggacagagagaacataccctcgatttgggaagcaccaccgtcgagtgaaccaccaaacaacgtgagcacaaattcggaatgggaagcaccgacccagaaagataaatttccaaagccttgcaattggaggaaaaacgaattcaaaaaatggaccaaattggcatcccaaggccgcggaattgtaaattttgaaagagacaaaattagtaaccattggatccaatactacagacgcatacctcacaggaaactcctcactgcactacaactcagggccaacgtttaccccacgagagaatttctagccaggggtagacaagaccaatacatcaaggcgtgtaggcactgcgatgcggacaacgaatcctgcgcccacatcatcggcaactgcccagtgacacaggacgcccgaatcaagaggcacaattacatctgcgaactgcttctcgaggaggcgaagaagaaggactgggtagtgttcaaggaaccgcacataagggattccaacaaggaactgtacaaacctgacctgatatttgtgaaggatgcccgtgcacttgtcgtggatgtgacagtacggtatgaagcagccaaatcatcgctggaggaagccgctgcagagaaagtgagaaagtacaaacacctggaaacggaagtaagacatctcacgaatgcaaaggacgttacttttgtgggctttcccctaggagcgcgggggaaatggcaccaagataactttaaacttttgactgagcttggcctctccaaatcgaggcaagtgaaaatggcagagactttttccacagtagcgctcttttcatctgtggacattgtacatatgtttgccagtagggccagaaaatctatggttatgtgataataggctgccttctgcggggcttgccttctggccatgcccttcttctctcccttgcacctgtacctcttggtctttgaataaagcctgagtaggaaggaccggtagacatgataagatacattgatgagtttggacaaaccacaactagaatgcagtgaaaaaaatgctttatttgtgaaatttgtgatgctattgctttatttgtaaccattataagctgcaataaacaagttaacaacaacaaaaaaaaaaaaaaaaaaaaaaaaaaaaaaacgttgactaaaaaaaaaaaaaaaaaaaaaaaaaaaaaaaaaaaaaaaaaaaaaaaaaaaaaaaaaaaaaaaaaaaaaa

SEQ ID NO: 11781 - DNA, 4439 bp, synthetic construct
  source 1..4439: mol_type = other DNA
gaaataagagagaaaagaagagtaagaagaaatataagagaattcgccaccatggcttcttgcccgaaacctggccccccggtttcagcaggggcaatgagtttggaaagtggactgaccacccactccgttctcgccatcgaacgtggtcccaattcgttggcaaattccggatcagactttgggggggggggtctggggctaccgttacgcctattgagggtatcggtcggcactcagacctcccgctccgactgggtagacctggtgtcctggagccacccaggacccacgtctaagtcccagcaggttgacctggtgtctttatttcctaaacaccgggttgacctgttatccaaaaacgaccaggtagacctggtggctcaatttttaccatctaaatttccccccaatttggcagaaaatgatttggctttgctggtgaacttagagttctacagatcggatttgcatgtgtatgagtgtgttcataaggctgcacattgggagggattaagtggtttgcctgaggtgtatgaacaacttgcaccacaaccgtgtgtgggagaaactttacattctagcctcccacgagacagtgaactgtttgtgcctgaagaggggagcagcgagaaggagagcgaggacgcgccaaaaacatctcctccgacgcctgggaaacatggtttggaacagactggggaggaaaaagtgatggtgactgttcctgacaaaaatccaccttgtccttgctgtggtacccgggtaaactctgtgttgaatctgattgaacatctgaaagtgtcacacgggaaaaggggggtttgttttcggtgtgcaaaatgtggaaaggaaaatagtaactatcacagtgttgtttgtcattttaagaaatgcaggggtccagagacggagaaagccccagctggggagtggatttgtgaggtatgcaacagagattttacaaccaaaattggcctgggacaacacaagagattggcacacccagcagtgagaaatcaggaaaggatcgttgcttcccaaccgaaagaaacatcaaatagaggtgctcacaaaaggtgctggacaaaggaggaggaagaattactaataagactggaggctcagttcgagggaaacaaaaatattaataagcttattgcagaacacataaccaccaaaacagctaagcagatcagtgacaaaaggcgattgctgtccagaaagccagcagaggagccacgtgaggagcctggaacgtgtcatcacaccaggagagcagctgcgagcctgagaacggagcctgagatgagtcatcacgcccaggcagaggacagagataatggacctgggagacgccctctgccaggcagggcagctgccggagggagaacaatggacgagataagacgccaccctgataagggcaacggacagcagagacccaccaagcaaaaatcagaagaacagctgcaggcttactataaaaagacactagaggaacgactttcagctggggcacttaacaccttcccccgagcattcaagcaggtaatggaaggccgggatataaagctagtaatcaatcagacagcgcaggactacttcggatgcctggaatccataagccaaataagaacggcaacccgagataaaaaggacacggtgacccgggagaaacacccaaagaaaccttttcagaagtggatgaagaagagagcaatcaaaaaaggtaattatcttcggttccagcgtttattttatcttgatagagggaaactggctaaaatcattttagatgatattgaatgcttgtcttgtgacataccactcagtgaaatttattcggtttttaaaacaagatgggaaacaactggtagctttaaaagccttggggactttaaaacttacgggaaggctgacaacactgccttcagagaattaattacggctaaagaaattgagaaaaatgtgcaggaaatgagcaaaggctcggctcccggtccagacgggattactcttggggacgtcgtaaagatggatcccgagttttcccggaccatggagattttcaatttatggttaacaactggtaaaatcccggacatggtgagggggtgcagaaccgttttgattccaaaatcatcagacccggatcgtttgaaagacattaataactggagacctatcacgatcggttccatcttgctgagactgttctccaggattgtaacagctaggctgagcaaagcgtgccccctgaacccaaggcaaagaggctttatcagagcggcgggatgctctgaaaacttaaaactcctgcaaactataatttggtcggccaaaagagaacacagaccactgggtgttgtattcgtggacatcgccaaggcttttgacaccgtaagccaccagcacatcattcatgctttgcagcaaagagaggtggatccccacatcgtcggtctggtgagcaatatgtacgagaacatcagtacgtatatcaccacaaagaggaacacacacacagacaaaatccagatccgggttggagtaaagcagggtgacccgatgtcgccccttttatttaacctggcaatggaccctctattatgcaagctggaagagagtggcaaaggataccaccgaggacagagcagcatcacagcgatggcatttgcagacgatctggttttgctgagcgactcctgggaaaatatgaatacaaatattagcatactggagaccttctgcaatctgaccggactcaaaacacaggggcaaaagtgccacggcttttacatcaagccgacaaaggactcttacaccatcaatgactgcgctgcctggactatcaacggcacacccctgaacatgatcgaccccggcgaatctgagaaatacctcggcctgcagtttgacccgtggattggaatagcaaggtccggtctctccacaaaactagatttttggcttcagcggatcgatcaagcaccacttaaacctctgcagaaactggatattctcaaaacatacaccatccctcggctgatctacatagctgaccactcagaagtgaaaagcgcactactcgaaacccttgaccagaagatccggacagcggtcaaggaatggcttcacctacctccgtgcacctgcgatgccatcctgtactcgagcacgagagacggcggtttgggcatcaccaaattggcaggactgatccccagcgtgcaggcccgtagactgcatcggatcgcacagtcatctgacgatacgatgaaatgcttcatggaaaaagagaaaatggaacagctgcataagaaattgtggattcaagctggaggggacagagagaacataccctcgatttgggaagcaccaccgtcgagtgaaccaccaaacaacgtgagcacaaattcggaatgggaagcaccgacccagaaagataaatttccaaagccttgcaattggaggaaaaacgaattcaaaaaatggaccaaattggcatcccaaggccgcggaattgtaaattttgaaagagacaaaattagtaaccattggatccaatactacagacgcatacctcacaggaaactcctcactgcactacaactcagggccaacgtttaccccacgagagaatttctagccaggggtagacaagaccaatacatcaaggcgtgtaggcactgcgatgcggacaacgaatcctgcgcccacatcatcggcaactgcccagtgacacaggacgcccgaatcaagaggcacaattacatctgcgaactgcttctcgaggaggcgaagaagaaggactgggtagtgttcaaggaaccgcacataagggattccaacaaggaactgtacaaacctgacctgatatttgtgaaggatgggcgtgcacttgtcgtggatgtgacagtacggtatgaagcagccaaatcatcgctggaggaagccgctgcagagaaagtgagaaagtacaaacacctggaaacggaagtaagacatctcacgaatgcaaaggacgttacttttgtgggctttcccctaggagcgcgggggaaatggcaccaagataactttaaacttttgactgagcttggcctctccaaatcgaggcaagtgaaaatggcagagactttttccacagtagcgctcttttcatctgtggacattgtacatatgtttgccagtagggccagaaaatctatggttatgtgataataggctgccttctgcggggcttgccttctggccatgcccttcttctctcccttgcacctgtacctcttggtctttgaataaagcctgagtaggaaggaccggtaaaaaaaaaaaaaaaaaaaaaaaaaaaaaaacgttgactaaaaaaaaaaaaaaaaaaaaaaaaaaaaaaaaaaaaaaaaaaaaaaaaaaaaaaaaaaaaaaaaaaaaaa

SEQ ID NO: 11782 - DNA, 5144 bp, synthetic construct
  source 1..5144: mol_type = other DNA
gaaataagagagaaaagaagagtaagaagaaatataagagaattcgccaccatggcccctaagaaaaagcggaaggtgaatatcagcggctctagctgcggcagccccaacagcgccgacaccagcagcgacttcaaggacctgtggaccaagctgaaggaatgccacgaccgggaagtgcagggactccaggtgaaggtcaccaaactcaagcaagaaagaatcctggacgcccagagactggaagaattcttcaccaagaaccagcagctgagagagcagcagaaagtgctgcacgagacaatcaaggttctggaagatagactgcgggccggcctgtgcgacagatgcgccgtgaccgaggaacacatgcgcaaaaagcagcaggagttcgagaacattagacagcaaaatctgaaattgatcacagagctgatgaacgagagaaacacactgcaggaggagaacaagaagctgagcgagcagctgcaacagaagatcgagaatgatcagcaacaccaggccgctgagctggaatgtgaagaggacgtgatccccgacagcccaatcacagctttcagcttttctggcgtgaacagactgaggcggaaggaaaacccccacgtgcggtacatcgagcagacccataccaagctggaacacagcgtgtgtgccaacgagatgagaaaggtgtccaagtcctccacccatccccagcacaaccctaacgaaaatgagatcctggtggctgatacctacgaccagtctcagagccctatggccaaggcccacggcaccagctcttatacccctgataagagctccttcaacctggccaccgtggtggccgagacactgggcctgggcgtgcaggaggaaagcgagacacagggcccaatgagccctctgggagatgagctgtaccactgcctggaaggcaaccacaagaaacagccttttgagtccggctccgagactcctggaacaagcgagagcgctacacctgagggcagcgtgaccgtgaagttcaagtacaagggcgaggaaaaggaagtggacatcagcaagatcaagaaggtctggcgggtgggcaagatgatcagctttacctacgacgataacggcaagacaggcagaggcgccgtgtccgagaaggacgcccctaaagagctgctgcagatgctggaaaaaagcggctctgagacacctggaacaagcgagagcgccaccccggaatcctatgaacaacttgcaccacaaccgtgtgtgggagaaactttacattctagcctcccacgagacagtgaactgtttgtgcctgaagaggggagcagcgagaaggagagcgaggacgcgccaaaaacatctcctccgacgcctgggaaacatggtttgaggcagactggggaggaaaaagtgatggtgactgttcctgacaaaaatccaccttgtccttgctgtggtacccgggtaaactctgtgttgaatctgattgaacatctgaaagtgtcacacgggaaaaggggggtttgttttcggtgtgcaaaatgtggaaaggaaaatagtaactatcacagtgttgtttgtcattttaagaaatgcaggggtccagagacggagaaagccccagctggggagtggatttgtgaggtatgcaacagagattttacaaccaaaattggcctgggacaacacaagagattggcacacccagcagtgagaaatcaggaaaggatcgttgcttcccaaccgaaagaaacatcaaatagaggtgctcacaaaaggtgctggacaaaggaggaggaagaattactaataagactggaggctcagttcgagggaaacaaaaatattaataagcttattgcagaacacataaccaccaaaacagctaagcagatcagtgacaaaaggcgattgctgtccagaaagccagcagaggagccacgtgaggagcctggaacgtgtcatcacaccaggagagcagctgcgagcctgagaacggagcctgagatgagtcatcacgcccaggcagaggacagagataatggacctgggagacgccctctgccaggcagggcagctgccggagggagaacaatggacgagataagacgccaccctgataagggcaacggacagcagagacccaccaagcaaaaatcagaagaacagctgcaggcttactataaaaagacactagaggaacgactttcagctggggcacttaacaccttcccccgagcattcaagcaggtaatggaaggccgggatataaagctagtaatcaatcagacagcgcaggactgcttcggatgcctggaatccataagccaaataagaacggcaacccgagataaaaaggacacggtgacccgggagaaacacccaaagaaaccttttcagaagtggatgaagaagagagcaatcaaaaaaggtaattatcttcggttccagcgtttattttatcttgatagagggaaactggctaaaatcattttagatgatattgaatgcttgtcttgtgacataccactcagtgaaatttattcggtttttaaaacaagatgggaaacaactggtagctttaaaagccttggggactttaaaacttacgggaaggctgacaacactgccttcagagaattaattacggctaaagaaattgagaaaaatgtgcaggaaatgagcaaaggctcggctcccggtccagacgggattactcttggggacgtcgtaaagatggatcccgagttttcccggaccatggagattttcaatttatggttaacaactggtaaaatcccggacatggtgagggggtgcagaaccgttttgattccaaaatcatcaaagccggatcgtttgaaagacattaataactggagacctatcacgatcggttccatcttgctgagactgttctccaggattgtaacagctaggctgagcaaagcgtgccccctgaacccaaggcaaagaggctttatcagagcggcgggatgctctgaaaacttaaaactcctgcaaactataatttggtcggccaaaagagaacacagaccactgggtgttgtattcgtggacatcgccaaggcttttgacaccgtaagccaccagcacatcattcatgctttgcagcaaagagaggtggatccccacatcgtcggtctggtgagcaatatgtacgagaacatcagtacgtatatcaccacaaagaggaacacacacacagacaaaatccagatccgggttggagtaaagcagggtgacccgatgtcgccccttttatttaacctggcaatggaccctctattatgcaagctggaagagagtggcaaaggataccaccgaggacagagcagcatcacagcgatggcatttgcagacgatctggttttgctgagcgactcctgggaaaatatgaatacaaatattagcatactggagaccttctgcaatctgaccggactcaaaacacaggggcaaaagtgccacggcttttacatcaagccgacaaaggactcttacaccatcaatgactgcgctgcctggactatcaacggcacacccctgaacatgatcgaccccggcgaatctgagaaatacctcggcctgcagtttgacccgtggattggaatagcaaggtccggtctctccacaaaactagatttttggcttcagcggatcgatcaagcaccacttaaacctctgcagaaaactgatattctcaaaacatacaccatccctcggctgatctacatagctgaccactcagaagtgaaaagcgcactactcgaaacccttgaccagaagatccggacagcggtcaaggaatggcttcacctacctccgtgcacctgcgatgccatcctgtactcgagcacgagagacggcggtttgggcatcaccaaattggcaggactgatccccagcgtgcaggcccgtagactgcatcggatcgcacagtcatctgacgatacgatgaaatgcttcatggaaaaagagaaaatggaacagctgcataagaaattgtggattcaagctggaggggacagagagaacataccctcgatttgggaagcaccaccgtcgagtgaaccaccaaacaacgtgagcacaaattcggaatgggaagcaccgacccagaaagataaatttccaaagccttgcaattggaggaaaaacgaattcaaaaaatggaccaaattggcatcccaaggccgcggaattgtaaattttgaaagagacaaaattagtaaccattggatccaatactacagacgcatacctcacaggaaactcctcactgcactacaactcagggccaacgtttaccccacgagagaatttctagccaggggtagacaagaccaatacatcaaggcgtgtaggcactgcgatgcggacaacgaatcctgcgcccacatcatcggcaactgcccagtgacacaggacgcccgaatcaagaggcacaattacatctgcgaactgcttctcgaggaggcgaagaagaaggactgggtagtgttcaaggaaccgcacataagggattccaacaaggaactgtacaaacctgacctgatatttgtgaaggatgggcgtgcacttgtcgtggatgtgacagtacggtatgaagcagccaaatcatcgctggaggaagccgctgcagagaaagtgagaaagtacaaacacctggaaacggaagtaagacatctcacgaatgcaaaggacgttacttttgtgggctttcccctaggagcgcgggggaaatggcaccaagataactttaaacttttgactgagcttggcctctccaaatcgaggcaagtgaaaatggcagagactttttccacagtagcgctcttttcatctgtggacattgtacatatgtttgccagtagggccagaaaatctatggttatgtgataataggctgccttctgcggggcttgccttctggccatgcccttcttctctcccttgcacctgtacctcttggtctttgaataaagcctgagtaggaaggaccggtaaaaaaaaaaaaaaaaaaaaaaaaaaaaaaacgttgactaaaaaaaaaaaaaaaaaaaaaaaaaaaaaaaaaaaaaaaaaaaaaaaaaaaaaaaaaaaaaaaaaaaaaa

SEQ ID NO: 11783 - DNA, 4484 bp, synthetic construct
  source 1..4484: mol_type = other DNA
gaaataagagagaaaagaagagtaagaagaaatataagagaattcgccaccatggcccctaagaaaaagagaaaggtggtgaccgtgaagttcaagtacaagggcgaggaaaaggaagtggacatcagcaagatcaagaaggtctggcgggtgggcaagatgatcagctttacctacgacgataacggcaagacaggcagaggcgccgtgtccgagaaggacgcccctaaagagctgctgcagatgctggaaaaaagcggctctgagacacctggaacaagcgagagcgccaccccggaatcccctaagagaaaggtgtccagcgccgagggcgctgccaaggaagagcctaaacggagaagcgccagactgagcgccaagccccccgccaaggtggaagccaagcctaagaaggccgccgctaaggacaagagcagcgataagaaagtccagaccaagggcaagcggggcgccaaaggcaaacaggccgaggtggccaaccaggagacaaaggaagatctgcctgctgagaacggcgaaaccaagaccgaggaatctccagcttctgacgaggccggagagaaggaggccaaaagcgacagcggctctgagacacctggaacaagcgagagcgccaccccggaatccctgtttgtgcctgaagaggggagcagcgagaaggagagcgaggacgcgccaaaaacatctcctccgacgcctgggaaacatggtttgaggcagactggggaggaaaaagtgatggtgactgttcctgacaaaaatccaccttgtccttgctgtggtacccgggtaaactctgtgttgaatctgattgaacatctgaaagtgtcacacgggaaaaggggggtttgttttcggtgtgcaaaatgtggaaaggaaaatagtaactatcacagtgttgtttgtcattttaagaaatgcaggggtccagagacggagaaagccccagctggggagtggatttgtgaggtatgcaacagagattttacaaccaaaattggcctgggacaacacaagagattggcacacccagcagtgagaaatcaggaaaggatcgttgcttcccaaccgaaagaaacatcaaatagaggtgctcacaaaaggtgctggacaaaggaggaggaagaattactaataagactggaggctcagttcgagggaaacaaaaatattaataagcttattgcagaacacataaccaccaaaacagctaagcagatcagtgacaaaaggcgattgctgtccagaaagccagcagaggagccacgtgaggagcctggaacgtgtcatcacaccaggagagcagctgcgagcctgagaacggagcctgagatgagtcatcacgcccaggcagaggacagagataatggacctgggagacgccctctgccaggcagggcagctgccggagggagaacaatggacgagataagacgccaccctgataagggcaacggacagcagagacccaccaagcaaaaatcagaagaacagctgcaggcttactataaaaagacactagaggaacgactttcagctggggcacttaacaccttcccccgagcattcaagcaggtaatggaaggccgggatataaagctagtaatcaatcagacagcgcaggactgcttcggatgcctggaatccataagccaaataagaacggcaacccgagataaaaaggacacggtgacccgggagaaacacccaaagaaaccttttcagaagtggatgaagaagagagcaatcaaaaaaggtaattatcttcggttccagcgtttattttatcttgatagagggaaactggctaaaatcattttagatgatattgaatgcttgtcttgtgacataccactcagtgaaatttattcggtttttaaaacaagatgggaaacaactggtagctttaaaagccttggggactttaaaacttacgggaaggctgacaacactgccttcagagaattaattacggctaaagaaattgagaaaaatgtgcaggaaatgagcaaaggctcggctcccggtccagacgggattactcttggggacgtcgtaaagatggatcccgagttttcccggaccatggagattttcaatttatggttaacaactggtaaaatcccggacatggtgagggggtgcagaaccgttttgattccaaaatcatcaaagccggatcgtttgaaagacattaataactggagacctatcacgatcggttccatcttgctgagactgttctccaggattgtaacagctaggctgagcaaagcgtgccccctgaacccaaggcaaagaggctttatcagagcggcgggatgctctgaaaacttaaaactcctgcaaactataatttggtcggccaaaagagaacacagaccactgggtgttgtattcgtggacatcgccaaggcttttgacaccgtaagccaccagcacatcattcatgctttgcagcaaagagaggtggatccccacatcgtcggtctggtgagcaatatgtacgagaacatcagtacgtatatcaccacaaagaggaacacacacacagacaaaatccagatccgggttggagtaaagcagggtgacccgatgtcgccccttttatttaacctggcaatggaccctctattatgcaagctggaagagagtggcaaaggataccaccgaggacagagcagcatcacagcgatggcatttgcagacgatctggttttgctgagcgactcctgggaaaatatgaatacaaatattagcatactggagaccttctgcaatctgaccggactcaaaacacaggggcaaaagtgccacggcttttacatcaagccgacaaaggactcttacaccatcaatgactgcgctgcctggactatcaacggcacacccctgaacatgatcgaccccggcgaatctgagaaatacctcggcctgcagtttgacccgtggattggaatagcaaggtccggtctctccacaaaactagatttttggcttcagcggatcgatcaagcaccacttaaacctctgcagaaaactgatattctcaaaacatacaccatccctcggctgatctacatagctgaccactcagaagtgaaaagcgcactactcgaaacccttgaccagaagatccggacagcggtcaaggaatggcttcacctacctccgtgcacctgcgatgccatcctgtactcgagcacgagagacggcggtttgggcatcaccaaattggcaggactgatccccagcgtgcaggcccgtagactgcatcggatcgcacagtcatctgacgatacgatgaaatgcttcatggaaaaagagaaaatggaacagctgcataagaaattgtggattcaagctggaggggacagagagaacataccctcgatttgggaagcaccaccgtcgagtgaaccaccaaacaacgtgagcacaaattcggaatgggaagcaccgacccagaaagataaatttccaaagccttgcaattggaggaaaaacgaattcaaaaaatggaccaaattggcatcccaaggccgcggaattgtaaattttgaaagagacaaaattagtaaccattggatccaatactacagacgcatacctcacaggaaactcctcactgcactacaactcagggccaacgtttaccccacgagagaatttctagccaggggtagacaagaccaatacatcaaggcgtgtaggcactgcgatgcggacaacgaatcctgcgcccacatcatcggcaactgcccagtgacacaggacgcccgaatcaagaggcacaattacatctgcgaactgcttctcgaggaggcgaagaagaaggactgggtagtgttcaaggaaccgcacataagggattccaacaaggaactgtacaaacctgacctgatatttgtgaaggatgggcgtgcacttgtcgtggatgtgacagtacggtatgaagcagccaaatcatcgctggaggaagccgctgcagagaaagtgagaaagtacaaacacctggaaacggaagtaagacatctcacgaatgcaaaggacgttacttttgtgggctttcccctaggagcgcgggggaaatggcaccaagataactttaaacttttgactgagcttggcctctccaaatcgaggcaagtgaaaatggcagagactttttccacagtagcgctcttttcatctgtggacattgtacatatgtttgccagtagggccagaaaatctatggttatgtgataataggctgccttctgcggggcttgccttctggccatgcccttcttctctcccttgcacctgtacctcttggtctttgaataaagcctgagtaggaaggaccggtaaaaaaaaaaaaaaaaaaaaaaaaaaaaaaacgttgactaaaaaaaaaaaaaaaaaaaaaaaaaaaaaaaaaaaaaaaaaaaaaaaaaaaaaaaaaaaaaaaaaaaaaa

SEQ ID NO: 11784 - DNA, 5144 bp, synthetic construct
  source 1..5144: mol_type = other DNA
gaaataagagagaaaagaagagtaagaagaaatataagagaattcgccaccatggcccctaagaaaaagagaaaggtggtgaccgtgaagttcaagtacaagggcgaggaaaaggaagtggacatcagcaagatcaagaaggtctggcgggtgggcaagatgatcagctttacctacgacgataacggcaagacaggcagaggcgccgtgtccgagaaggacgcccctaaagagctgctgcagatgctggaaaaaagcggctctgagacacctggaacaagcgagagcgccaccccggaatccaatatcagcggctctagctgcggcagccccaacagcgccgacaccagcagcgacttcaaggacctgtggaccaagctgaaggaatgccacgaccgggaagtgcagggactccaggtgaaggtcaccaaactcaagcaagaaagaatcctggacgcccagagactggaagaattcttcaccaagaaccagcagctgagagagcagcagaaagtgctgcacgagacaatcaaggttctggaagatagactgcgggccggcctgtgcgacagatgcgccgtgaccgaggaacacatgcgcaaaaagcagcaggagttcgagaacattagacagcaaaatctgaaattgatcacagagctgatgaacgagagaaacacactgcaggaggagaacaagaagctgagcgagcagctgcaacagaagatcgagaatgatcagcaacaccaggccgctgagctggaatgtgaagaggacgtgatccccgacagcccaatcacagctttcagcttttctggcgtgaacagactgaggcggaaggaaaacccccacgtgcggtacatcgagcagacccataccaagctggaacacagcgtgtgtgccaacgagatgagaaaggtgtccaagtcctccacccatccccagcacaaccctaacgaaaatgagatcctggtggctgatacctacgaccagtctcagagccctatggccaaggcccacggcaccagctcttatacccctgataagagctccttcaacctggccaccgtggtggccgagacactgggcctgggcgtgcaggaggaaagcgagacacagggcccaatgagccctctgggagatgagctgtaccactgcctggaaggcaaccacaagaaacagccttttgagtccggctccgagactcctggaacaagcgagagcgctacacctgagggcagctatgaacaacttgcaccacaaccgtgtgtgggagaaactttacattctagcctcccacgagacagtgaactgtttgtgcctgaagaggggagcagcgagaaggagagcgaggacgcgccaaaaacatctcctccgacgcctgggaaacatggtttggaacagactggggaggaaaaagtgatggtgactgttcctgacaaaaatccaccttgtccttgctgtggtacccgggtaaactctgtgttgaatctgattgaacatctgaaagtgtcacacgggaaaaggagggtttgttttcggtgtgcaaaatgtggaaaggaaaatagtaactatcacagtgttgtttgtcattttaagaaatgcaggggtccagagacggagaaagccccagctggggagtggatttgtgaggtatgcaacagagattttacaaccaaaattggcctgggacaacacaagagattggcacacccagcagtgagaaatcaggaaaggatcgttgcttcccaaccgaaagaaacatcaaatagaggtgctcacaaaaggtgctggacaaaggaggaggaagaattactaataagactggaggctcagttcgagggaaacaaaaatattaataagcttattgcagaacacataaccaccaaaacagctaagcagatcagtgacaaaaggcgattgctgtccagaaagccagcagaggagccacgtgaggagcctggaacgtgtcatcacaccaggagagcagctgcgagcctgagaacggagcctgagatgagtcatcacgcccaggcagaggacagagataatggacctgggagacgccctctgccaggcagggcagctgccggagggagaacaatggacgagataagacgccaccctgataagggcaacggacagcagagacccaccaagcaaaaatcagaagaacagctgcaggcttactataaaaagacactagaggaacgactttcagctggggcacttaacaccttcccccgagcattcaagcaggtaatggaaggccgggatataaagctagtaatcaatcagacagcgcaggactgcttcggatgcctggaatccataagccaaataagaacggcaacccgagataaaaaggacacggtgacccgggagaaacacccaaagaaaccttttcagaagtggatgaagaagagagcaatcaaaaaaggtaattatcttcggttccagcgtttattttatcttgatagagggaaactggctaaaatcattttagatgatattgaatgcttgtcttgtgacataccactcagtgaaatttattcggtttttaaaacaagatgggaaacaactggtagctttaaaagccttggggactttaaaacttacgggaaggctgacaacactgccttcagagaattaattacggctaaagaaattgagaaaaatgtgcaggaaatgagcaaaggctcggctcccggtccagacgggattactcttggggacgtcgtaaagatggatcccgagttttcccggaccatggagattttcaatttatggttaacaactggtaaaatcccggacatggtgagggggtgcagaaccgttttgattccaaaatcatcaaagccggatcgtttgaaagacattaataactggagacctatcacgatcggttccatcttgctgagactgttctccaggattgtaacagctaggctgagcaaagcgtgccccctgaacccaaggcaaagaggctttatcagagcggcgggatgctctgaaaacttaaaactcctgcaaactataatttggtcggccaaaagagaacacagaccactgggtgttgtattcgtggacatcgccaaggcttttgacaccgtaagccaccagcacatcattcatgctttgcagcaaagagaggtggatccccacatcgtcggtctggtgagcaatatgtacgagaacatcagtacgtatatcaccacaaagaggaacacacacacagacaaaatccagatccgggttggagtaaagcagggtgacccgatgtcgccccttttatttaacctggcaatggaccctctattatgcaagctggaagagagtggcaaaggataccaccgaggacagagcagcatcacagcgatggcatttgcagacgatctggttttgctgagcgactcctgggaaaatatgaatacaaatattagcatactggagaccttctgcaatctgaccggactcaaaacacaggggcaaaagtgccacggcttttacatcaagccgacaaaggactcttacaccatcaatgactgcgctgcctggactatcaacggcacacccctgaacatgatcgaccccggcgaatctgagaaatacctcggcctgcagtttgacccgtggattggaatagcaaggtccggtctctccacaaaactagatttttggcttcagcggatcgatcaagcaccacttaaacctctgcagaaaactgatattctcaaaacatacaccatccctcggctgatctacatagctgaccactcagaagtgaaaagcgcactactcgaaacccttgaccagaagatccggacagcggtcaaggaatggcttcacctacctccgtgcacctgcgatgccatcctgtactcgagcacgagagacggcggtttgggcatcaccaaattggcaggactgatccccagcgtgcaggcccgtagactgcatcggatcgcacagtcatctgacgatacgatgaaatgcttcatggaaaaagagaaaatggaacagctgcataagaaattgtggattcaagctggaggggacagagagaacataccctcgatttgggaagcaccaccgtcgagtgaaccaccaaacaacgtgagcacaaattcggaatgggaagcaccgacccagaaagataaatttccaaagccttgcaattggaggaaaaacgaattcaaaaaatggaccaaattggcatcccaaggccgcggaattgtaaattttgaaagagacaaaattagtaaccattggatccaatactacagacgcatacctcacaggaaactcctcactgcactacaactcagggccaacgtttaccccacgagagaatttctagccaggggtagacaagaccaatacatcaaggcgtgtaggcactgcgatgcggacaacgaatcctgcgcccacatcatcggcaactgcccagtgacacaggacgcccgaatcaagaggcacaattacatctgcgaactgcttctcgaggaggcgaagaagaaggactgggtagtgttcaaggaaccgcacataagggattccaacaaggaactgtacaaacctgacctgatatttgtgaaggatgggcgtgcacttgtcgtggatgtgacagtacggtatgaagcagccaaatcatcgctggaggaagccgctgcagagaaagtgagaaagtacaaacacctggaaacggaagtaagacatctcacgaatgcaaaggacgttacttttgtgggctttcccctaggagcgcgggggaaatggcaccaagataactttaaacttttgactgagcttggcctctccaaatcgaggcaagtgaaaatggcagagactttttccacagtagcgctcttttcatctgtggacattgtacatatgtttgccagtagggccagaaaatctatggttatgtgataataggctgccttctgcggggcttgccttctggccatgcccttcttctctcccttgcacctgtacctcttggtctttgaataaagcctgagtaggaaggaccggtaaaaaaaaaaaaaaaaaaaaaaaaaaaaaaacgttgactaaaaaaaaaaaaaaaaaaaaaaaaaaaaaaaaaaaaaaaaaaaaaaaaaaaaaaaaaaaaaaaaaaaaaa

SEQ ID NO: 11785 - DNA, 5144 bp, synthetic construct
  source 1..5144: mol_type = other DNA
gaaataagagagaaaagaagagtaagaagaaatataagagaattcgccaccatggcccctaagaaaaagagaaaggtggtgaccgtgaagttcaagtacaagggcgaggaaaaggaagtggacatcagcaagatcaagaaggtctggcgggtgggcaagatgatcagctttacctacgacgataacggcaagacaggcagaggcgccgtgtccgagaaggacgcccctaaagagctgctgcagatgctggaaaaaagcggctctgagacacctggaacaagcgagagcgccaccccggaatccaatatcagcggctctagctgcggcagccccaacagcgccgacaccagcagcgacttcaaggacctgtggaccaagctgaaggaatgccacgaccgggaagtgcagggactccaggtgaaggtcaccaaactcaagcaagaaagaatcctggacgcccagagactggaagaattcttcaccaagaaccagcagctgagagagcagcagaaagtgctgcacgagacaatcaaggttctggaagatagactgcgggccggcctgtgcgacagatgcgccgtgaccgaggaacacatgcgcaaaaagcagcaggagttcgagaacattagacagcaaaatctgaaattgatcacagagctgatgaacgagagaaacacactgcaggaggagaacaagaagctgagcgagcagctgcaacagaagatcgagaatgatcagcaacaccaggccgctgagctggaatgtgaagaggacgtgatccccgacagcccaatcacagctttcagcttttctggcgtgaacagactgaggcggaaggaaaacccccacgtgcggtacatcgagcagacccataccaagctggaacacagcgtgtgtgccaacgagatgagaaaggtgtccaagtcctccacccatccccagcacaaccctaacgaaaatgagatcctggtggctgatacctacgaccagtctcagagccctatggccaaggcccacggcaccagctcttatacccctgataagagctccttcaacctggccaccgtggtggccgagacactgggcctgggcgtgcaggaggaaagcgagacacagggcccaatgagccctctgggagatgagctgtaccactgcctggaaggcaaccacaagaaacagccttttgagtccggctccgagactcctggaacaagcgagagcgctacacctgagggcagctatgaacaacttgcaccacaaccgtgtgtgggagaaactttacattctagcctcccacgagacagtgaactgtttgtgcctgaagaggggagcagcgagaaggagagcgaggacgcgccaaaaacatctcctccgacgcctgggaaacatggtttggaacagactggggaggaaaaagtgatggtgactgttcctgacaaaaatccaccttgtccttgctgtggtacccgggtaaactctgtgttgaatctgattgaacatctgaaagtgtcacacgggaaaaggggggtttgttttcggtgtgcaaaatgtggaaaggaaaatagtaactatcacagtgttgtttgtcattttaagaaatgcaggggtccagagacggagaaagccccagctggggagtggatttgtgaggtatgcaacagagattttacaaccaaaattggcctgggacaacacaagagattggcacacccagcagtgagaaatcaggaaaggatcgttgcttcccaaccgaaagaaacatcaaatagaggtgctcacaaaaggtgctggacaaaggaggaggaagaattactaataagactggaggctcagttcgagggaaacaaaaatattaataagcttattgcagaacacataaccaccaaaacagctaagcagatcagtgacaaaaggcgattgctgtccagaaagccagcagaggagccacgtatggagcctggaacgtgtcatcacaccaggagagcagctgcgagcctgagaacggagcctgagatgagtcatcacgcccaggcagaggacagagataatggacctgggagacgccctctgccaggcagggcagctgccggagggagaacaatggacgagataagacgccaccctgataagggcaacggacagcagagacccaccaagcaaaaatcagaagaacagctgcaggcttactataaaaagacactagaggaacgactttcagctggggcacttaacaccttcccccgagcattcaagcaggtaatggaaggccgggatataaagctagtaatcaatcagacagcgcaggactgcttcggatgcctggaatccataagccaaataagaacggcaacccgagataaaaaggacacggtgacccgggagaaacacccaaagaaaccttttcagaagtggatgaagaagagagcaatcaaaaaaggtaattatcttcggttccagcgtttattttatcttgatagagggaaactggctaaaatcattttagatgatattgaatgcttgtcttgtgacataccactcagtgaaatttattcggtttttaaaacaagatgggaaacaactggtagctttaaaagccttggggactttaaaacttacgggaaggctgacaacactgccttcagagaattaattacggctaaagaaattgagaaaaatgtgcaggaaatgagcaaaggctcggctcccggtccagacgggattactcttggggacgtcgtaaagatggatcccgagttttcccggaccatggagattttcaatttatggttaacaactggtaaaatcccggacatggtgagggggtgcagaaccgttttgattccaaaatcatcaaagccggatcgtttgaaagacattaataactggagacctatcacgatcggttccatcttgctgagactgttctccaggattgtaacagctaggctgagcaaagcgtgccccctgaacccaaggcaaagaggctttatcagagcggcgggatgctctgaaaacttaaaactcctgcaaactataatttggtcggccaaaagagaacacagaccactgggtgttgtattcgtggacatcgccaaggcttttgacaccgtaagccaccagcacatcattcatgctttgcagcaaagagaggtggatccccacatcgtcggtctggtgagcaatatgtacgagaacatcagtacgtatatcaccacaaagaggaacacacacacagacaaaatccagatccgggttggagtaaagcagggtgacccgatgtcgccccttttatttaacctggcaatggaccctctattatgcaagctggaagagagtggcaaaggataccaccgaggacagagcagcatcacagcgatggcatttgcagacgatctggttttgctgagcgactcctgggaaaatatgaatacaaatattagcatactggagaccttctgcaatctgaccggactcaaaacacaggggcaaaagtgccacggcttttacatcaagccgacaaaggactcttacaccatcaatgactgcgctgcctggactatcaacggcacacccctgaacatgatcgaccccggcgaatctgagaaatacctcggcctgcagtttgacccgtggattggaatagcaaggtccggtctctccacaaaactagatttttggcttcagcggatcgatcaagcaccacttaaacctctgcagaaaactgatattctcaaaacatacaccatccctcggctgatctacatagctgaccactcagaagtgaaaagcgcactactcgaaacccttgaccagaagatccggacagcggtcaaggaatggcttcacctacctccgtgcacctgcgatgccatcctgtactcgagcacgagagacggcggtttgggcatcaccaaattggcaggactgatccccagcgtgcaggcccgtagactgcatcggatcgcacagtcatctgacgatacgatgaaatgcttcatggaaaaagagaaaatggaacagctgcataagaaattgtggattcaagctggaggggacagagagaacataccctcgatttgggaagcaccaccgtcgagtgaaccaccaaacaacgtgagcacaaattcggaatgggaagcaccgacccagaaagataaatttccaaagccttgcaattggaggaaaaacgaattcaaaaaatggaccaaattggcatcccaaggccgcggaattgtaaattttgaaagagacaaaattagtaaccattggatccaatactacagacgcatacctcacaggaaactcctcactgcactacaactcagggccaacgtttaccccacgagagaatttctagccaggggtagacaagaccaatacatcaaggcgtgtaggcactgcgatgcggacaacgaatcctgcgcccacatcatcggcaactgcccagtgacacaggacgcccgaatcaagaggcacaattacatctgcgaactgcttctcgaggaggcgaagaagaaggactgggtagtgttcaaggaaccgcacataagggattccaacaaggaactgtacaaacctgacctgatatttgtgaaggatgggcgtgcacttgtcgtggatgtgacagtacggtatgaagcagccaaatcatcgctggaggaagccgctgcagagaaagtgagaaagtacaaacacctggaaacggaagtaagacatctcacgaatgcaaaggacgttacttttgtgggctttcccctaggagcgcgggggaaatggcaccaagataactttaaacttttgactgagcttggcctctccaaatcgaggcaagtgaaaatggcagagactttttccacagtagcgctcttttcatctgtggacattgtacatatgtttgccagtagggccagaaaatctatggttatgtgataataggctgccttctgcggggcttgccttctggccatgcccttcttctctcccttgcacctgtacctcttggtctttgaataaagcctgagtaggaaggaccggtaaaaaaaaaaaaaaaaaaaaaaaaaaaaaaacgttgactaaaaaaaaaaaaaaaaaaaaaaaaaaaaaaaaaaaaaaaaaaaaaaaaaaaaaaaaaaaaaaaaaaaaaa

SEQ ID NO: 11786 - DNA, 5240 bp, synthetic construct
  source 1..5240: mol_type = other DNA
gaaataagagagaaaagaagagtaagaagaaatataagagaattcgccaccatgcctaagagaaaggtgtccagcgccgagggcgctgccaaggaagagcctaaacggagaagcgccagactgagcgccaagccccccgccaaggtggaagccaagcctaagaaggccgccgctaaggacaagagcagcgataagaaagtccagaccaagggcaagcggggcgccaaaggcaaacaggccgaggtggccaaccaggagacaaaggaagatctgcctgctgagaacggcgaaaccaagaccgaggaatctccagcttctgacgaggccggagagaaggaggccaaaagcgacagcggctctgagacacctggaacaagcgagagcgccaccccggaatccaatatcagcggctctagctgcggcagccccaacagcgccgacaccagcagcgacttcaaggacctgtggaccaagctgaaggaatgccacgaccgggaagtgcagggactccaggtgaaggtcaccaaactcaagcaagaaagaatcctggacgcccagagactggaagaattcttcaccaagaaccagcagctgagagagcagcagaaagtgctgcacgagacaatcaaggttctggaagatagactgcgggccggcctgtgcgacagatgcgccgtgaccgaggaacacatgcgcaaaaagcagcaggagttcgagaacattagacagcaaaatctgaaattgatcacagagctgatgaacgagagaaacacactgcaggaggagaacaagaagctgagcgagcagctgcaacagaagatcgagaatgatcagcaacaccaggccgctgagctggaatgtgaagaggacgtgatccccgacagcccaatcacagctttcagcttttctggcgtgaacagactgaggcggaaggaaaacccccacgtgcggtacatcgagcagacccataccaagctggaacacagcgtgtgtgccaacgagatgagaaaggtgtccaagtcctccacccatccccagcacaaccctaacgaaaatgagatcctggtggctgatacctacgaccagtctcagagccctatggccaaggcccacggcaccagctcttatacccctgataagagctccttcaacctggccaccgtggtggccgagacactgggcctgggcgtgcaggaggaaagcgagacacagggcccaatgagccctctgggagatgagctgtaccactgcctggaaggcaaccacaagaaacagccttttgagtccggctccgagactcctggaacaagcgagagcgctacacctgagggcagctatgaacaacttgcaccacaaccgtgtgtgggagaaactttacattctagcctcccacgagacagtgaactgtttgtgcctgaagaggggagcagcgagaaggagagcgaggacgcgccaaaaacatctcctccgacgcctgggaaacatggtttggaacagactggggaggaaaaagtgatggtgactgttcctgacaaaaatccaccttgtccttgctgtggtacccgggtaaactctgtgttgaatctgattgaacatctgaaagtgtcacacgggaaaaggggggtttgttttcggtgtgcaaaatgtggaaaggaaaatagtaactatcacagtgttgtttgtcattttaagaaatgcaggggtccagagacggagaaagccccagctggggagtggatttgtgaggtatgcaacagagattttacaaccaaaattggcctgggacaacacaagagattggcacacccagcagtgagaaatcaggaaaggatcgttgcttcccaaccgaaagaaacatcaaatagaggtgctcacaaaaggtgctggacaaaggaggaggaagaattactaataagactggaggctcagttcgagggaaacaaaaatattaataagcttattgcagaacacataaccaccaaaacagctaagcagatcagtgacaaaaggcgattgctgtccagaaagccagcagaggagccacgtgaggagcctggaacgtgtcatcacaccaggagagcagctgcgagcctgagaacggagcctgagatgagtcatcacgcccaggcagaggacagagataatggacctgggagacgccctctgccaggcagggcagctgccggagggagaacaatggacgagataagacgccaccctgataagggcaacggacagcagagacccaccaagcaaaaatcagaagaacagctgcaggcttactataaaaagacactagaggaacgactttcagctggggcacttaacaccttcccccgagcattcaagcaggtaatggaaggccgggatataaagctagtaatcaatcagacagcgcaggactgcttcggatgcctggaatccataagccaaataagaacggcaacccgagataaaaaggacacggtgacccgggagaaacacccaaagaaaccttttcagaagtggatgaagaagagagcaatcaaaaaaggtaattatcttcggttccagcgtttattttatcttgatagagggaaactggctaaaatcattttagatgatattgaatgcttgtcttgtgacataccactcagtgaaatttattcggtttttaaaacaagatgggaaacaactggtagctttaaaagccttggggactttaaaacttacgggaaggctgacaacactgccttcagagaattaattacggctaaagaaattgagaaaaatgtgcaggaaatgagcaaaggctcggctcccggtccagacgggattactcttggggacgtcgtaaagatggatcccgagttttcccggaccatggagattttcaatttatggttaacaactggtaaaatcccggacatggtgagggggtgcagaaccgttttgattccaaaatcatcagacccggatcgtttgaaagacattaataactggagacctatcacgatcggttccatcttgctgagactgttctccaggattgtaacagctaggctgagcaaagcgtgccccctgaacccaaggcaaagaggctttatcagagcggcgggatgctctgaaaacttaaaactcctgcaaactataatttggtcggccaaaagagaacacagaccactgggtgttgtattcgtggacatcgccaaggcttttgacaccgtaagccaccagcacatcattcatgctttgcagcaaagagaggtggatccccacatcgtcggtctggtgagcaatatgtacgagaacatcagtacgtatatcaccacaaagaggaacacacacacagacaaaatccagatccgggttggagtaaagcagggtgacccgatgtcgccccttttatttaacctggcaatggaccctctattatgcaagctggaagagagtggcaaaggataccaccgaggacagagcagcatcacagcgatggcatttgcagacgatctggttttgctgagcgactcctgggaaaatatgaatacaaatattagcatactggagaccttctgcaatctgaccggactcaaaacacaggggcaaaagtgccacggcttttacatcaagccgacaaaggactcttacaccatcaatgactgcgctgcctggactatcaacggcacacccctgaacatgatcgaccccggcgaatctgagaaatacctcggcctgcagtttgacccgtggattggaatagcaaggtccggtctctccacaaaactagatttttggcttcagcggatcgatcaagcaccacttaaacctctgcagaaaactgatattctcaaaacatacaccatccctcggctgatctacatagctgaccactcagaagtgaaaagcgcactactcgaaacccttgaccagaagatccggacagcggtcaaggaatggcttcacctacctccgtgcacctgcgatgccatcctgtactcgagcacgagagacggcggtttgggcatcaccaaattggcaggactgatccccagcgtgcaggcccgtagactgcatcggatcgcacagtcatctgacgatacgatgaaatgcttcatggaaaaagagaaaatggaacagctgcataagaaattgtggattcaagctggaggggacagagagaacataccctcgatttgggaagcaccaccgtcgagtgaaccaccaaacaacgtgagcacaaattcggaatgggaagcaccgacccagaaagataaatttccaaagccttgcaattggaggaaaaacgaattcaaaaaatggaccaaattggcatcccaaggccgcggaattgtaaattttgaaagagacaaaattagtaaccattggatccaatactacagacgcatacctcacaggaaactcctcactgcactacaactcagggccaacgtttaccccacgagagaatttctagccaggggtagacaagaccaatacatcaaggcgtgtaggcactgcgatgcggacaacgaatcctgcgcccacatcatcggcaactgcccagtgacacaggacgcccgaatcaagaggcacaattacatctgcgaactgcttctcgaggaggcgaagaagaaggactgggtagtgttcaaggaaccgcacataagggattccaacaaggaactgtacaaacctgacctgatatttgtgaaggatgggcgtgcacttgtcgtggatgtgacagtacggtatgaagcagccaaatcatcgctggaggaagccgctgcagagaaagtgagaaagtacaaacacctggaaacggaagtaagacatctcacgaatgcaaaggacgttacttttgtgggctttcccctaggagcgcgggggaaatggcaccaagataactttaaacttttgactgagcttggcctctccaaatcgaggcaagtgaaaatggcagagactttttccacagtagcgctcttttcatctgtggacattgtacatatgtttgccagtagggccagaaaatctatggttatgtgataataggctgccttctgcggggcttgccttctggccatgcccttcttctctcccttgcacctgtacctcttggtctttgaataaagcctgagtaggaaggaccggtaaaaaaaaaaaaaaaaaaaaaaaaaaaaaaacgttgactaaaaaaaaaaaaaaaaaaaaaaaaaaaaaaaaaaaaaaaaaaaaaaaaaaaaaaaaaaaaaaaaaaaaaa

SEQ ID NO: 11787 - DNA, 5264 bp, synthetic construct
  source 1..5264: mol_type = other DNA
gaaataagagagaaaagaagagtaagaagaaatataagagaattcgccaccatggcccctaagaaaaagcggaaggtgaatatcagcggctctagctgcggcagccccaacagcgccgacaccagcagcgacttcaaggacctgtggaccaagctgaaggaatgccacgaccgggaagtgcagggactccaggtgaaggtcaccaaactcaagcaagaaagaatcctggacgcccagagactggaagaattcttcaccaagaaccagcagctgagagagcagcagaaagtgctgcacgagacaatcaaggttctggaagatagactgcgggccggcctgtgcgacagatgcgccgtgaccgaggaacacatgcgcaaaaagcagcaggagttcgagaacattagacagcaaaatctgaaattgatcacagagctgatgaacgagagaaacacactgcaggaggagaacaagaagctgagcgagcagctgcaacagaagatcgagaatgatcagcaacaccaggccgctgagctggaatgtgaagaggacgtgatccccgacagcccaatcacagctttcagcttttctggcgtgaacagactgaggcggaaggaaaacccccacgtgcggtacatcgagcagacccataccaagctggaacacagcgtgtgtgccaacgagatgagaaaggtgtccaagtcctccacccatccccagcacaaccctaacgaaaatgagatcctggtggctgatacctacgaccagtctcagagccctatggccaaggcccacggcaccagctcttatacccctgataagagctccttcaacctggccaccgtggtggccgagacactgggcctgggcgtgcaggaggaaagcgagacacagggcccaatgagccctctgggagatgagctgtaccactgcctggaaggcaaccacaagaaacagccttttgagtccggctccgagactcctggaacaagcgagagcgctacacctgagggcagccctaagagaaaggtgtccagcgccgagggcgctgccaaggaagagcctaaacggagaagcgccagactgagcgccaagccccccgccaaggtggaagccaagcctaagaaggccgccgctaaggacaagagcagcgataagaaagtccagaccaagggcaagcggggcgccaaaggcaaacaggccgaggtggccaaccaggagacaaaggaagatctgcctgctgagaacggcgaaaccaagaccgaggaatctccagcttctgacgaggccggagagaaggaggccaaaagcgacagcggctctgagacacctggaacaagcgagagcgccaccccggaatcctatgaacaacttgcaccacaaccgtgtgtgggagaaactttacattctagcctcccacgagacagtgaactgtttgtgcctgaagaggggagcagcgagaaggagagcgaggacgcgccaaaaacatctcctccgacgcctgggaaacatggtttggaacagactggggaggaaaaagtgatggtgactgttcctgacaaaaatccaccttgtccttgctgtggtacccgggtaaactctgtgttgaatctgattgaacatctgaaagtgtcacacgggaaaaggagggtttgttttcggtgtgcaaaatgtggaaaggaaaatagtaactatcacagtgttgtttgtcattttaagaaatgcaggggtccagagacggagaaagccccagctggggagtggatttgtgaggtatgcaacagagattttacaaccaaaattggcctgggacaacacaagagattggcacacccagcagtgagaaatcaggaaaggatcgttgcttcccaaccgaaagaaacatcaaatagaggtgctcacaaaaggtgctggacaaaggaggaggaagaattactaataagactggaggctcagttcgagggaaacaaaaatattaataagcttattgcagaacacataaccaccaaaacagctaagcagatcagtgacaaaaggcgattgctgtccagaaagccagcagaggagccacgtgaggagcctggaacgtgtcatcacaccaggagagcagctgcgagcctgagaacggagcctgagatgagtcatcacgcccaggcagaggacagagataatggacctgggagacgccctctgccaggcagggcagctgccggagggagaacaatggacgagataagacgccaccctgataagggcaacggacagcagagacccaccaagcaaaaatcagaagaacagctgcaggcttactataaaaagacactagaggaacgactttcagctggggcacttaacaccttcccccgagcattcaagcaggtaatggaaggccgggatataaagctagtaatcaatcagacagcgcaggactgcttcggatgcctggaatccataagccaaataagaacggcaacccgagataaaaaggacacggtgacccgggagaaacacccaaagaaaccttttcagaagtggatgaagaagagagcaatcaaaaaaggtaattatcttcggttccagcgtttattttatcttgatagagggaaactggctaaaatcattttagatgatattgaatgcttgtcttgtgacataccactcagtgaaatttattcggtttttaaaacaagatgggaaacaactggtagctttaaaagccttggggactttaaaacttacgggaaggctgacaacactgccttcagagaattaattacggctaaagaaattgagaaaaatgtgcaggaaatgagcaaaggctcggctcccggtccagacgggattactcttggggacgtcgtaaagatggatcccgagttttcccggaccatggagattttcaatttatggttaacaactggtaaaatcccggacatggtgagggggtgcagaaccgttttgattccaaaatcatcaaagccggatcgtttgaaagacattaataactggagacctatcacgatcggttccatcttgctgagactgttctccaggattgtaacagctaggctgagcaaagcgtgccccctgaacccaaggcaaagaggctttatcagagcggcgggatgctctgaaaacttaaaactcctgcaaactataatttggtcggccaaaagagaacacagaccactgggtgttgtattcgtggacatcgccaaggcttttgacaccgtaagccaccagcacatcattcatgctttgcagcaaagagaggtggatccccacatcgtcggtctggtgagcaatatgtacgagaacatcagtacgtatatcaccacaaagaggaacacacacacagacaaaatccagatccgggttggagtaaagcagggtgacccgatgtcgccccttttatttaacctggcaatggaccctctattatgcaagctggaagagagtggcaaaggataccaccgaggacagagcagcatcacagcgatggcatttgcagacgatctggttttgctgagcgactcctgggaaaatatgaatacaaatattagcatactggagaccttctgcaatctgaccggactcaaaacacaggggcaaaagtgccacggcttttacatcaagccgacaaaggactcttacaccatcaatgactgcgctgcctggactatcaacggcacacccctgaacatgatcgaccccggcgaatctgagaaatacctcggcctgcagtttgacccgtggattggaatagcaaggtccggtctctccacaaaactagatttttggcttcagcggatcgatcaagcaccacttaaacctctgcagaaaactgatattctcaaaacatacaccatccctcggctgatctacatagctgaccactcagaagtgaaaagcgcactactcgaaacccttgaccagaagatccggacagcggtcaaggaatggcttcacctacctccgtgcacctgcgatgccatcctgtactcgagcacgagagacggcggtttgggcatcaccaaattggcaggactgatccccagcgtgcaggcccgtagactgcatcggatcgcacagtcatctgacgatacgatgaaatgcttcatggaaaaagagaaaatggaacagctgcataagaaattgtggattcaagctggaggggacagagagaacataccctcgatttgggaagcaccaccgtcgagtgaaccaccaaacaacgtgagcacaaattcggaatgggaagcaccgacccagaaagataaatttccaaagccttgcaattggaggaaaaacgaattcaaaaaatggaccaaattggcatcccaaggccgcggaattgtaaattttgaaagagacaaaattagtaaccattggatccaatactacagacgcatacctcacaggaaactcctcactgcactacaactcagggccaacgtttaccccacgagagaatttctagccaggggtagacaagaccaatacatcaaggcgtgtaggcactgcgatgcggacaacgaatcctgcgcccacatcatcggcaactgcccagtgacacaggacgcccgaatcaagaggcacaattacatctgcgaactgcttctcgaggaggcgaagaagaaggactgggtagtgttcaaggaaccgcacataagggattccaacaaggaactgtacaaacctgacctgatatttgtgaaggatgggcgtgcacttgtcgtggatgtgacagtacggtatgaagcagccaaatcatcgctggaggaagccgctgcagagaaagtgagaaagtacaaacacctggaaacggaagtaagacatctcacgaatgcaaaggacgttacttttgtgggctttcccctaggagcgcgggggaaatggcaccaagataactttaaacttttgactgagcttggcctctccaaatcgaggcaagtgaaaatggcagagactttttccacagtagcgctcttttcatctgtggacattgtacatatgtttgccagtagggccagaaaatctatggttatgtgataataggctgccttctgcggggcttgccttctggccatgcccttcttctctcccttgcacctgtacctcttggtctttgaataaagcctgagtaggaaggaccggtaaaaaaaaaaaaaaaaaaaaaaaaaaaaaaacgttgactaaaaaaaaaaaaaaaaaaaaaaaaaaaaaaaaaaaaaaaaaaaaaaaaaaaaaaaaaaaaaaaaaaaaaa

SEQ ID NO: 11788 - DNA, 5240 bp, synthetic construct
  source 1..5240: mol_type = other DNA
gaaataagagagaaaagaagagtaagaagaaatataagagaattcgccaccatgcctaagagaaaggtgtccagcgccgagggcgctgccaaggaagagcctaaacggagaagcgccagactgagcgccaagccccccgccaaggtggaagccaagcctaagaaggccgccgctaaggacaagagcagcgataagaaagtccagaccaagggcaagcggggcgccaaaggcaaacaggccgaggtggccaaccaggagacaaaggaagatctgcctgctgagaacggcgaaaccaagaccgaggaatctccagcttctgacgaggccggagagaaggaggccaaaagcgacagcggctctgagacacctggaacaagcgagagcgccaccccggaatccaatatcagcggctctagctgcggcagccccaacagcgccgacaccagcagcgacttcaaggacctgtggaccaagctgaaggaatgccacgaccgggaagtgcagggactccaggtgaaggtcaccaaactcaagcaagaaagaatcctggacgcccagagactggaagaattcttcaccaagaaccagcagctgagagagcagcagaaagtgctgcacgagacaatcaaggttctggaagatagactgcgggccggcctgtgcgacagatgcgccgtgaccgaggaacacatgcgcaaaaagcagcaggagttcgagaacattagacagcaaaatctgaaattgatcacagagctgatgaacgagagaaacacactgcaggaggagaacaagaagctgagcgagcagctgcaacagaagatcgagaatgatcagcaacaccaggccgctgagctggaatgtgaagaggacgtgatccccgacagcccaatcacagctttcagcttttctggcgtgaacagactgaggcggaaggaaaacccccacgtgcggtacatcgagcagacccataccaagctggaacacagcgtgtgtgccaacgagatgagaaaggtgtccaagtcctccacccatccccagcacaaccctaacgaaaatgagatcctggtggctgatacctacgaccagtctcagagccctatggccaaggcccacggcaccagctcttatacccctgataagagctccttcaacctggccaccgtggtggccgagacactgggcctgggcgtgcaggaggaaagcgagacacagggcccaatgagccctctgggagatgagctgtaccactgcctggaaggcaaccacaagaaacagccttttgagtccggctccgagactcctggaacaagcgagagcgctacacctgagggcagctatgaacaacttgcaccacaaccgtgtgtgggagaaactttacattctagcctcccacgagacagtgaactgtttgtgcctgaagaggggagcagcgagaaggagagcgaggacgcgccaaaaacatctcctccgacgcctgggaaacatggtttggaacagactggggaggaaaaagtgatggtgactgttcctgacaaaaatccaccttgtccttgctgtggtacccgggtaaactctgtgttgaatctgattgaacatctgaaagtgtcacacgggaaaaggggggtttgttttcggtgtgcaaaatgtggaaaggaaaatagtaactatcacagtgttgtttgtcattttaagaaatgcaggggtccagagacggagaaagccccagctggggagtggatttgtgaggtatgcaacagagattttacaaccaaaattggcctgggacaacacaagagattggcacacccagcagtgagaaatcaggaaaggatcgttgcttcccaaccgaaagaaacatcaaatagaggtgctcacaaaaggtgctggacaaaggaggaggaagaattactaataagactggaggctcagttcgagggaaacaaaaatattaataagcttattgcagaacacataaccaccaaaacagctaagcagatcagtgacaaaaggcgattgctgtccagaaagccagcagaggagccacgtgaggagcctggaacgtgtcatcacaccaggagagcagctgcgagcctgagaacggagcctgagatgagtcatcacgcccaggcagaggacagagataatggacctgggagacgccctctgccaggcagggcagctgccggagggagaacaatggacgagataagacgccaccctgataagggcaacggacagcagagacccaccaagcaaaaatcagaagaacagctgcaggcttactataaaaagacactagaggaacgactttcagctggggcacttaacaccttcccccgagcattcaagcaggtaatggaaggccgggatataaagctagtaatcaatcagacagcgcaggactacttcggatgcctggaatccataagccaaataagaacggcaacccgagataaaaaggacacggtgacccgggagaaacacccaaagaaaccttttcagaagtggatgaagaagagagcaatcaaaaaaggtaattatcttcggttccagcgtttattttatcttgatagagggaaactggctaaaatcattttagatgatattgaatgcttgtcttgtgacataccactcagtgaaatttattcggtttttaaaacaagatgggaaacaactggtagctttaaaagccttggggactttaaaacttacgggaaggctgacaacactgccttcagagaattaattacggctaaagaaattgagaaaaatgtgcaggaaatgagcaaaggctcggctcccggtccagacgggattactcttggggacgtcgtaaagatggatcccgagttttcccggaccatggagattttcaatttatggttaacaactggtaaaatcccggacatggtgagggggtgcagaaccgttttgattccaaaatcatcaaagccggatcgtttgaaagacattaataactggagacctatcacgatcggttccatcttgctgagactgttctccaggattgtaacagctaggctgagcaaagcgtgccccctgaacccaaggcaaagaggctttatcagagcggcgggatgctctgaaaacttaaaactcctgcaaactataatttggtcggccaaaagagaacacagaccactgggtgttgtattcgtggacatcgccaaggcttttgacaccgtaagccaccagcacatcattcatgctttgcagcaaagagaggtggatccccacatcgtcggtctggtgagcaatatgtacgagaacatcagtacgtatatcaccacaaagaggaacacacacacagacaaaatccagatccgggttggagtaaagcagggtgacccgatgtcgccccttttatttaacctggcaatggaccctctattatgcaagctggaagagagtggcaaaggataccaccgaggacagagcagcatcacagcgatggcatttgcagacgatctggttttgctgagcgactcctgggaaaatatgaatacaaatattagcatactggagaccttctgcaatctgaccggactcaaaacacaggggcaaaagtgccacggcttttacatcaagccgacaaagaagtcttacaccatcaatgactgcgctgcctggactatcaacggcacacccctgaacatgatcgaccccggcgaatctgagaaatacctcggcctgcagtttgacccgtggattggaatagcaaggtccggtctctccacaaaactagatttttggcttcagcggatcgatcaagcaccacttaaacctctgcagaaaactgatattctcaaaacatacaccatccctcggctgatctacatagctgaccactcagaagtgaaaagcgcactactcgaaacccttgaccagaagatccggacagcggtcaaggaatggcttcacctacctccgtgcacctgcgatgccatcctgtactcgagcacgagagacggcggtttgggcatcaccaaattggcaggactgatccccagcgtgcaggcccgtagactgcatcggatcgcacagtcatctgacgatacgatgaaatgcttcatggaaaaagagaaaatggaacagctgcataagaaattgtggattcaagctggaggggacagagagaacataccctcgatttgggaagcaccaccgtcgagtgaaccaccaaacaacgtgagcacaaattcggaatgggaagcaccgacccagaaagataaatttccaaagccttgcaattggaggaaaaacgaattcaaaaaatggaccaaattggcatcccaaggccgcggaattgtaaattttgaaagagacaaaattagtaaccattggatccaatactacagacgcatacctcacaggaaactcctcactgcactacaactcagggccaacgtttaccccacgagagaatttctagccaggggtagacaagaccaatacatcaaggcgtgtaggcactgcgatgcggacaacgaatcctgcgcccacatcatcggcaactgcccagtgacacaggacgcccgaatcaagaggcacaattacatctgcgaactgcttctcgaggaggcgaagaagaaggactgggtagtgttcaaggaaccgcacataagggattccaacaaggaactgtacaaacctgacctgatatttgtgaaggatgggcgtgcacttgtcgtggatgtgacagtacggtatgaagcagccaaatcatcgctggaggaagccgctgcagagaaagtgagaaagtacaaacacctggaaacggaagtaagacatctcacgaatgcaaaggacgttacttttgtgggctttcccctaggagcgcgggggaaatggcaccaagataactttaaacttttgactgagcttggcctctccaaatcgaggcaagtgaaaatggcagagactttttccacagtagcgctcttttcatctgtggacattgtacatatgtttgccagtagggccagaaaatctatggttatgtgataataggctgccttctgcggggcttgccttctggccatgcccttcttctctcccttgcacctgtacctcttggtctttgaataaagcctgagtaggaaggaccggtaaaaaaaaaaaaaaaaaaaaaaaaaaaaaaacgttgactaaaaaaaaaaaaaaaaaaaaaaaaaaaaaaaaaaaaaaaaaaaaaaaaaaaaaaaaaaaaaaaaaaaaaa

SEQ ID NO: 11789 - DNA, 4460 bp, synthetic construct
  source 1..4460: mol_type = other DNA
gaaataagagagaaaagaagagtaagaagaaatataagagaattcgccaccatgcctaagagaaaggtgtccagcgccgagggcgctgccaaggaagagcctaaacggagaagcgccagactgagcgccaagccccccgccaaggtggaagccaagcctaagaaggccgccgctaaggacaagagcagcgataagaaagtccagaccaagggcaagcggggcgccaaaggcaaacaggccgaggtggccaaccaggagacaaaggaagatctgcctgctgagaacggcgaaaccaagaccgaggaatctccagcttctgacgaggccggagagaaggaggccaaaagcgacagcggctctgagacacctggaacaagcgagagcgccaccccggaatccgtgaccgtgaagttcaagtacaagggcgaggaaaaggaagtggacatcagcaagatcaagaaggtctggcgggtgggcaagatgatcagctttacctacgacgataacggcaagacaggcagaggcgccgtgtccgagaaggacgcccctaaagagctgctgcagatgctggaaaaaagcggctctgagacacctggaacaagcgagagcgccaccccggaatccctgtttgtgcctgaagaggggagcagcgagaaggagagcgaggacgcgccaaaaacatctcctccgacgcctgggaaacatggtttggaacagactggggaggaaaaagtgatggtgactgttcctgacaaaaatccaccttgtccttgctgtggtacccgggtaaactctgtgttgaatctgattgaacatctgaaagtgtcacacgggaaaaggagggtttgttttcggtgtgcaaaatgtggaaaggaaaatagtaactatcacagtgttgtttgtcattttaagaaatgcaggggtccagagacggagaaagccccagctggggagtggatttgtgaggtatgcaacagagattttacaaccaaaattggcctgggacaacacaagagattggcacacccagcagtgagaaatcaggaaaggatcgttgcttcccaaccgaaagaaacatcaaatagaggtgctcacaaaaggtgctggacaaaggaggaggaagaattactaataagactggaggctcagttcgagggaaacaaaaatattaataagcttattgcagaacacataaccaccaaaacagctaagcagatcagtgacaaaaggcgattgctgtccagaaagccagcagaggagccacgtgaggagcctggaacgtgtcatcacaccaggagagcagctgcgagcctgagaacggagcctgagatgagtcatcacgcccaggcagaggacagagataatggacctgggagacgccctctgccaggcagggcagctgccggagggagaacaatggacgagataagacgccaccctgataagggcaacggacagcagagacccaccaagcaaaaatcagaagaacagctgcaggcttactataaaaagacactagaggaacgactttcagctggggcacttaacaccttcccccgagcattcaagcaggtaatggaaggccgggatataaagctagtaatcaatcagacagcgcaggactgcttcggatgcctggaatccataagccaaataagaacggcaacccgagataaaaaggacacggtgacccgggagaaacacccaaagaaaccttttcagaagtggatgaagaagagagcaatcaaaaaaggtaattatcttcggttccagcgtttattttatcttgatagagggaaactggctaaaatcattttagatgatattgaatgcttgtcttgtgacataccactcagtgaaatttattcggtttttaaaacaagatgggaaacaactggtagctttaaaagccttggggactttaaaacttacgggaaggctgacaacactgccttcagagaattaattacggctaaagaaattgagaaaaatgtgcaggaaatgagcaaaggctcggctcccggtccagacgggattactcttggggacgtcgtaaagatggatcccgagttttcccggaccatggagattttcaatttatggttaacaactggtaaaatcccggacatggtgagggggtgcagaaccgttttgattccaaaatcatcaaagccggatcgtttgaaagacattaataactggagacctatcacgatcggttccatcttgctgagactgttctccaggattgtaacagctaggctgagcaaagcgtgccccctgaacccaaggcaaagaggctttatcagagcggcgggatgctctgaaaacttaaaactcctgcaaactataatttggtcggccaaaagagaacacagaccactgggtgttgtattcgtggacatcgccaaggcttttgacaccgtaagccaccagcacatcattcatgctttgcagcaaagagaggtggatccccacatcgtcggtctggtgagcaatatgtacgagaacatcagtacgtatatcaccacaaagaggaacacacacacagacaaaatccagatccgggttggagtaaagcagggtgacccgatgtcgccccttttatttaacctggcaatggaccctctattatgcaagctggaagagagtggcaaaggataccaccgaggacagagcagcatcacagcgatggcatttgcagacgatctggttttgctgagcgactcctgggaaaatatgaatacaaatattagcatactggagaccttctgcaatctgaccggactcaaaacacaggggcaaaagtgccacggcttttacatcaagccgacaaaggactcttacaccatcaatgactgcgctgcctggactatcaacggcacacccctgaacatgatcgaccccggcgaatctgagaaatacctcggcctgcagtttgacccgtggattggaatagcaaggtccggtctctccacaaaactagatttttggcttcagcggatcgatcaagcaccacttaaacctctgcagaaaactgatattctcaaaacatacaccatccctcggctgatctacatagctgaccactcagaagtgaaaagcgcactactcgaaacccttgaccagaagatccggacagcggtcaaggaatggcttcacctacctccgtgcacctgcgatgccatcctgtactcgagcacgagagacggcggtttgggcatcaccaaattggcaggactgatccccagcgtgcaggcccgtagactgcatcggatcgcacagtcatctgacgatacgatgaaatgcttcatggaaaaagagaaaatggaacagctgcataagaaattgtggattcaagctggaggggacagagagaacataccctcgatttgggaagcaccaccgtcgagtgaaccaccaaacaacgtgagcacaaattcggaatgggaagcaccgacccagaaagataaatttccaaagccttgcaattggaggaaaaacgaattcaaaaaatggaccaaattggcatcccaaggccgcggaattgtaaattttgaaagagacaaaattagtaaccattggatccaatactacagacgcatacctcacaggaaactcctcactgcactacaactcagggccaacgtttaccccacgagagaatttctagccaggggtagacaagaccaatacatcaaggcgtgtaggcactgcgatgcggacaacgaatcctgcgcccacatcatcggcaactgcccagtgacacaggacgcccgaatcaagaggcacaattacatctgcgaactgcttctcgaggaggcgaagaagaaggactgggtagtgttcaaggaaccgcacataagggattccaacaaggaactgtacaaacctgacctgatatttgtgaaggatgggcgtgcacttgtcgtggatgtgacagtacggtatgaagcagccaaatcatcgctggaggaagccgctgcagagaaagtgagaaagtacaaacacctggaaacggaagtaagacatctcacgaatgcaaaggacgttacttttgtgggctttcccctaggagcgcgggggaaatggcaccaagataactttaaacttttgactgagcttggcctctccaaatcgaggcaagtgaaaatggcagagactttttccacagtagcgctcttttcatctgtggacattgtacatatgtttgccagtagggccagaaaatctatggttatgtgataataggctgccttctgcggggcttgccttctggccatgcccttcttctctcccttgcacctgtacctcttggtctttgaataaagcctgagtaggaaggaccggtaaaaaaaaaaaaaaaaaaaaaaaaaaaaaaacgttgactaaaaaaaaaaaaaaaaaaaaaaaaaaaaaaaaaaaaaaaaaaaaaaaaaaaaaaaaaaaaaaaaaaaaaa

SEQ ID NO: 11790 - DNA, 4484 bp, synthetic construct
  source 1..4484: mol_type = other DNA
gaaataagagagaaaagaagagtaagaagaaatataagagaattcgccaccatggcccctaagaaaaagagaaaggtggtgaccgtgaagttcaagtacaagggcgaggaaaaggaagtggacatcagcaagatcaagaaggtctggcgggtgggcaagatgatcagctttacctacgacgataacggcaagacaggcagaggcgccgtgtccgagaaggacgcccctaaagagctgctgcagatgctggaaaaaagcggctctgagacacctggaacaagcgagagcgccaccccggaatcccctaagagaaaggtgtccagcgccgagggcgctgccaaggaagagcctaaacggagaagcgccagactgagcgccaagccccccgccaaggtggaagccaagcctaagaaggccgccgctaaggacaagagcagcgataagaaagtccagaccaagggcaagcggggcgccaaaggcaaacaggccgaggtggccaaccaggagacaaaggaagatctgcctgctgagaacggcgaaaccaagaccgaggaatctccagcttctgacgaggccggagagaaggaggccaaaagcgacagcggctctgagacacctggaacaagcgagagcgccaccccggaatccctgtttgtgcctgaagaggggagcagcgagaaggagagcgaggacgcgccaaaaacatctcctccgacgcctgggaaacatggtttggaacagactggggaggaaaaagtgatggtgactgttcctgacaaaaatccaccttgtccttgctgtggtacccgggtaaactctgtgttgaatctgattgaacatctgaaagtgtcacacgggaaaaggagggtttgttttcggtgtgcaaaatgtggaaaggaaaatagtaactatcacagtgttgtttgtcattttaagaaatgcaggggtccagagacggagaaagccccagctggggagtggatttgtgaggtatgcaacagagattttacaaccaaaattggcctgggacaacacaagagattggcacacccagcagtgagaaatcaggaaaggatcgttgcttcccaaccgaaagaaacatcaaatagaggtgctcacaaaaggtgctggacaaaggaggaggaagaattactaataagactggaggctcagttcgagggaaacaaaaatattaataagcttattgcagaacacataaccaccaaaacagctaagcagatcagtgacaaaaggcgattgctgtccagaaagccagcagaggagccacgtgaggagcctggaacgtgtcatcacaccaggagagcagctgcgagcctgagaacggagcctgagatgagtcatcacgcccaggcagaggacagagataatggacctgggagacgccctctgccaggcagggcagctgccggagggagaacaatggacgagataagacgccaccctgataagggcaacggacagcagagacccaccaagcaaaaatcagaagaacagctgcaggcttactataaaaagacactagaggaacgactttcagctggggcacttaacaccttcccccgagcattcaagcaggtaatggaaggccgggatataaagctagtaatcaatcagacagcgcaggactgcttcggatgcctggaatccataagccaaataagaacggcaacccgagataaaaaggacacggtgacccgggagaaacacccaaagaaaccttttcagaagtggatgaagaagagagcaatcaaaaaaggtaattatcttcggttccagcgtttattttatcttgatagagggaaactggctaaaatcattttagatgatattgaatgcttgtcttgtgacataccactcagtgaaatttattcggtttttaaaacaagatgggaaacaactggtagctttaaaagccttggggactttaaaacttacgggaaggctgacaacactgccttcagagaattaattacggctaaagaaattgagaaaaatgtgcaggaaatgagcaaaggctcggctcccggtccagacgggattactcttggggacgtcgtaaagatggatcccgagttttcccggaccatggagattttcaatttatggttaacaactggtaaaatcccggacatggtgagggggtgcagaaccgttttgattccaaaatcatcaaagccggatcgtttgaaagacattaataactggagacctatcacgatcggttccatcttgctgagactgttctccaggattgtaacagctaggctgagcaaagcgtgccccctgaacccaaggcaaagaggctttatcagagcggcgggatgctctgaaaacttaaaactcctgcaaactataatttggtcggccaaaagagaacacagaccactgggtgttgtattcgtggacatcgccaaggcttttgacaccgtaagccaccagcacatcattcatgctttgcagcaaagagaggtggatccccacatcgtcggtctggtgagcaatatgtacgagaacatcagtacgtatatcaccacaaagaggaacacacacacagacaaaatccagatccgggttggagtaaagcagggtgacccgatgtcgccccttttatttaacctggcaatggaccctctattatgcaagctggaagagagtggcaaaggataccaccgaggacagagcagcatcacagcgatggcatttgcagacgatctggttttgctgagcgactcctgggaaaatatgaatacaaatattagcatactggagaccttctgcaatctgaccggactcaaaacacaggggcaaaagtgccacggcttttacatcaagccgacaaaggactcttacaccatcaatgactgcgctgcctggactatcaacggcacacccctgaacatgatcgaccccggcgaatctgagaaatacctcggcctgcagtttgacccgtggattggaatagcaaggtccggtctctccacaaaactagatttttggcttcagcggatcgatcaagcaccacttaaacctctgcagaaaactgatattctcaaaacatacaccatccctcggctgatctacatagctgaccactcagaagtgaaaagcgcactactcgaaacccttgaccagaagatccggacagcggtcaaggaatggcttcacctacctccgtgcacctgcgatgccatcctgtactcgagcacgagagacggcggtttgggcatcaccaaattggcaggactgatccccagcgtgcaggcccgtagactgcatcggatcgcacagtcatctgacgatacgatgaaatgcttcatggaaaaagagaaaatggaacagctgcataagaaattgtggattcaagctggaggggacagagagaacataccctcgatttgggaagcaccaccgtcgagtgaaccaccaaacaacgtgagcacaaattcggaatgggaagcaccgacccagaaagataaatttccaaagccttgcaattggaggaaaaacgaattcaaaaaatggaccaaattggcatcccaaggccgcggaattgtaaattttgaaagagacaaaattagtaaccattggatccaatactacagacgcatacctcacaggaaactcctcactgcactacaactcagggccaacgtttaccccacgagagaatttctagccaggggtagacaagaccaatacatcaaggcgtgtaggcactgcgatgcggacaacgaatcctgcgcccacatcatcggcaactgcccagtgacacaggacgcccgaatcaagaggcacaattacatctgcgaactgcttctcgaggaggcgaagaagaaggactgggtagtgttcaaggaaccgcacataagggattccaacaaggaactgtacaaacctgacctgatatttgtgaaggatgggcgtgcacttgtcgtggatgtgacagtacggtatgaagcagccaaatcatcgctggaggaagccgctgcagagaaagtgagaaagtacaaacacctggaaacggaagtaagacatctcacgaatgcaaaggacgttacttttgtgggctttcccctaggagcgcgggggaaatggcaccaagataactttaaacttttgactgagcttggcctctccaaatcgaggcaagtgaaaatggcagagactttttccacagtagcgctcttttcatctgtggacattgtacatatgtttgccagtagggccagaaaatctatggttatgtgataataggctgccttctgcggggcttgccttctggccatgcccttcttctctcccttgcacctgtacctcttggtctttgaataaagcctgagtaggaaggaccggtaaaaaaaaaaaaaaaaaaaaaaaaaaaaaaacgttgactaaaaaaaaaaaaaaaaaaaaaaaaaaaaaaaaaaaaaaaaaaaaaaaaaaaaaaaaaaaaaaaaaaaaaa

SEQ ID NO: 11791 - DNA, 5144 bp, synthetic construct
  source 1..5144: mol_type = other DNA
gaaataagagagaaaagaagagtaagaagaaatataagagaattcgccaccatggcccctaagaaaaagcggaaggtgaatatcagcggctctagctgcggcagccccaacagcgccgacaccagcagcgacttcaaggacctgtggaccaagctgaaggaatgccacgaccgggaagtgcagggactccaggtgaaggtcaccaaactcaagcaagaaagaatcctggacgcccagagactggaagaattcttcaccaagaaccagcagctgagagagcagcagaaagtgctgcacgagacaatcaaggttctggaagatagactgcgggccggcctgtgcgacagatgcgccgtgaccgaggaacacatgcgcaaaaagcagcaggagttcgagaacattagacagcaaaatctgaaattgatcacagagctgatgaacgagagaaacacactgcaggaggagaacaagaagctgagcgagcagctgcaacagaagatcgagaatgatcagcaacaccaggccgctgagctggaatgtgaagaggacgtgatccccgacagcccaatcacagctttcagcttttctggcgtgaacagactgaggcggaaggaaaacccccacgtgcggtacatcgagcagacccataccaagctggaacacagcgtgtgtgccaacgagatgagaaaggtgtccaagtcctccacccatccccagcacaaccctaacgaaaatgagatcctggtggctgatacctacgaccagtctcagagccctatggccaaggcccacggcaccagctcttatacccctgataagagctccttcaacctggccaccgtggtggccgagacactgggcctgggcgtgcaggaggaaagcgagacacagggcccaatgagccctctgggagatgagctgtaccactgcctggaaggcaaccacaagaaacagccttttgagtccggctccgagactcctggaacaagcgagagcgctacacctgagggcagcgtgaccgtgaagttcaagtacaagggcgaggaaaaggaagtggacatcagcaagatcaagaaggtctggcgggtgggcaagatgatcagctttacctacgacgataacggcaagacaggcagaggcgccgtgtccgagaaggacgcccctaaagagctgctgcagatgctggaaaaaagcggctctgagacacctggaacaagcgagagcgccaccccggaatcctatgaacaacttgcaccacaaccgtgtgtgggagaaactttacattctagcctcccacgagacagtgaactgtttgtgcctgaagaggggagcagcgagaaggagagcgaggacgcgccaaaaacatctcctccgacgcctgggaaacatggtttggaacagactggggaggaaaaagtgatggtgactgttcctgacaaaaatccaccttgtccttgctgtggtacccgggtaaactctgtgttgaatctgattgaacatctgaaagtgtcacacgggaaaaggagggtttgttttcggtgtgcaaaatgtggaaaggaaaatagtaactatcacagtgttgtttgtcattttaagaaatgcaggggtccagagacggagaaagccccagctggggagtggatttgtgaggtatgcaacagagattttacaaccaaaattggcctgggacaacacaagagattggcacacccagcagtgagaaatcaggaaaggatcgttgcttcccaaccgaaagaaacatcaaatagaggtgctcacaaaaggtgctggacaaaggaggaggaagaattactaataagactggaggctcagttcgagggaaacaaaaatattaataagcttattgcagaacacataaccaccaaaacagctaagcagatcagtgacaaaaggcgattgctgtccagaaagccagcagaggagccacgtgaggagcctggaacgtgtcatcacaccaggagagcagctgcgagcctgagaacggagcctgagatgagtcatcacgcccaggcagaggacagagataatggacctgggagacgccctctgccaggcagggcagctgccggagggagaacaatggacgagataagacgccaccctgataagggcaacggacagcagagacccaccaagcaaaaatcagaagaacagctgcaggcttactataaaaagacactagaggaacgactttcagctggggcacttaacaccttcccccgagcattcaagcaggtaatggaaggccgggatataaagctagtaatcaatcagacagcgcaggactgcttcggatgcctggaatccataagccaaataagaacggcaacccgagataaaaaggacacggtgacccgggagaaacacccaaagaaaccttttcagaagtggatgaagaagagagcaatcaaaaaaggtaattatcttcggttccagcgtttattttatcttgatagagggaaactggctaaaatcattttagatgatattgaatgcttgtcttgtgacataccactcagtgaaatttattcggtttttaaaacaagatgggaaacaactggtagctttaaaagccttggggactttaaaacttacgggaaggctgacaacactgccttcagagaattaattacggctaaagaaattgagaaaaatgtgcaggaaatgagcaaaggctcggctcccggtccagacgggattactcttggggacgtcgtaaagatggatcccgagttttcccggaccatggagattttcaatttatggttaacaactggtaaaatcccggacatggtgagggggtgcagaaccgttttgattccaaaatcatcaaagccggatcgtttgaaagacattaataactggagacctatcacgatcggttccatcttgctgagactgttctccaggattgtaacagctaggctgagcaaagcgtgccccctgaacccaaggcaaagaggctttatcagagcggcgggatgctctgaaaacttaaaactcctgcaaactataatttggtcggccaaaagagaacacagaccactgggtgttgtattcgtggacatcgccaaggcttttgacaccgtaagccaccagcacatcattcatgctttgcagcaaagagaggtggatccccacatcgtcggtctggtgagcaatatgtacgagaacatcagtacgtatatcaccacaaagaggaacacacacacagacaaaatccagatccgggttggagtaaagcagggtgacccgatgtcgccccttttatttaacctggcaatggaccctctattatgcaagctggaagagagtggcaaaggataccaccgaggacagagcagcatcacagcgatggcatttgcagacgatctggttttgctgagcgactcctgggaaaatatgaatacaaatattagcatactggagaccttctgcaatctgaccggactcaaaacacaggggcaaaagtgccacggcttttacatcaagccgacaaaggactcttacaccatcaatgactgcgctgcctggactatcaacggcacacccctgaacatgatcgaccccggcgaatctgagaaatacctcggcctgcagtttgacccgtggattggaatagcaaggtccggtctctccacaaaactagatttttggcttcagcggatcgatcaagcaccacttaaacctctgcagaaaactgatattctcaaaacatacaccatccctcggctgatctacatagctgaccactcagaagtgaaaagcgcactactcgaaacccttgaccagaagatccggacagcggtcaaggaatggcttcacctacctccgtgcacctgcgatgccatcctgtactcgagcacgagagacggcggtttgggcatcaccaaattggcaggactgatccccagcgtgcaggcccgtagactgcatcggatcgcacagtcatctgacgatacgatgaaatgcttcatggaaaaagagaaaatggaacagctgcataagaaattgtggattcaagctggaggggacagagagaacataccctcgatttgggaagcaccaccgtcgagtgaaccaccaaacaacgtgagcacaaattcggaatgggaagcaccgacccagaaagataaatttccaaagccttgcaattggaggaaaaacgaattcaaaaaatggaccaaattggcatcccaaggccgcggaattgtaaattttgaaagagacaaaattagtaaccattggatccaatactacagacgcatacctcacaggaaactcctcactgcactacaactcagggccaacgtttaccccacgagagaatttctagccaggggtagacaagaccaatacatcaaggcgtgtaggcactgcgatgcggacaacgaatcctgcgcccacatcatcggcaactgcccagtgacacaggacgcccgaatcaagaggcacaattacatctgcgaactgcttctcgaggaggcgaagaagaaggactgggtagtgttcaaggaaccgcacataagggattccaacaaggaactgtacaaacctgacctgatatttgtgaaggatgggcgtgcacttgtcgtggatgtgacagtacggtatgaagcagccaaatcatcgctggaggaagccgctgcagagaaagtgagaaagtacaaacacctggaaacggaagtaagacatctcacgaatgcaaaggacgttacttttgtgggctttcccctaggagcgcgggggaaatggcaccaagataactttaaacttttgactgagcttggcctctccaaatcgaggcaagtgaaaatggcagagactttttccacagtagcgctcttttcatctgtggacattgtacatatgtttgccagtagggccagaaaatctatggttatgtgataataggctgccttctgcggggcttgccttctggccatgcccttcttctctcccttgcacctgtacctcttggtctttgaataaagcctgagtaggaaggaccggtaaaaaaaaaaaaaaaaaaaaaaaaaaaaaaacgttgactaaaaaaaaaaaaaaaaaaaaaaaaaaaaaaaaaaaaaaaaaaaaaaaaaaaaaaaaaaaaaaaaaaaaaa

SEQ ID NO: 11792 - DNA, 5144 bp, synthetic construct
  source 1..5144: mol_type = other DNA
gaaataagagagaaaagaagagtaagaagaaatataagagaattcgccaccatggcccctaagaaaaagcggaaggtgaatatcagcggctctagctgcggcagccccaacagcgccgacaccagcagcgacttcaaggacctgtggaccaagctgaaggaatgccacgaccgggaagtgcagggactccaggtgaaggtcaccaaactcaagcaagaaagaatcctggacgcccagagactggaagaattcttcaccaagaaccagcagctgagagagcagcagaaagtgctgcacgagacaatcaaggttctggaagatagactgcgggccggcctgtgcgacagatgcgccgtgaccgaggaacacatgcgcaaaaagcagcaggagttcgagaacattagacagcaaaatctgaaattgatcacagagctgatgaacgagagaaacacactgcaggaggagaacaagaagctgagcgagcagctgcaacagaagatcgagaatgatcagcaacaccaggccgctgagctggaatgtgaagaggacgtgatccccgacagcccaatcacagctttcagcttttctggcgtgaacagactgaggcggaaggaaaacccccacgtgcggtacatcgagcagacccataccaagctggaacacagcgtgtgtgccaacgagatgagaaaggtgtccaagtcctccacccatccccagcacaaccctaacgaaaatgagatcctggtggctgatacctacgaccagtctcagagccctatggccaaggcccacggcaccagctcttatacccctgataagagctccttcaacctggccaccgtggtggccgagacactgggcctgggcgtgcaggaggaaagcgagacacagggcccaatgagccctctgggagatgagctgtaccactgcctggaaggcaaccacaagaaacagccttttgagtccggctccgagactcctggaacaagcgagagcgctacacctgagggcagcgtgaccgtgaagttcaagtacaagggcgaggaaaaggaagtggacatcagcaagatcaagaaggtctggcgggtgggcaagatgatcagctttacctacgacgataacggcaagacaggcagaggcgccgtgtccgagaaggacgcccctaaagagctgctgcagatgctggaaaaaagcggctctgagacacctggaacaagcgagagcgccaccccggaatcctatgaacaacttgcaccacaaccgtgtgtgggagaaactttacattctagcctcccacgagacagtgaactgtttgtgcctgaagaggggagcagcgagaaggagagcgaggacgcgccaaaaacatctcctccgacgcctgggaaacatggtttggaacagactggggaggaaaaagtgatggtgactgttcctgacaaaaatccaccttgtccttgctgtggtacccgggtaaactctgtgttgaatctgattgaacatctgaaagtgtcacacgggaaaaggggggtttgttttcggtgtgcaaaatgtggaaaggaaaatagtaactatcacagtgttgtttgtcattttaagaaatgcaggggtccagagacggagaaagccccagctggggagtggatttgtgaggtatgcaacagagattttacaaccaaaattggcctgggacaacacaagagattggcacacccagcagtgagaaatcaggaaaggatcgttgcttcccaaccgaaagaaacatcaaatagaggtgctcacaaaaggtgctggacaaaggaggaggaagaattactaataagactggaggctcagttcgagggaaacaaaaatattaataagcttattgcagaacacataaccaccaaaacagctaagcagatcagtgacaaaaggcgattgctgtccagaaagccagcagaggagccacgtatggagcctggaacgtgtcatcacaccaggagagcagctgcgagcctgagaacggagcctgagatgagtcatcacgcccaggcagaggacagagataatggacctgggagacgccctctgccaggcagggcagctgccggagggagaacaatggacgagataagacgccaccctgataagggcaacggacagcagagacccaccaagcaaaaatcagaagaacagctgcaggcttactataaaaagacactagaggaacgactttcagctggggcacttaacaccttcccccgagcattcaagcaggtaatggaaggccgggatataaagctagtaatcaatcagacagcgcaggactgcttcggatgcctggaatccataagccaaataagaacggcaacccgagataaaaaggacacggtgacccgggagaaacacccaaagaaaccttttcagaagtggatgaagaagagagcaatcaaaaaaggtaattatcttcggttccagcgtttattttatcttgatagagggaaactggctaaaatcattttagatgatattgaatgcttgtcttgtgacataccactcagtgaaatttattcggtttttaaaacaagatgggaaacaactggtagctttaaaagccttggggactttaaaacttacgggaaggctgacaacactgccttcagagaattaattacggctaaagaaattgagaaaaatgtgcaggaaatgagcaaaggctcggctcccggtccagacgggattactcttggggacgtcgtaaagatggatcccgagttttcccggaccatggagattttcaatttatggttaacaactggtaaaatcccggacatggtgagggggtgcagaaccgttttgattccaaaatcatcaaagccggatcgtttgaaagacattaataactggagacctatcacgatcggttccatcttgctgagactgttctccaggattgtaacagctaggctgagcaaagcgtgccccctgaacccaaggcaaagaggctttatcagagcggcgggatgctctgaaaacttaaaactcctgcaaactataatttggtcggccaaaagagaacacagaccactgggtgttgtattcgtggacatcgccaaggcttttgacaccgtaagccaccagcacatcattcatgctttgcagcaaagagaggtggatccccacatcgtcggtctggtgagcaatatgtacgagaacatcagtacgtatatcaccacaaagaggaacacacacacagacaaaatccagatccgggttggagtaaagcagggtgacccgatgtcgccccttttatttaacctggcaatggaccctctattatgcaagctggaagagagtggcaaaggataccaccgaggacagagcagcatcacagcgatggcatttgcagacgatctggttttgctgagcgactcctgggaaaatatgaatacaaatattagcatactggagaccttctgcaatctgaccggactcaaaacacaggggcaaaagtgccacggcttttacatcaagccgacaaaggactcttacaccatcaatgactgcgctgcctggactatcaacggcacacccctgaacatgatcgaccccggcgaatctgagaaatacctcggcctgcagtttgacccgtggattggaatagcaaggtccggtctctccacaaaactagatttttggcttcagcggatcgatcaagcaccacttaaacctctgcagaaaactgatattctcaaaacatacaccatccctcggctgatctacatagctgaccactcagaagtgaaaagcgcactactcgaaacccttgaccagaagatccggacagcggtcaaggaatggcttcacctacctccgtgcacctgcgatgccatcctgtactcgagcacgagagacggcggtttgggcatcaccaaattggcaggactgatccccagcgtgcaggcccgtagactgcatcggatcgcacagtcatctgacgatacgatgaaatgcttcatggaaaaagagaaaatggaacagctgcataagaaattgtggattcaagctggaggggacagagagaacataccctcgatttgggaagcaccaccgtcgagtgaaccaccaaacaacgtgagcacaaattcggaatgggaagcaccgacccagaaagataaatttccaaagccttgcaattggaggaaaaacgaattcaaaaaatggaccaaattggcatcccaaggccgcggaattgtaaattttgaaagagacaaaattagtaaccattggatccaatactacagacgcatacctcacaggaaactcctcactgcactacaactcagggccaacgtttaccccacgagagaatttctagccaggggtagacaagaccaatacatcaaggcgtgtaggcactgcgatgcggacaacgaatcctgcgcccacatcatcggcaactgcccagtgacacaggacgcccgaatcaagaggcacaattacatctgcgaactgcttctcgaggaggcgaagaagaaggactgggtagtgttcaaggaaccgcacataagggattccaacaaggaactgtacaaacctgacctgatatttgtgaaggatgggcgtgcacttgtcgtggatgtgacagtacggtatgaagcagccaaatcatcgctggaggaagccgctgcagagaaagtgagaaagtacaaacacctggaaacggaagtaagacatctcacgaatgcaaaggacgttacttttgtgggctttcccctaggagcgcgggggaaatggcaccaagataactttaaacttttgactgagcttggcctctccaaatcgaggcaagtgaaaatggcagagactttttccacagtagcgctcttttcatctgtggacattgtacatatgtttgccagtagggccagaaaatctatggttatgtgataataggctgccttctgcggggcttgccttctggccatgcccttcttctctcccttgcacctgtacctcttggtctttgaataaagcctgagtaggaaggaccggtaaaaaaaaaaaaaaaaaaaaaaaaaaaaaaacgttgactaaaaaaaaaaaaaaaaaaaaaaaaaaaaaaaaaaaaaaaaaaaaaaaaaaaaaaaaaaaaaaaaaaaaaa

SEQ ID NO: 11793 - DNA, 4484 bp, synthetic construct
  source 1..4484: mol_type = other DNA
gaaataagagagaaaagaagagtaagaagaaatataagagaattcgccaccatggcccctaagaaaaagagaaaggtggtgaccgtgaagttcaagtacaagggcgaggaaaaggaagtggacatcagcaagatcaagaaggtctggcgggtgggcaagatgatcagctttacctacgacgataacggcaagacaggcagaggcgccgtgtccgagaaggacgcccctaaagagctgctgcagatgctggaaaaaagcggctctgagacacctggaacaagcgagagcgccaccccggaatcccctaagagaaaggtgtccagcgccgagggcgctgccaaggaagagcctaaacggagaagcgccagactgagcgccaagccccccgccaaggtggaagccaagcctaagaaggccgccgctaaggacaagagcagcgataagaaagtccagaccaagggcaagcggggcgccaaaggcaaacaggccgaggtggccaaccaggagacaaaggaagatctgcctgctgagaacggcgaaaccaagaccgaggaatctccagcttctgacgaggccggagagaaggaggccaaaagcgacagcggctctgagacacctggaacaagcgagagcgccaccccggaatccctgtttgtgcctgaagaggggagcagcgagaaggagagcgaggacgcgccaaaaacatctcctccgacgcctgggaaacatggtttggaacagactggggaggaaaaagtgatggtgactgttcctgacaaaaatccaccttgtccttgctgtggtacccgggtaaactctgtgttgaatctgattgaacatctgaaagtgtcacacgggaaaaggggggtttgttttcggtgtgcaaaatgtggaaaggaaaatagtaactatcacagtgttgtttgtcattttaagaaatgcaggggtccagagacggagaaagccccagctggggagtggatttgtgaggtatgcaacagagattttacaaccaaaattggcctgggacaacacaagagattggcacacccagcagtgagaaatcaggaaaggatcgttgcttcccaaccgaaagaaacatcaaatagaggtgctcacaaaaggtgctggacaaaggaggaggaagaattactaataagactggaggctcagttcgagggaaacaaaaatattaataagcttattgcagaacacataaccaccaaaacagctaagcagatcagtgacaaaaggcgattgctgtccagaaagccagcagaggagccacgtatggagcctggaacgtgtcatcacaccaggagagcagctgcgagcctgagaacggagcctgagatgagtcatcacgcccaggcagaggacagagataatggacctgggagacgccctctgccaggcagggcagctgccggagggagaacaatggacgagataagacgccaccctgataagggcaacggacagcagagacccaccaagcaaaaatcagaagaacagctgcaggcttactataaaaagacactagaggaacgactttcagctggggcacttaacaccttcccccgagcattcaagcaggtaatggaaggccgggatataaagctagtaatcaatcagacagcgcaggactgcttcggatgcctggaatccataagccaaataagaacggcaacccgagataaaaaggacacggtgacccgggagaaacacccaaagaaaccttttcagaagtggatgaagaagagagcaatcaaaaaaggtaattatcttcggttccagcgtttattttatcttgatagagggaaactggctaaaatcattttagatgatattgaatgcttgtcttgtgacataccactcagtgaaatttattcggtttttaaaacaagatgggaaacaactggtagctttaaaagccttggggactttaaaacttacgggaaggctgacaacactgccttcagagaattaattacggctaaagaaattgagaaaaatgtgcaggaaatgagcaaaggctcggctcccggtccagacgggattactcttggggacgtcgtaaagatggatcccgagttttcccggaccatggagattttcaatttatggttaacaactggtaaaatcccggacatggtgagggggtgcagaaccgttttgattccaaaatcatcaaagccggatcgtttgaaagacattaataactggagacctatcacgatcggttccatcttgctgagactgttctccaggattgtaacagctaggctgagcaaagcgtgccccctgaacccaaggcaaagaggctttatcagagcggcgggatgctctgaaaacttaaaactcctgcaaactataatttggtcggccaaaagagaacacagaccactgggtgttgtattcgtggacatcgccaaggcttttgacaccgtaagccaccagcacatcattcatgctttgcagcaaagagaggtggatccccacatcgtcggtctggtgagcaatatgtacgagaacatcagtacgtatatcaccacaaagaggaacacacacacagacaaaatccagatccgggttggagtaaagcagggtgacccgatgtcgccccttttatttaacctggcaatggaccctctattatgcaagctggaagagagtggcaaaggataccaccgaggacagagcagcatcacagcgatggcatttgcagacgatctggttttgctgagcgactcctgggaaaatatgaatacaaatattagcatactggagaccttctgcaatctgaccggactcaaaacacaggggcaaaagtgccacggcttttacatcaagccgacaaaggactcttacaccatcaatgactgcgctgcctggactatcaacggcacacccctgaacatgatcgaccccggcgaatctgagaaatacctcggcctgcagtttgacccgtggattggaatagcaaggtccggtctctccacaaaactagatttttggcttcagcggatcgatcaagcaccacttaaacctctgcagaaaactgatattctcaaaacatacaccatccctcggctgatctacatagctgaccactcagaagtgaaaagcgcactactcgaaacccttgaccagaagatccggacagcggtcaaggaatggcttcacctacctccgtgcacctgcgatgccatcctgtactcgagcacgagagacggcggtttgggcatcaccaaattggcaggactgatccccagcgtgcaggcccgtagactgcatcggatcgcacagtcatctgacgatacgatgaaatgcttcatggaaaaagagaaaatggaacagctgcataagaaattgtggattcaagctggaggggacagagagaacataccctcgatttgggaagcaccaccgtcgagtgaaccaccaaacaacgtgagcacaaattcggaatgggaagcaccgacccagaaagataaatttccaaagccttgcaattggaggaaaaacgaattcaaaaaatggaccaaattggcatcccaaggccgcggaattgtaaattttgaaagagacaaaattagtaaccattggatccaatactacagacgcatacctcacaggaaactcctcactgcactacaactcagggccaacgtttaccccacgagagaatttctagccaggggtagacaagaccaatacatcaaggcgtgtaggcactgcgatgcggacaacgaatcctgcgcccacatcatcggcaactgcccagtgacacaggacgcccgaatcaagaggcacaattacatctgcgaactgcttctcgaggaggcgaagaagaaggactgggtagtgttcaaggaaccgcacataagggattccaacaaggaactgtacaaacctgacctgatatttgtgaaggatgggcgtgcacttgtcgtggatgtgacagtacggtatgaagcagccaaatcatcgctggaggaagccgctgcagagaaagtgagaaagtacaaacacctggaaacggaagtaagacatctcacgaatgcaaaggacgttacttttgtgggctttcccctaggagcgcgggggaaatggcaccaagataactttaaacttttgactgagcttggcctctccaaatcgaggcaagtgaaaatggcagagactttttccacagtagcgctcttttcatctgtggacattgtacatatgtttgccagtagggccagaaaatctatggttatgtgataataggctgccttctgcggggcttgccttctggccatgcccttcttctctcccttgcacctgtacctcttggtctttgaataaagcctgagtaggaaggaccggtaaaaaaaaaaaaaaaaaaaaaaaaaaaaaaacgttgactaaaaaaaaaaaaaaaaaaaaaaaaaaaaaaaaaaaaaaaaaaaaaaaaaaaaaaaaaaaaaaaaaaaaaa

SEQ ID NO: 11794 - DNA, 5144 bp, synthetic construct; identical to SEQ ID NO: 10629
  source 1..5144: mol_type = other DNA
